United States Patent Application Publication US 2007/0161031 A1 - sequence listing, part 31

SEQ ID NO: 39240 - DNA, 2300 bp, Homo sapien
ttttgaaatagcaatttcattttattattattattttgagataagatctcacttctacgcccaggctggagtgcggtggtgtgcctcctgggttcaagcaattctcccacctcagcctcccaagtaggtggaactataggtgtgtgtcaccacgccaggctaatttttgtattttttgtagagacaaggttttgccatattgcccaggctggtctcgaactcttggactcaagtgatctgcctgccttagcctctcaaagtgttgggattacaaatgtgagccaccgtgcctggcctagcaatttcatttttaaagaaagaaatataaaacgatctacccattcacattttccccatccatactttaaattttaaaaatatgaaataatgaaatactcagcagatacaaataataaaatacttatatataatgatatttcgacttcatattagggcttcaaaggtcaggaaagagggagagatacagaagagaaaaaaaaaaaacgttaacacatgagtgtctttttttaacttgttaaaggtaaagttcaacccaggagaagggaggggagggaaggtcaaagttctgattcatcaacaaatactactttatttgttaaaaatacaaggctctgcttggcgcagtggctcccgcctgtaatcccagcactttgggaggccaaggcgggtggatcgcctgaggtcaggagctcgagaccagcctggccaacatggtgaaaccccgtctctacttgggaggctgaggcaggagaatcgcttgaactggggaggcagaggttgcagtgagctgagatcgcactgctgcactccagcccgggtgacagagcaagactccatatcaaaaaataaaataaaataaaatgaacaatgaaaagacaggagggaggttcctgagtaagctgattcgagtggaaatcagacatcaaaattgaaacccgctgaattttccaaaaagccagatgctcatagaactgaagcttgagacacttacatcagtacacctgctgcctgttgaccaattcctcttccttgtccctcctgttttccttccctgctatataagcccctaactttagtcaaggggagggatggattggaggtttgtctcccctctcaacagctcactggctgatgtcaccggaataaagtcttccctggcaatactcgctgtctcagtgataggctttctgtgcggtgagcagccagacctggaccaaacccctggcaatccataacaaaatcataagcaaaatcaaccaggaagctatttgcaccctggaaccccacctgggaggggaagtcaaggcagactttccagagaaggcgatgctgaaaatttcagaaacagaaattttgaagagcaagagttaccaagcgaagaacattccatgagaaggaacaggaggtgtgtgaaggtggaggttctggggtgaggttctttatggaatcgaaaacggttcagaaccacaggtcgacggtcaaggtagtagtgagaggaggtgggacaggcgaccacgccgctgcccctgggatgactggaaggcgacttaggggagctggggcgagacaggtgcagggtttgaggatgagaaaggcacagagtgactagaggattcccgcctgcaagcacatctggaaggggtgtctggatcctgggggcagcgactgtgttctagggcgagagccaccctcgccaggggtgtaggcaggcgagaggagggcctggagctgtgggtcggccacactgcgccctcatttgtgtgcagccccggaggaccagagtggggaagcaccccaccctctcccagggcccaactgagcactgcagcgggaggtacggggttgtcaaatgacagttttgccattccagattgccaaaagagccagtggccagtctagggcaccgcgccgtctggcatctccctggaggccctgggcctggcccgaggctcagcccggatctgcagttgccaggtcagtgcggggcccggagtggattcgcggggcggggcggggcactgcccgcgcccggagctcagcagcagctgcccaggggcgggggcggcaagacgcggaagtgcccggcaggttggcggaccggcgggaggcgcagcctgggcagagctcagcttggtcccgccgcccggccggtgctccctggcgcagccacgcaggcgcaccgcagacaggtgggtcccggccgccgcgctctcctctctgcgtccgcgcccggcgcgccccgagggtggcgggagcggtgccggctactgcccccaagt

SEQ ID NO: 39241 - DNA, 2300 bp, Homo sapien
tgagccaccgtgcctggcctagcaatttcatttttaaagaaagaaatataaaacgatctacccattcacattttccccatccatactttaaattttaaaaatatgaaataatgaaatactcagcagatacaaataataaaatacttatatataatgatatttcgacttcatattagggcttcaaaggtcaggaaagagggagagatacagaagagaaaaaaaaaaaacgttaacacatgagtgtctttttttaacttgttaaaggtaaagttcaacccaggagaagggaggggagggaaggtcaaagttctgattcatcaacaaatactactttatttgttaaaaatacaaggctctgcttggcgcagtggctcccgcctgtaatcccagcactttgggaggccaaggcgggtggatcgcctgaggtcaggagctcgagaccagcctggccaacatggtgaaaccccgtctctacttgggaggctgaggcaggagaatcgcttgaactggggaggcagaggttgcagtgagctgagatcgcactgctgcactccagcccgggtgacagagcaagactccatatcaaaaaataaaataaaataaaatgaacaatgaaaagacaggagggaggttcctgagtaagctgattcgagtggaaatcagacatcaaaattgaaacccgctgaattttccaaaaagccagatgctcatagaactgaagcttgagacacttacatcagtacacctgctgcctgttgaccaattcctcttccttgtccctcctgttttccttccctgctatataagcccctaactttagtcaaggggagggatggattggaggtttgtctcccctctcaacagctcactggctgatgtcaccggaataaagtcttccctggcaatactcgctgtctcagtgataggctttctgtgcggtgagcagccagacctggaccaaacccctggcaatccataacaaaatcataagcaaaatcaaccaggaagctatttgcaccctggaaccccacctgggaggggaagtcaaggcagactttccagagaaggcgatgctgaaaatttcagaaacagaaattttgaagagcaagagttaccaagcgaagaacattccatgagaaggaacaggaggtgtgtgaaggtggaggttctggggtgaggttctttatggaatcgaaaacggttcagaaccacaggtcgacggtcaaggtagtagtgagaggaggtgggacaggcgaccacgccgctgcccctgggatgactggaaggcgacttaggggagctggggcgagacaggtgcagggtttgaggatgagaaaggcacagagtgactagaggattcccgcctgcaagcacatctggaaggggtgtctggatcctgggggcagcgactgtgttctagggcgagagccaccctcgccaggggtgtaggcaggcgagaggagggcctggagctgtgggtcggccacactgcgccctcatttgtgtgcagccccggaggaccagagtggggaagcaccccaccctctcccagggcccaactgagcactgcagcgggaggtacggggttgtcaaatgacagttttgccattccagattgccaaaagagccagtggccagtctagggcaccgcgccgtctggcatctccctggaggccctgggcctggcccgaggctcagcccggatctgcagttgccaggtcagtgcggggcccggagtggattcgcggggcggggcggggcactgcccgcgcccggagctcagcagcagctgcccaggggcgggggcggcaagacgcggaagtgcccggcaggttggcggaccggcgggaggcgcagcctgggcagagctcagcttggtcccgccgcccggccggtgctccctggcgcagccacgcaggcgcaccgcagacaggtgggtcccggccgccgcgctctcctctctgcgtccgcgcccggcgcgccccgagggtggcgggagcggtgccggctactgcccccaagtctaggcctagactgggccccgcgccccccaggcacctgcgggcggcgggatgaagactggagtagggcggggtccgcgtccagctgcgcctggaaagcgagctcgggggggtgcctacagcagggtgcgcccggccggcctgggacttccaaagcgcctcccacgccccgatcggtttggggtgctggcgcccggggagcccagtgacccaggcggcggagtgggcagcgctgcggggggcgccggctctgctgctctccctccccctcgccatcgc

SEQ ID NO: 39242 - DNA, 2300 bp, Homo sapien
ccagaacttaagaaggcaacaatgaagaggctaaacgtggaggaaaagtgaggctagcatggccgggatgcgtggggagatggttgtctccggaccccgggaggggcgggagcgggtacctgggagcagaggctggagtgggggactttcccagcctcgcggccacgctgaacacagcagggcgaggaccggggtgctgctcctccagcagcaggaggagaggtccagaggccgactctggaggtgggggtggctccgcgggctggcccagggggtgtgccccagcggagcacgcgggaggggtgggggcggaggggaggggggagcaggggcggaggactgggctgggcctgggctcctcgagggcccagaatggggataagtgaccagaaccagagagggctcggctgtatcgatgtaggaaactgtagcccctcaggaggccctctggcaagacctccccttcctgcccccacccccagtagttatggggcctggggtgctggggctgaggggttccaagagtcaagggaagcactgggaaatcacccctttttatctaaaggccctactttggggtttttcccctgtaccctggtcttcccctaccctgaccctgggaggaagctgaaagaagcttctttctgggcaccttttgccccagagcctcagcctgtctggaccaggtgggcagcagggcccagggtgtgggcagctgacccggaggggtgggatttgggggtcagggcctgtacagggaaccccttgtcctctccctgagctgggtgtgggtttgcaaggagacatgtgacccagaccaaccctgggagcagcagggcgcctgctgtctggccactcttactaggactgctgtggcacttcctcccctagtgggtccctggtgcccatgaattgcagctcctgggtggtggtgggggcactgtctcctgggactccagcatggccctggggtgagctgtgggcttaccccacctcagcaggtcctctagggctgcccactggatgcttcgctgcctcacacaattgtagggacttcctcaggctgttggatttccccaccttccggggctcaggtccattgacttaggtctagggctccatacatttcacccagagactccggagcctggcaggcagacctgttctgacaccgaacttccaaagtcatgggccttgattggggtggtctgaattagacctagcccttttctgggcagaagggagcttctaggaggatggatgctgttcgggttagagctcgtgtggacctagctgcaggcaaaagccttgaggctgagtcccttctgtggcatggtggacagactctcgctcatcacagccgggcttgtcacgggagctcctcctccacacccctccctaagctgcctgtatggacgcggccctctgacactgaggtcggagttatcatttcaaaaccttgctctgtattaaacagccgtgttgggcagggccagactgctggactgacagtagggggcaggcagccggaccctctgagctccccaacggcaccagcgcctgcacggcctcagcccagggggtcattagggaagctctccccgattctgtgcagacagagcttcctctgtccacccttgctcggccagaattgtgtgccgctggtgactggcacccctctattctagggccaaggcctctcaggggtctacagatacaactatgggtgggtgcacacccatgttataaaccacactaaatgcacaaaaactgtctgcaagtttggggtgcggggaacagctctgggtgggaggttggaaatttggtctgggggacccactcggctccctccctcagcccacagtgagtctggtttctgagttgtcccggtctagccactttcgtttcccctggggccgggtggaggctggggcagaaagcggaactgagcccgcgtgttctgaggccagggcagggctggagcgttctgaacacctccccgtcccagcccctgggccaggcaagggccggccttacctctcctgggttggtggcagcagagctgggctctgagggaggcctgcaatgtgagacagtagcagctcagaggcggcactaggcaggtgcaaccccaaaaggtactgggcagggaatttcaggggaaactgaggctccatgctgcaaggccaaagcaggcccagacacagggagttcagctcgaacgtttgctccttacttgctgaccgacacattcacttctgatgggctgtgctgtgtaatgacccagtcctttctgtctt

SEQ ID NO: 39243 - DNA, 2300 bp, Homo sapien
atcagcttatactgagtgattgtctatccagaggcaaacagccattgtgatgaggctcggacttaatagaagaactagagatattaaggctaggggaaaagacttagaacagcctttaagcatggtagctatttttaaatatttgaaagatggtcttataaaagaaggatcatatttattttatgagtagtcacttgtcagccatttatagggaagcatatactggctctaggaagaaaacacttaaccatactttctgaacacagattggggtgccctgtgaggtaatgaaattcttatcactggtaaatcagagagattgaggtatattaaaggattgggtaaaataacctgtgtgatatcttctaagcctctgtgacttgttaaacaattagccttggcaagagtggatggcttatttgtgaattctgtcctttgttattcatatgaccagattccttaccagctagtgtgactgtgcttttttatatcagattttctttttgtaccttgggtttttgttgtttcccttcataggcacagataaatcagagtcaaatattcttgtcattttctagtggaatttattaaccttgacattgaagtgaggtctaacctgtagtacaatgtggcctcccaattttcagtggtatctaatagatgtagaaaatggttttcaatttttatttatttatttattttagagacagggtctcgcttgttgccaagctgggatgcagtggcatgatcatagctcactgtaaccttgaagccctagactcaagtgaccctcgtgtctcagcttcccaagtggcaaggactacaggtgcacaccactatgcttagctgattttttaaatttttaatagagacagggtcttgctatatagcccaggctggtcttgaactcatggcttcaagtgatcctcctgccttggcctcccaaagtgctgagataccaggcatgagccaccacacctggctgaaaactttttaaagtaacatacttttctataggaattaattaaaaggaaaatcatgctgaaattaggcttttccctcctagttttaaagaaaagtctaactcgtctatggcttatagatggccaagaagattcactctgtttttttaattcaaatttgaaggtttagggataaattactgttctgttgaatgaaacttcaggaagtgaaaacatttatattcaaggtgttttttgacctagaagggacctaggctaatacgtaatcctttggatttggggaaggtgtttcagcagttggtggggttagaatggggattgcagcaagagggaggctgagtaggaagggtctggaccttctgtctccacttgaacctaactgcctcttttggtttttctttttaacctattttattggagttctaagtcaagatttgtttaggagggaaaaagaaagggggtaggaggcttttgtaacttttttttaaaatgaaagaaaggcaaatttaactgttactttgctgttcaagtcacttatttcataaagaaactgaagcccaaagaaaatgtctcttataacctcacagagagtgttatggtgtaagagtgaaatctctaattgcagcccattcttctaaaagcattatgtcagaatttctcttgtgataagaattgctggaagtatttatcaaaaataaagactctctttgacccactaaatcagaatctctgggaagtctgagaaacattacactatggtatacattttaaaatagctttgccattggctttgtgaaggagattttaaaagtctttgacaaatattaacttcagttgtaagtgttaatcagtcttagccttctgagcccaataaagaataaagaaaaaacaactgtaaataacaaagtgttgtcattttaaaaaacaatgctgatctttttaaaagaatggaaccaaaccagttcgctttttctggtcactcacatgatgtagtccagttaagttacctcaattcagcgtttatttttcatttgtatcttcctttgtttttcagggacagcacttgtcctagcccgattacctttggataagattaccgaatgtcttagtgaactatgttctgttcaggttatggcattgaaaaaggtaagtccaattaaggaaggtgtgaaacaaatataagatgtttacatgttaaaaatgaaaagatgaaattacttatttacagatcttttgtctacctagaaaatccaagaaaatgcactaagaatttattaaaattaatgtaatcaaagtagctgcatacaataaatattt

SEQ ID NO: 39244 - DNA, 2300 bp, Homo sapien
gagtgagcttccgtctcaaaaaaataaaaataaaatacaaaacacacacacaaaccaaagattttctcctggtaaaggcagagaataggttgtcttgacttggcatacctcacaatttaggaaaccctctgtctaaaataaaataccctcgtgatttaggcaacttttgttcattgaaacttgactgcttaatggtttttttcttcttcttgattttatagaggtcattgaaagccgcagtgagtttaaagcagatgttatctgatttgatattttaggagggggttcctgaggagactgatgactttggggagtttcgcatgagggtatcagacctggtaaaggacttgattttcttgatagggtctatggagtgttttgctcaggtaagcctatttggagattgtttccagttttactagtcaccttaattgtattcacttctgtgtcttctgtgaatgttccatcttatttcttcaattttagtggctgaatgagataatagatatgcaagtgcctagcacactgcctggcatatagtagctatgtttatttaacattttacaagtcagttgcagtttatggatgattcggttatggtttactctgtatgcttgcactgattgctgttccacttgtacagctggaatagaagatcatagataagcattaaagcctctaggatacttatagggaatttggacctagccaggaacaataggcaagtgtttctgctttagtaattacgtaccaactcctggtaactcttgtagttatttggcattatctttgtccacacttatggttagattcctgtgcagtttcgtcccagaggtgactatgctagagtagaagattcatagtccaggggttttcctgacaatcactgagtaacattttacctcataaggttacaatcatcatcattccatatcacttaacattagtttaatttcaggcagttttcatattgctgtattatattctaatgagctctgaaataccactttggaagctttgtcacagcaatactaaactaacctaatttttttttttttggtaactcagtcattttttgtatatttgggtgtaatatgatctaaaaagtattaataaaagtataactattttcattatattaagcaaagcatgcttattgacccatctatgaagagttgaggattcttagaaagccacttaaatgagatccctggatcttagacagatgacctctgctcagatttcagctcatctctctttagctctatggctttgagaaatcctttgatcttctcaatcctttgacttaatttacaaattatgtaaattatcaatgttgttcaagatatagtctgtggaacaccaaccccatgagatattttttgccaaaaaaaagttattaattaaaattaggaaatggtataaatagtatattaaaggctctgtgaagttgtataataagagagctgtttaattttgcctttcctagcagtgtctgttatttcactataaaaatattatttagtcacattctgtaggtggatataatctgggaaattgtggaccagaacatctctgagtattctgctaggtgtacctttttttaaaaaaattaattctgcttggatacagtattgtgataggtgcttctaaacagctgctttttaggaattcagtcagtactaccagtgttgatgcagacaagtagttaaaacaatagaaatgtaaagccaatacatatatagaggatttacattgtatctctattttaagtgtgtttatgtatttatcagttattatcaggaccaggaaaagacactcatatactgtgttttgtttttctcatagtagtcattttctgggggcagatgataattttgataaactcttgcgggtctaaatgggtttatttcaaatattaaaatagttactcctagttagtgatgatataaaaaaaagaaaataatattctcatctggcttgagaggtaattagatttagaaacaagaagcaggatttactttaactggattttttgttttgtttgttttggcattctgttttccttttaatggatccataatccacctcttcttctctagttatattctactctgaaagaaggcaacccaccctgggaggtgacagaagcggttctctttatcatggctgctatagcaaagagtgttgatccgtgagtgtctcataagtcttttgctgggaactctaaatatcaagaggaaggaaaatgacactattttttttttcttatatggtatatacctggagactttcagaac

SEQ ID NO: 39245 - DNA, 2300 bp, Homo sapien
aagtgctcccaagttgggcattgttttaaatagctctgttttggatccttgatgggaaaaggatggtagggatcctcttactgtgccttaggcacagtggtcctgtgactctcggcctgttttctgttatcacatacaagacaacgtttatttgttttacataatgttacgaggatacctagatttgaatggaacccaaaacatttctgggagaatgtaacaccacgcagttatcactcctttaaacagtaccatatggaaaagaggctacgagtaaaatcccaggctttttctccctttctctcacactcaaggaaacaggtgaataaaagtgacatgaagctgaatcagttatgttcaggagttacagatggtttgccaagtaagaaatgttctaatctcaaacattcaatgaaatgatttcagaattttcagaaaagtactttaaaaaagacttctggccgggcgcagtggctcacgcctgtcagcaccttgggaggccgaggtgggcagatcataaggtcaggagttcaagaccagcctgaccaacatgatgaaaccccatctttactaaaaatacaaaaattagctggggtgatggtgcgcacctgtaatcgcagctactcaggaggctgaggcaggagaatcacttgaacccaggaggtggaagttgcagtgagccaagatcacaccactgtactccagcctgggtgacagagcaagactccatctcaaaaaaaataaataaataaaaataaaaagacttctggctgggcacagtggtttatacctctaatgaggttcatacctcttaacacttttggaggctgaggtgggaggattgcttgagcccatgagttcgagaccagcctgggcaacaaagcaagaccttgtctctacagaaaatttaaaaaattagctgggtgtggtggtgcacacctttcatcccagctactcaggaggctgaatgggaggatcacttgagcccaggagtttgaggctgcagtgagccatgattacaccactgtactccagcctagatggcagagcaagaccctgtcgctacagaaaattttaaaaattagccagacatggtggcaagcgcctgtagtcctcctagctactcaggaggctgtgtggaaggattgcttgagcccagaagttcaaggctgcagtgagccatgattgtgccactgtgctccagcctaggcgaccctgtctctaaagaaaatatatatatcttttgagacagggtctcactctgttgcctaggctggaatgctgtggtgcaatcacagctcactgtagcctcagcctcctgggctcaggtgatcctccaacctcagcctcctgagtagctgggaatacaggcatgtgccacctacatgcctggctaatttttgtatttttttagagatggtgtttcgcgcctggctgaaatttgttttaaataaaataaaactatgtggtggctcatgcctgtagtcccagcactttgggagacctaggtgggaggattacttgagggcaggagttcaaaaccatcctgagcaagatggcaaggccctgtttctactaaaaaaaaaaaaaaaaaaaaaaattagctgagcttggtggtgtgtacctgtagtcccagctacttgggaggctgaggcaggaggatcacttgagctcaggagtttgaggcagcagtgaactgtgttcattccactgcactctagctggggcaacagaatgaaactccgtctctaaaaaataaataaaaataaagacttccatgtctgttattgttttctctaaattcaaaattcagtatacttttggaggcattacctcaggactaaatggaatgtaaagccagtcattctaaatggagatttgggcctaacgtgggaagacaatttggggagataatagtaaatctgctagagaaaaggtgacttcttaactggctccactcatattatttaaaaatatatctttcttcctatatggtcgtggtgataataaaatgtcttcttattctattcctttcccattcaaataaatcatctcttttaacctaacaggtagtagaaatttcatttaacttttggtaccgactgggggaacatttgtacaaaactaacgatgaagttattcatggcatcttcaaagcttacattcagaggctgcttcacgccttggctcgacactgccagctggaaccagaccatgtaagttcccttctctacctcttcaaatcttaatttcttcctcttgtcagtgccaacttgaaaaggaactgagaagatagataa

SEQ ID NO: 39246 - DNA, 2300 bp, Homo sapien
ccagcctggccaacatggcgaaaccccgtttctactaaaaaatacaaaaattagctgggtgtggtggcgtgtgcctgtaatcccagctactcaggaggctgagacaggagaatcacttgaacctgggaggaggaggttgcagtgtgccgagatagcaccactgcactcctccagcctgggcaacagagccagactctgtctcaagaaaaaaaaaaaaaaattagtcgggtgtcagggcaggcacctgtaatcccagctactcgggaggctgaggcaggagaatctcttgaacccgggaggaggaggttgcagtgagctgagatgggaccactgcactccagcctgggcgacaaagcgagactctgtctcaaaaaaaaaaaaaaaaaaaaggcaaagttgctccataccaagaccagatttttaaaaagtcaaagttgcaaatttttaaatattatgcacttgcagcctaggagctgatttaataaggcagagcacctttaagtatcagttatgagttaaaataaagggaagggggccaaaaaaaatatggttgtgagtataaaatgcaaaaataaaggtaaaggtgagtattttgtcagcctgtaaaaaaagcctctttagttttcaaagtacttaatttttaaagtacatcctacattagaacctaagtcagccagataaccaagaatacacatttacacagaaatgaagcacagcaaaggtgtgaaaattagggcaggaagcataaaacatgaatcaaagaatgcagaaatacaacagatataagctacaattaaatatctcaccggatgcacacacagttttatatggaataatcaaagcagcagtgatacccatcttataaataaaaatctaaaagccagagaaataacaaggttagaggattaatatgaaacaaaatgagaactccaaagattttctgaaagcagaattactgttttttcttcatattatgttgccactccaaagcaaggggaaaactcgcatgagtaagaatctagaaacctgagaagtttcgagaagaacagactcaaactggagtgaaaataggcaaaaagagtgaggcataaggctacgactgggagcaaaatgccagatgcaagtcttggacacggaggggagacgaataaagccttcttaagcggaaggtggagaaacactggggttggatttggtgggaggaagacaaaacggaaaagcacggcccaagaagcaacggcaaagggagaacttaaacaagattagattgatgccacaatcgaagagtataagacctacaaatcagattctgccgggtggggaaagggccagttcgcgaccgatcaggtgcgactagtttcccaaaagcggcaaagatgtagcttcgcagccccaccccacgacagcagctcctccccaaggaggacctcacgaggtcaactgccgggctcaggttctcccccggagcctaggttccaccccgccccggccgtgcggcacagaactgcctctctgggcccctcaccgaacgctgcagctccccaagccaaaaagaggcgcgctcctttccgctgggatctgggtcgtggtaaagcgcctgcactgcctggtacacgagctgcaatgtcggctttgctccttccatggtggtggcggtagtggcggtagcgacggctctgattcttctccggaggattcctcggttgctccgccttcgcgcttcctcactgtctgggccacggccgctccctgactggcgccatctcctcctctttggccgttaccagggcagaaggctctccgtggaagttgccccctcggaaacagctattaggtcgtattcaggttcctggccttttttccggtttttccacttgattctagactcttgagtccacagattctggcgctcccgtcttcagtcgctgacttgccctcagaagcctatcttgggaggccacacaccagtgtacctaaggttcgtttacccggaccggaagcgacagcaccgatacctttggcacacttccgcctggtacactacaaacggcctccttcccggcacgcctcctcttgtctccccgccccctcccggaagtaaccctgccgggccaggagccgggaagaagagccggtgttctctctgttcctcgctagcagcttgggacattagcgccgagatgtgccccatatctgagctgccttcagctccttggaaacggatccaggtttttcctaccccttccgactgccccatccctctccagagaatccttttctgccctggtgatcaaggcgcg

SEQ ID NO: 39247 - DNA, 2300 bp, Homo sapien
tctttaaaatgcgtttttttgtttgttttttaagtgccaggggtttatttccctcacatgtgggatggctcacatacacaacacacaaaggcgttggcaccgtgggagagggcagcacccctggcttctgcttggcctcacagtgtaagaagggagaggatgggttctctctcctcccctcactagggcctaggggacccaggagcaaattccatccctttcacctctcagccaaggagaagccacattggtgacatttagttccaacaattacagtaagtggagaagggattggtctggtcccgaccattacacggtgaaggtatacatagtaaaggaagatacagtttggatgaggccacaatagggtgcagatgacaccatcagaagcatgtgcaggggaggggcagtcactcagcttctgggctgcttagttcctgggttggcaggaagggtagggaagacggatggggctcattgtttggcattgatgatgtctacgaattcgggcttgagggaaacaccactcatgaggaaggcagccacgtcaggctggctggccagctccttgcaggttgccttggtcacagagcctccataaatgataccagtgctctgagccactgcatcagagatgttggacttaagccatcctcggagcttcttgtgtacctcctgggcctgttggggtgttgcagtcttgccagtaccagtggcccacacgggatcataggccaagatgaccttgctccagtccttcacattatctgcgatgacctttgtctgctcaaaaacaaccttctcagtgatgccagcttccctttcatctagcttctccccaatgcaggcgattactccgagtctctctgccagagcatgggccacttttctgcccaatcagctcatctgactccccaaagacacgccttctgagtgccccaggaccacaccacccacgtgactcctaagtctttgaccatgccagggctgatctccccagtaaaggccccattagtcactttgtagcagttctgcggagccacagcaatcttgggagctagcttctgccgggccaactcgttatacgcagtggcgagagcacaaatcaccttggtgtcggcaggcacagtggccgcgttctgagtgccgatgagctcccccagacatttcttccgcccgttcatcttccagttcctccccacgaagaacttcctggagggcgccatggcgctggagctgaggcgctgtaggtcagtgtcagcgcctaaaacgggttttattaatacttggcaaggttgttaggcggattaaatgagatcttgtaactacagtgttttacacattgtgatcatttatcaaatagcagttatttactagtgcaaaggactagcagcaatgttaatatcaatatactgttaccttttgtccctaatttctccatagtacagtttccaatatttctgttttcttttgtgaattgttagaccactggtattggattcggacagaaaggcattcacaaaaatacagttcaatgtgagaataaccctaaagatgtatgcaaaatgctctggagttagagcaccaggagctgtaagcagaatgaagacctcttttgggcttaagaactaagtaaaggggagctgaacaaagattctaggcattttggatttatctcaatgtggcacatatttcaggtttgtaaaatagttcagttgactacgtgtctgtctcctccactagagccagcgtaggtaccatgtcttaagtcatctttggatctccagtactgtggccactctagggagagttgaattgacgcgccttgatcaccagggcagaaaaggattctctggagagggatggggcagtcggaaggggtaggaaaaacctggatccgtttccaaggagctgaaggcagctcagatatggggcacatctcggcgctaatgtcccaagctgctagcgaggaacagagagaacaccggctcttcttcccggctcctggcccggcagggttacttccgggagggggcggggagacaagaggaggcgtgccgggaaggaggccgtttgtagtgtaccaggcggaagtgtgccaaaggtatcggtgctgtcgcttccggtccgggtaaacgaaccttaggtacactggtgtgtggcctcccaagataggcttctgagggcaagtcagcgactgaagacgggagcgccagaatctgtggactcaagagtctagaatcaagtggaaaaaccggaaaaaaggccaggaacctgaatacgacctaatagctgtttcc

SEQ ID NO: 39248 - DNA, 2300 bp, Homo sapien
cagtttcgttcacagcttccatttcaccacccattccttccttgacactgtgatattccttcttcttcccgtctcaattaaaaatgatctcttggctgggcacagtggctcatgcctgtaatcccagcactttgggaggcccatgcaggtggatcacctaaggtcaggagttcagaccatcctggccagcatggtgagaccccatctctactaaaaatacaaaaactagccaggcatggtggcgggcgcctgtaatcccagctacttgggagactgaggcaggagaatcgcttgaaccagggaggcggaggttgcagtgagctgagatcaggccactgcactccagcctgggcgacagagtgagactccgtttcaaaaaaataaaactgatttctggaagatcatctaatagaaacattcagcatcttggtctatttctctatcctccccgcactaacatctgaaaatggcacctacctattcactcattaacctcttggaaaatgacttctgcccaccctacctgctttatactaaaactgatctccagtgtcacttaacctgttaagggccagtaatctcccagtaacctggctgtgactgccttctttaacctccactcttggtgctcctgttatgcctgcttgtcaccacagcctagccctagagattctatctttccaatgccttcccttctatcctctcctaaccatctattattctgtctattactcctaaatcagttcctgatttctgattatctggatgatgagcagcatgcttctaacaaatctttctctctccagcctctttcccactccaactgaaaaccatgggttttccatcatccttttctccaaaactcttatttccaagtcaattaagcactaactccccaatctgatattcaattacttccgcagttttaacacaattccacatgtaacggcatcggtcagcattatgtcccactgctattccaagcataccctgtgctccagccacagcagtctgcttattttgcacgaaacacatggcgtgcttttgcacctccaggctttggttcaccccctttttttttaatccacctggattatgtttcccctccgtctctactattctaaatcccatcctcccctaatttcacttgccacgctatcttcactaaccttctaccaaacgtattataattatttgtgcggttatcatatttccacactggattcttaattctgctaaaacgaaatactgtaatgcctttgatgagccttccatgtgccagccatgtgctaagtgagctacatgcattatctcatttaatcctcaaatcgccatctaggtcaggactctcccatttaacattaaacaaactgaggctccgagagattaagtagcttgcagctttcacgcagctaattatggtggaatcagattccctccccgaggttcaacttgtattagttagggtagccagcataatatattcgccagctacgctgcactcaacctgtgtgtgccggatcagcatgttaaaaacggtgtctgcaagtagaccaagggaagaggggctgcgggggcgggaattgagacagcaatgaattaggatggcgggattggcggtgatgtttccaaatttccactgttgggttgtagagcttctgaaataagcatttaaaatgtatagttactaaacaagattgcatctacccttggtctaattgttatgtgtaggttagttttgtctccctgattttattgtcatcccccagggattgtttctgttctcccgcgttcccagagctttcggcgcattgctcaacacacggtgtgcgtacttgttgattttaatgtatgtgtgtttgcatatgtgcacagcagctgggcggaggacgtgggtgtgggatgcactgtgcattccttctcctcactcttgttcctttgagcagctgcagcctggatgctttcccttaggggtaggggagaggcagaaccgctgaccctttaacaagttatccctcacagaacaggtgtctcccccgactctcggtggagagggatggctggatacttagtgacatcagccacgagccaatgggaagtcgggctcctgcacggcgcggctcggctcatgcccccgggcgcggggcacacaggccggccggcagccgctgggaaataggcccccgggggcggtggcggcggcggggccatggcgcggagaccccgggcgccggccgcctccggggaggagttctccttcgtcagcccgctggtgaaatacctgctcttcttcttcaaca

SEQ ID NO: 39249 - DNA, 2300 bp, Homo sapien
accattaggactcggttctgatttcaaggcagactcagttaagaaggatgatccctgtctactgttatttttgctggaaggagcaagttagggattagtcctgtgttctgattccttgcccatgtctccggcaggctcgagggaaagtgagtgagatcatcaacaatgccattgtgcactaccgagatgacttggatctgcagaacctcattgattttggccagaaaaaggtatgggtcagccagtggtctgggggactgtgggtaaaagtgaatgtcatcccaagagatgcctcaccctctatgcctgtggggctcttcattacctgccaggtaatggcttctgggaaggggtttggcaaaaaagcacacgtagcagagtgctttaaatgtacttttaaagacacagaacagtatatatagtaatctactgtgttataaatggttacctacagggggtgaggaactgggcagattcttgaatattacctcttcaaaagtgacattttaggctggtccaaagggagtgagttatctcatttgattgttcacagtcagctacagatccaactccttgttctactctttccccccttctcactgctgcacttgactagactaaaaaaaagaaaattacatttaaaaaattgtgataaaatttacataatgtaaaatttaccatttttaagcatacagatccgtggcatgaagtaccttcaattgttgtgcaaccatcaccaccatctccagaacgctcatctgccccagatgaaactctgtatccatcaaacactaactccccatttcctctcttgaatctctgtatccatcaaacactaactccccattttcctctcttgaaactctgtatccatcaaacactaactccccattttcctctcttgaaactttgtatccattaaacactaactccccattttcctctcctgaaattctgtatccattgaacactaaagccccattttcctctcctccagcaaccaccattctactttctgtctgtaaatttgacaactctaggtacctcaaatgaagggactcacggtattaatgcttttttgagtgggttatttcacttagcatgtcttcaagtttcatctctgttttggcatgtgccacaactgccttccttttgaaggctgaataatattctgttgtatgtatatgccacattttgtttatccattcattcaccagtggagaaaagggttgcttccaccgttcggctactgtgaacaaggctgctatgaatcaaaagttaacaattaggccaggcatggtagcttacatctgtaatcccagcactttgggaggccaaggcaggcagatcatttgaggtcaggagtttgagactagcctggccaacatgatgaaaccctgtttccaccaaaaatacaaaaattagccgggtttggtggcgcacacctgtagtcccagctactcaggaggctgaggtgcgagaatagcttgaatttgggagttggaggttgcagtgagccaagatcatgccattgcactccagcctgggtgacagacagagactccgtctcaaaaataaataagtgaaaaataaaagttaacttttttttttccctgagacggagtcttgctctgttacccaggctggagtacaatggcgtgatcttggcccactgcaacatccgcctcctgggttcaagtgaatctgcctgcctcagcctcctgagtagctgggattacaggtgcctgccaaaccacgcccagctaattcttgtatttttagtaaagatggggttttgcaatattggccaggctggtcttgaactcctgacctcaggtgatctgccctcctcggcctcccaaagtgctgggattaccggtgtgagccacagcacctggccaaaaaagttaacttttaagtaaaagtgcttctgagacaagtcctgagttccccttcctctggtgcaatagacacttgactttgagatccagttggctctcatggagtaatgattgactcacaatattgaagattcctcccctgtgttttctctatcttaaggagaagtttttcagcactgatactgtaattatttcagccaatacttttgatcacttccatttgcctgcaaagccagaaacttctctcaagaagattatagctgagtatgtaaaacaaaatatatgtacaactgtaataccaacaagcacagtggtaagttataacaagatatacgaagtaatagaaattaagaagtgagaatatcttcaggcgaaggcaactgggaagctggagctcaa

SEQ ID NO: 39250 - DNA, 2300 bp, Homo sapien
gggtcacagttcagcaggctatacaggaatcatagcagcttctgctcctggagaagcctcaggaaacttctaatcatggtggaaggcaaagggggagcgagacatcttacatggcaggagcaggaggaagaagcggggaggtgccaaaccctttaaacaatcctcgtgagaactcactcattatcgtgagagcagcacgaggaggatggtgctaaaccattcatgagaaactgcctccgtgatccagttacctcccaccaggcctcacctccaacactgaggattacaattcaacatgagattgggtggggatgcagatccaaaccatatcacctaatattaaccagtaaagattaatatcattcccctagtcaaaactttgagatttccttactatcaagagaattgacccttaattctgtgtgttatttgaggcttcttaccaatcagtttccctacttatctatgtccttattctaactcctcctactcacactttagtcctggattcaaaacccacctcctccacttctatccacactgacctctgtcccctattcctatagcatactcacggtacatctcattttggcagcttatttatcaagtgattactatgtatgctcaagtgaactagatgttttgtgaacactaagagaatgagataaggtccctgacctgaaggagggaacgttgctgttctgtcatgctatgtttcctgagagcaagccatgtatccacaggaaaatggaagtctacaggttcctccaggatgtctctgtgctatgtacatgctggaatttcagaaagacttgctaaattgaattaaattctctctctctctccaattgatatagttgaagtgcaataactaatatgcacttaaactgtccaaagtaacagaactagtccactaccgctaggccatgagcaagtcttccaggggtaagaaaggaaaacccaccctggtgtgcagcccgatcagcaacaaggaaaaagttgctcagtgcaagtctactctcctgtttggagccttgtggttatgctgggttatacttggttgtgcaggtgtaaactgctgaagtgggaaattaagtgtggtgaccaaaagtgtgatgctcaaaggagtgaggaaaggcaaaatgagcagagtggggaagaggagcagcagaaacctcccagagcagatgagcagcagggccatcaaagaaggactggtttccttctcacataaccaaggccagtccctgggaaccacagttcagacttcacatatttgtagcagtaaaggcttgatgttggcaagtttatttcccagacacctgttcccgcaggtaacagcagccagagcagctgccgtgagtgactctgaggtcgtctctctcaaaggtcccgagctggaaggatttggagaagcgcaaaccccaaacccaggttcttctccatggggccccgggatacgttggaaaatctaaccaaagcaggaaaaactggcgggcctggagaacggggcagagatggaacagaagtccccgttgacttcaggcatcccctgtctttcccatcctgagccaggagaaaagtccgcttcctgcagacgacctcagaccaagcaaggtgcccgccgagtctctccttgcaggtccggcccacgatttccactcatctctttcccccgggcgcggggcggcggcaggcggggtcaccagatccccctagcccgggcccctccaggcgccagggacgctgacgctcgcgctcttcctctctcgcctcccctccccacctctccgctccttcgtccagtccctcccccagcctcggcgcaggggggccgggcttggctccgcgaggcccgtgcattccagagagcccagcgagctagagcaacaaaggagccgggtcgccggcggggagagttcggggggctgcggcgcgctggggcgaaggtggctgctgggccgcgggctggcgcgggggcggagccggagctgcactcgcacccccggcccgcgtctggcctccctcgcggggcggggaggtggctttaatggtgggagagggaatggggctggggattgggggcccaggggtctcctagggctgaagacaacttggattgcgaggctagggcttggggagtcgtgcatcccgttccgggcctccgcagcccaacatgggccccgggttccaaagtttgcgaagttgggcgccgaggggccggggcgcgcggagcgtccgggggggcccgggcccggattctctgggcgcacaggtcgcctgagccgcctccgcggccg

SEQ ID NO: 39251 - DNA, 2300 bp, Homo sapien
gcactctttctgcttgggacttgcaagtagggcagaagcaggtgttggcttgagctgggtaatgagtaggtagagtgaacccaagcctcgtgtgagaatcacagccaggtcagctggtagcctctggcaagtgatttatcatgtcccgagttaatgatcttgattttgcattagacagggtcagtgttacctggctcttaggggtgtttttgtgggtgaaggatgaaggtgatctaggttgtcttcatcggtaaactcttgaatgtaggaactgggtcttcactttttttcaaagcctgtgagtactgagtacacagccatgcttctattcatgcattcagttatgtattgaatgtttgctgtatgtcacatgctgcgcatgtaaggatgaagaatacagatatgatcctctgtcatcaagaagacaggctggacatggtgctcacacctgtgatctcagcactttgggaggccgaggcgggaagattgctcaataccaggagtttaagaccagcctgagaccttgcctctaaaaaaaaaaaaggaagacagataattcaacaggctttggaaatacctgtgaaaggtactgtggcattttagggtactgaaaaagcataaaggacccaaggaacatcccagaagaactggcatttaacccataacttgacacataagcaggaattgcctggccgagggagagttgaggtttgaagggataggaagaggaaatagcatgtacaaaggtgtagaggtaggagggcttggtgctttgaaagaaagtataagagttgcagtagaactggatcaaagcgtgtgaggggtggaattgtgagagataagacctaaagaattagaaaataaagggatttatacctcatattaagtttggatgttatccaggggatgataaggagccattgaaagattttaagcaagggagagatgtaattgtctttgcattttagctggatctctttgggtatggtgtgaagaagccataggagcagggaaagcctggagcctggcttcttgaccaggggatgttgaagtagcccaagtaagagacgatggcggttgggactgggtagcaggacagagggagtgggcagatcccactaactttcagaggtagtgctcatagggcactgatgagttagatgtggagcctcagtgagcaggaggcctcgggtttcaggcttggatggaaggtggtgccattccctttcactaagatagagaatgctagaggaagaagaagtttaggcaggaggtgtggctttgattttggccgtgtgaattagagatgctcattggacatctatgtggagattctcagcagatctggaaataggaattgctggagagaggtggccactgtgtgcttccttggccctgactactgaggctttggaaggatgccattgactgaggaagtttatagctcaggttggtccaatttctaggtctgtatagacctcaggtctttcctctgtctttcatctctctggcctcaggcttcttcagtcacttagcatctctcccctttacagctggaaatgcctcctcccgggcattccaagctgaccagacaaacataatgtccaggccgtggtccaccttaggccaaacctggtttagtaagtggggcaaaaaagcagagaggcctgcagctggcagtggcgataggtccctgagagccagcacgtagcctccttaaccactgctgtgctctgtgtggtacataagtgtgtggccctgtcaccttgcccacttgcaggtaagtaggagagagacaaaggctgggaggaatttcttgtttgcctctcacacattgaattgagggctgagaggaggaatgtttttggtgatggtgggttattttcagggacggatcaggaagaatttccttagagctatttccaaacttggctggtaatcagagtcagttaaaaagatatatatggccgggcgcggtggctcacgcctgcaatcccagcactttgggaggccgaggtgggcggatcacgaggtcaggagatcgagaccatcccggcaaacagggtgaaaccccgtctctactaaaaatacaaaaaaattagttgggcatggtggcgggtgcctgtagtcccagctgcttgggaggctgaggcaggagaatggcgggaacccgggaggcagagcttgcagtaagccgagatcacgccactgcactccagcctgggcgacagaccgagactccatctcaaaaaaaaaaaaaaaaaaaaaaaaaaaatatatatatatatatatatatatat

SEQ ID NO: 39252 - DNA, 2300 bp, Homo sapien
cccgggaggtggaagttgcagtgagctgagatcgtgccactgaactccagcctgggctacagagtgagactctgtctcaaaataaataaataaataaataggctggccagacacagtggctcatgcctgttatccccaccactttggaaggctgaggcgggtggatcacttgatgaggtcagaagttcaagaccagcctgaccaacatggtgaaactccgtctctactaaaaatacaaaaaattagccagacatggtggtgggcacctgtattctcagctacttgggaggctgaggcagtagaatcgcttgaacccgggaggtggaggttgcagtgagccaagattgtgccattgcactgcagcctgggcgacagagccagactctgtctctctctttctatatatataatatatgtttattcatttaacccttaaaccataccataaggtaagtactaccatcttagaaatggggaaactggccgggcgcagtggctcacgcctgtaatcccagcactttgggaggccgaggtgggtggatcatgaggtcaggagttcaagaccagcctggccaacctggtgaaaccccgtctaaaatacaaaatttagccgggtgtggtggtgggcgcctgtagtcccagctactcgggagtctgaggcaggagaattgcccgggaggcagaggttgcagtgagctgagatcacgccactgcactccagcctgggcgacagagcgagactgtctaaaaaaagaaagaaaaaaagaaagaaagaagtggggaaactgaggtacagagaggccaaataatttgccaagccagccctgggattcaggtcctggaagtgtatctccagccaccctgccatgctacctagatacctttccctaaacaagaggctcgtccctgagctgccttgacaccgtcttttcccatccctggtgccagaatgaggtgcagaacatcaagttcaacagttcaggccagtgcgaagtgcccttggttcggacagacaaccccaagagctggtacgaggacgtggagggctgcggcatccagtgccagaacccgctcttcacagaggctgagcaccaggacatgcacagctacatcgcggccttcggggccgtcacgggcctctgcacgctcttcaccctggtcagccgcgggagggcaggcccggggggccctcagcctggaacgtgggaagagagccagagggaaggggggcaaagaggtcttggtgggggtccccagggaagggtcatgatcagaagggtctggggctcagttaagggtgtctgtgtcagcagaataaccctaacctcacagaatggcccacttctctcttctaggccacattcgtggctgactggcggaactcgaatcgctaccctgctgttattctcttctacgtcaatgcgtgcttctttgtgggcagcattggctggctggcccagttcatggatggtgcccgccgagagatcgtctgccgtgcagatggcaccatgaggcttggggagcccacgtaggtgtcttggggacccagaggtgaaggtacagggaggaaggctgaagtgtgcgtttaccccaaagggagcaggtgcgtgtaaaaccgagatccagggcaggatctggctctgccctactgcatactgcatgcaagatctccagtgttaggatcttagtttcagaatcaggaccttcatggtttgtatctgctcaaaggggcggctcctagagcctcctcagatctgacctgggtcctgtctccaagccctgacttctgggaacctccagacctcagcagctgagggtctgggcacagggtggggagaccaggtagagggagtacagagtgaccgcctcaagtgacacctcacctctctgcacagctccaatgagactctgtcctgcgtcatcatctttgtcatcgtgtactacgccctgatggctggtgtggtttggtttgtggtcctcacctatgcctggcacacttccttcaaagccctgggcaccacctaccagcctctctcgggcaagacctcctacttccacctgctcacctggtcactcccctttgtcctcactgtggcaatccttgctgtggcgcaggtatagtgactggtaggaacgggagacctggatggggtgagtttgagggagggggccagtaacccaccttctgtcccaccccttcctgctgcaggtggatggggactctgtgagtgggatttgttttgtgggctacaagaactaccgataccgtgcgggcttcgtgctggccccaatcggcctgg

SEQ ID NO: 39253 - DNA, 2300 bp, Homo sapien
gtatgaacccctttgctcctgtttctctgagcatagagaggaaccccccccataatctgtcgcgagtcaactgcattttgtttttttaaagtattcttttttttttttttttttttacgagacggagtcttgctccgtcgcccaggctggagtgcagtggggcgatctctgctcactgcaagctctgcctcctgggttcacgccattctcctgcctcagcctcccgagtagctgggactacaggcgcccgccaccacgcccggcttatttttgtatttttagtagagacggggtttcaccgtgttagtcaggatggtctcgatctcctcacctcgtgatctgcctgcctcggcctcccaaagtgctgggattacaggctttttaaagtattctttacataaaatcttatggcatgtgcaattttgtctcttgcttcttagcttaatgtttttatcataagcatttattctgaaagccagaatgccttgatcttctttcctgtgctattacgattttggaaatcttcacttcgtgaagttgtcctgccttggagtctctcatttcctgatcgccaaatttgtgcctcacactatgtatcggaaggcgtctgagcactgccatttccacagagctcacaagtgtaccagacacaagagtttcttagcttcctcttcacattttggctttcagagtaaagaatgaaaaagggaaaaccttgttgttaaaaagtattggcaaacaattttctttctttcttcctttttttctgggacggcatctcactccgttgtccaggctggagtgccgtggcatgatcttggctcactgcagcctctgcctcccaggttcaagcgatcctcctgcctcagcctcccaagtagctgggatttcaggtgcccgccaccacgcctggctaatttttgtatttttagtagagatggggtttcaccatgttggccaggctggtcttgaagtcctgatctcaagtgatctgccggccttggcctcccaaagtgctgggattacagacgtcaaccactatgcccagctggcaaacgattttcaaaggctgtaacaattgctctatttgttggacattagttttagacagttttttgttattaaaaaggacgctgcggtgcatgtctttttgcttacatcctctaaatgtaaaatttaaaaataatacagaaaagtacaaagtaaaaatcaccttaaatcccatcacttaggaaattaactactcatattcactattcatatccctctatgctgatatatgtatctgaatttcagatgattgccctattagaattataggtgaaaagatttggcctcgtttaaggcaacgtgtaattcctcagccttgaattttgatctagtgatacctaacttctttgaggaatgatcttagcttccaaacccagaatgtgacagaaagcgccacagcaagcaaggtcctactttatcccttctaaaaacaaagccactgaagtttggaagggtgttgagttctcaatatcacaaagaaaaataaagccacttccagcctggagccgccgcttctcctttaaatactcgctcacgtgatcgcagacgggcacgcgcggaggaacttcacgctgtcaggacaacgagccattcctctaccacttcccctcccctaaggcttcttggcgttccctccccggaagtcacaactcctctggagactttctcttcctcatcccctccgtcgagtcacctatcctcactcctttctgttagctgccggccctagcgctccctctcctcggctgaatctcacttagtggaggaaaggctgaaaggactacaactcccaggggacgctgcgggccccgcccatggggcgcgcagtgtaggtcggggcctgaggtcccacggtcttctcgccgcgtgcggccgggagcaaacgcactacaggttccgtggcgcctcgcgcgaggccagaccgggacggggcggggcggggctggaggggccgggactggcgggcggagaaagggggtgggagaggaggcgatggaggggaggagtggggacatgggggagggaagaggaagggaggtgggaggcggggccgaccaagagcaggagctggagtctgagccggtggttgcagcggaggcggtgatgtcggtgcaggttgtgtcagccgcggctgccgccaaggtgcctgaggtggagctgaaggacctgagcccctccgaggcggagtcgcaactaggactgagcacggccgccgtgggcgccatggcccccccggcgggcggtggaga

SEQ ID NO: 39254 - DNA, 2300 bp, Homo sapien
cctacctcagcctcctgagtagctgggactacaggcgcccgccaccatgcctggctaattttttgtatttttagtagagatggggtttcaccatgttagccaggatggtctcgatctcctgacctcatgatctgcccaccttggcctcccaaagtgctgggattacaggcatgagccaccacacccggcccattgattcatttttaaatgttaaactcaccttctattcttagggtaaatttcacttgattgtgatgtattctttttatatattgctgggcttggtttgctgaaatttttaaaatattttttcatctatgttcatgagagttattagtatgcaattttctttaggtctttgcaaggctttggtattaggataatgctgacatcataaaatggggtaggaaatgtttcttcttttcagtgttctagaagagtttttatagatttccttctgatctttattttctttcttctggttgctttgtattttattagttcttctgtttctagatttttttttttttttttttttttttgagacagggtctccctctgtcacccaggctagagtgcaatggcgtgatctcggctcactgcaaactccgcatcctgggctcaaatgatccttctgcctcagcctctcaagtagctgggactacatgcctggcaccaccatccctggctaatttttgcattttttgtagagatagggttttgccatgttgcccgggctggtcttgaactcctgtactcaagtgatccgcctgccttggcctcccaaagtgctgggattacaggcgtgagccactgcacctggccatgtttcttgattcttgaaatggaagctgaagtcttttatttgagaccttcttttattaataggaatgtttagtgttatacatttcctttagtgctgctttagcaacattccacaaattttgatgtactttcattttcattcagttagaaacacttcctaatttcccttttgatttgttctttgacccatcagttacttaggtatgtattactttacttcctgatatttgggagttttgcagatattttcctttgttgattcctaatttaattccattatggttagagaacatactttgtatgactctaattcttttatatttattgaggattgatttatggcctcaaatatggcttatcttggtaaattttttatatgcactgaaaaaatatttttctattattggtgcatttttcttgtgttttttgttcttatggttcatttagcatcttagatctatgagtttattgtcaatatcaaatttggaaaaatttggccactatttctttaaatatccctgtttatcctctctttacttctgggaactctagttacatgtatattaaactgcttaaagtgttcccagaattcactcatggtctttttattctttttccactctggtttactttgggtagtttttattatgtgtcttctagttcactcatctcttatgttttgtctgatctgccatcagtcttatccaatgcatttttcatattagacattattctttttatctgtagaagttggatttaggccttattttctttctcccatgtttctacttagctttttgaatatggaataactttgttaattcccttgtctgctaattctaacatatatgtcaattttgttagcttcagttgattgatttttttcttcttcatgggtcatattttctttgcatgtttgataaatttttgtggattataaacattgtgaattttacctgtttaggtactggattttttttttatttgttctgtgtcacagttaatttattaatacagttgaatcctttccttaagatttgtttcaaaaacatagagagaagagggggagaaaaaaaaatatttgttaggtggggccagagcagttttccatctagggtagttactccccaggatccttggaatactctacctcgtgccttgttaattacggggttttccagtttggctggtgggaacaggcattgttcttgttctgtttgagtgccagttagtgttccctctagttttctaagtagttcctacatgcactcactggtcagtaccccactgagtacttaagaggagcccactgcagagctccaggtgctcccagcatgcagcgcgttttccagtactccatcctgcacactgtctctgccttggccttcccagactctcagctcaatctcttcaacgaagatagccctgggctctacttgggttcctccttcattaaactgcaccttggaaatatt

SEQ ID NO: 39255 - DNA, 2300 bp, Homo sapien
tgtcctgacatcactcaagtcgcctcaactccatagctcctctatgaccacagcttcctttacttctacctctgctgttcttatttcgcctgctctccaccctccctgtgatcccttgatacgtctgaatgcacctggttcaacagtccctgttttcacctgcctttctctccagtcaaacctctggccattcatttgaattctgccctctctggcatcttacagtacctcttccatagatattaccttcctctcctccattccaaatccaaaggaccattctcttaagtaatgaaggccttacagggtgatgaactgtgaaccccaaacatctgagacaggtctcggttaatttagaaagtattttgccaaggttggccaggcgtgctggctcatgcctgtagtcccagcactttgggaggctgaggcaggtggatcacctgaggtcaggagtttgagaccagcctcaacatggcgaaaccctgtctactaaaaatacaaagttagccgggcgtggtggtgcatgcctgtaatcccagctactcgggaggctgaggcaggagaattgcttgaacctgggaggcagaggttgcggtgagccgagatcacgccattgcactccagcctgggcaacaagagcaaaactctgtctcaaaaaaaaaaaaaaaagtttatagaaagtttattttgccaagattgaggatgtgcactcatgacacagcctcaggaggtcctgatgacatgtgcccaaggtggtcagaacacagtttggttttatacattttaaggggacatgagacatcaatcaacatatgtatgatgaacactggttcagtttggaaaggcgagacatctggaagcagggagggggcttccaggtcatgggtagataagagacaaatggttgcattcttttgagtttttgattggcctcttcaaagtaggcaatcagatgtgcatttatctcagtgagcagaggggtgattttgaatagaatcggaggcaggtttgccctaagcagttccagcttgacttttccctttggcttagtgattttgggggcccaagatgttttcctttcacagagcctataatcataattataatattgtcactgttagctgtagagaaactatcctcttcaatgggaattaacactgtaaagagtcctggtccttaaagggaccaaagcaggcatatcttgttaggcttcctttgtgcctgaaacctgtggtactcttattggataatatactctaggaatgaactaagcaggtgagataggctagcttaccttttttctagttatgtcttatttccaaaattctgaagtgtgcagcaaggagggagttggtatggagagataaagcagaaacaacttcggaggtcctttaaggtgatagtgtacagggctactgcactggcatcctgtttcttcctgaaaccagatctgtgtgtaaaatccagcattggttagggactttgaggcagcactagtcttggttggaaaccctggctgtcctctaaacctacactgtggtggcttctgactagcctcagtgaagtcactttgcaatcagcacctgtgtgtctgtagctgcgggccctgaggccttcgtgtatgtagcacagggagccagcagagggagctgtcgtcccagaactttcttagagctgctaagaaattctgattttgaaaaagatcttcctaggctccatccgaacctcccatgcaataagactctaacttgagatatgcgagagtttggtgccagacccctggtgtgagcagatggggagcttctgcatagctgtttaaacttgaaagccctaggagctcttgatttcaaggaaacgcctgtttactgatccaaatcaagcaactcttgagaaatgggagtgccttcctgacctcagtctttattgatcttggtatccgcacctccagtgacgtgtcctgaagggtgggagagaattcacaagtgcctcacacacagggaaagaaggaagtccaactattgctgcagaaagtccccactggggaggtgcgggtagagtgtttgggtagcattaaaacagtgagtgccctgtgagaagcacagtgcctgggtgcagcactttgcatcagctctgattttgaaatcagacacagaaggctttgaagccggccagtaaggggttgtcaggcagttgactaatgctcttgatttgaatcggaggctgctgtgaaaagggatgcagcttctgctagccactgtgaacttctgaatctcactagggttgggtctgctttggggcac

SEQ ID NO: 39256 - DNA, 2300 bp, Homo sapien
aggagaagtactgggaagaagagagatagaataatgaattctttctattaagaaatcccaatgggctgtgctgtggcaggtttaccacactgaagcagtgatgagcaaggcgtgggttgtgaactttaaagcagggtgtaaatttttaagagtttaacaaattataccctgaaaaaaatccaaagtcaagtagttcaggccttgagccagggactttcttggaaattcatatcaattcagttctgtaaacgccacactccccaccccccacacccagccccccgccccgagacatttttggttgtcgcactagcgggaggatactactggcatctagtgaagagaggccaggtattctgctaagcatcctacgatgcacaggacagccccctacaataaatattcagccccaattgtcaatagtacagagactgtgaaacgctgcgttaaacgtacataaattaggggcatacaaaaatgagctaaatttggtcttactcgctaggagcctatatgtgggtggggagaggagtgggactggaagaggaaaaggaagatgtgaaggtacagtaaggagatattggaccagggtgagaaaacccaaaaagctccaaagagtgctctcaaacttgccttgttctgtcgcctatgaactggcaaagggaaaagtgagagagagagagagatgttaagaaagggacagggttgtccctaaggtatgggaaggtggagtaattcctctaggccctttgctttgggtatatcgtggaaaatgttaggattttggatctaggcagaactggtttgacaccaacacaacctgaatgagttgagggctaaaaggaaagctttgtggaggaggaggaggtgacaactaactagaatctttatgagagaaaaggaatcaaccaggagaacagaagacagtctcctccagagaacagcataggcaagaccctgagacaagatagaatatgataccttggaaaccgcagggaggaatctgcaagtgccggtttcttcatcagtaacattggattcgtaaaaacaccctgtcggggagaggtatgatgtgatatttggaaagcgcttactgcagtgcctggcaccaagctcagttcaacaatcccccagacccttcctaaagcaaccaggctggggacagcgatttggtcccacctgttcccctgagcctacgtctttggggcttctattaccaagccagactgtctaaatatttactacaagctactttttaaattcaggagagggcagatcaaacagcctcttttgcccccagtaacaatgagcccttaggaagcatctaagagagaggaaggaaagaaaggactggcgagcaggtgagggtgggggcttgctctaccctcaacatttacacaccatgaggaagaggccccctacagcagagaagggcagatgacaggagcagccctcgagggcaccaccaatttcagtgatggaaaaactcccccatcccacccttagacctccagtctcccagccaagccctagctccgggcgagatgcgttctcttcagaaaaacgctgagaattctcagcttccagagacagcgagtccctcgtttcgggcgatgtccctggccacctggcggtgccatccctcccctgagactaagcgggatatgggacgtgtgcaggagccgggatatggggggccgggtcggtggtaacagggaaacggagactgctgtggagcagtaggcggagactagagctccggaaaaggtcgctacagggacgggggtgagagctgagagacaccgagtgaggagcacagagataacccgcctgatctcaaggcccagctttcgcgaggtgtggagcctgtagctaacctaggagtctccgtccgccagcaatgccgcaggactaaaaagatcccctcaaaaatctcttcattgagcccccacctcctcgagtcccgctccggccggtcgagcagccaatcgcctcgcggggcggggttgcggcgagctgccgtaaccaatagaggtggagggggcggggcctggctcccggcgcgcggcggtagggtcgcctccggcaaagcgagctgaaccctgaggggagccgctgaccagcagcatggaggaccccgccgcgcctgggaccgggggcccgcccgcaaatggcaatggcaacggcggcggcaaagggaagcaggcggcgcccaagggccgcgaagcgttccgaagccagcggcgggagtcagaggtgaggagcccggaaagcttcggctggggcccggagacgcccgc

SEQ ID NO: 39257 - DNA, 2300 bp, Homo sapien
acaatcaggatagagagtatttccatcactcaggaattttcctcttagcccaccgcagagtcaatcctcccccacccatggcacacctcgaccactgatctactttcaagacagctgagttttaaaacttgtagcaggaggccagagcagtggctcacgcctgtaatcccagtgggaggccgaggcaggcggatcacctgaggtcaggagttcaagaccagcctggcccctgtctctactaaaaatacaaaaattagccgggcgtgatagcgcatgctttgtaatcccagctacttgggaggctgaggcaggagaattgcttgaacccaaggggcagaggttgcagtgagcagtgatcgtgccattgcactccagcctgggcaacagagcaagactccatctcaaaaaaaaaaaaaaaagaaaagaaaagaaaaagaaaagaaaagaaaagaaagaaaacaaaacaaccttgtagcagggctctggatctctgatctggagctcaggaaaagcagggctggaacagatttgggagtgatcccataggggtaaccttgggagagctgagataacccagagaagtgtaagcggctggggtgggccagccccatccagggatgaagacaggcgcaagaagagaagaaagtgcaggtggagggcaggagaatttgccatatccagggcatatggactcataagaaaaactcacagacatattaaaagtagctggaagttgggtttgctctgttaatgaaggattagggaaagcatatgtaagagaacctagaacataaacagtcctctttggaagccagtttgtctttcaagagaaagcaaacaaaacaccacatccttgcagagccttccaggaccctactcctgcttcttggtctagcctcctccccctgtccctaattttggcataattgactgctccttgtcatccagatctgttttaacgtcacctcctcagagaggccttccccagtcaccaatctaaaagagcacccagtggtcacatcaatttaatgcaatatgccatactgtccctatcacttttaatgtctgccaggccctccatttcagccacgaccacctcccccaaatcaccccttaaaagaacaaggactttgcctcattcagagctcaatttccagggcctggaagagtgtcaggcacgtggcagatgctcaataactgttgaataaaaaggaatgataggccgggcagtggctcacgtctgtaatcccagcactttgggaggctgaggcgggcagatcacctgaggtcagaagttcgagaccagcgtgaccaacatggcgaaaccccatctctactaaaaatacaaaaattagccgggcatagtggtacgcatctgtaatcccagctactcaagaggctgaggcaggagaatggtttaaacttgggaggcggaggttgcagtgaaccgagatggcgccactgcactccaacctgggcgacagagagagactcggtctcaaaaaaaaaaaaaaggaatgaccagtcataaaaaagaatgagtcgtaccacccgaagtgtagacttcacctgcagggagggaggctggaactggcaaggttggaggcaaaactgtacctactgtacctttctcgcccaatcctacctgcacatgaactccctccccacccctttagtctctcgggcccttactctctttatccggctcttttgcaaacatttcccatgatattctcccttcaccgtcacagtccttatgctcgtttcccaaaagagcttctccgatgatctctcccaggttggccgagtgagcgggcctagcctgcgctctcaccccagtgccaccccagtgggagcgccgcccgcgcccgccccctcgccccgcgcccgccccctcgccccgcgcccgccccctcgccccgcgcccgccgctccggcagcccaaacccagacgctaaagcgccgaactgggtttccgggcgctggaggccgcggtcggcctcgtactaggtgacggcccatcccgcgcgcgcaagcccggaaccccgctccgctcaccctccgcgcgctgccgctttgccctggcaacggtaaccacggcgaggccctgccccacgcccggtgattgtgcgcgcggccccgcccccgaggcgcacgccggcccagcgcccacagctgcggcggcctaggtgccgcgtggggcaagcaggtgcctcgcgtccaggcggctccgcggctggctgcctcccgagccggccgcgctcctcccagcgaggcgtggcggggaggcgtagtgaggc

SEQ ID NO: 39258 - DNA, 2300 bp, Homo sapien
atggtattaatgttgggatctgaaagaatggtaagaattattcaggtgaggattcaagtaagtgcatagatggtgtagagagaaatgaagttatgggcaaagggaacagcccttgcaacagttgtgaggtggcacaatttccaggcttaaatgacctgagagcttcccagttttgagtgtagcctgagaaatatctgtggcagatgaggtcagagatggcaacagggatgagatcaccaatggccctgtagccacctcaaagaattttagactttatcctacgtgttaatcagatctttttaagagtcttaaacagggaaaaaacatgattttctttcttgaaagaccattcaagctgtagtggatttggagagggcaatttcggtggcagggagaccaagaggagtctaccgcagtgtctctaggagagatgacagtagcctgaaccagagtaagaactgacagggaacaacagttttaaaaatctaattggggctgggtgcagtggctcacggctgtaatcccagcactttgggaggttaaggcaggcagatcacttgagcctaggagttcgagaccagcccgggccaacaagatgaaacctcatctctactaaaaatacaaaaattagccgggcgtggtggtggggacctgtagtcccagctactggggaggctgaggtgggaggatccttgagcccagagaggtcgaggctgcagtgaacaatgattgcaccactgccctccagcctaggtaatagagtgagaatctgtctcacaaacaaacacatctaatttaacatggggactccagagacagaggaaagagtaatggatcatttccaggtttctggcttgagcacttgggtggctagtgttggcactctcctagaaaacactggagaaaaagacattcaatttttggatatgttgaattttgaggttaatagaatcttgaaaattaaagcttcctgattttgttaatccgttttctgacaccctttagcaattcttcaatgcaatgcttttcacattattatatgcataagaatcaccaggggtgtggagatggggatgtgaaaatgcaggttcctaggcaaacaagccaagattctggataccaactgggtcccaggactcaaaacaatcagcctgagtaattctgatggagggagtctcctgacgacactaaaaaaacaacaaaaacgacccctctgccgggcatggtgtcctgtaataccagcactttgggaggctgagtcgggaggatcgcttgggcccaggagttcgagaccagcctaggcaacatagggtgaccacccacccccgtttctaaaagtaaaaaaagacccctcgtgtgtctccaccgttaggttgttttcccactgtccacccctccctacttctcaggcacctgcttgggggcccctattgcttcgaataagctccgtgggagccaggactttgtcttgctaacaggtgcatcttcagcgcactcagaacaatatctggcacagcacgagacacctagaaatgttcgccgaacgatcgaatggctgaatacattcatatgttgctttgtacaaaaacttgctttcaaatatctgggaagagttagagataggaaagcagaggtcatttcaaagagagagagtgaggataccaccgggaaggcagcgccgaaaaaaccagaggggaaccacttgccgatcccccaggcacagtctggaggtcccaattcccgcggtaggggggcgagagatgccactcgtctgatcagcaaccattttgggcccgcttgcgccgcttctccggggcgtccgcgttgtgctcatccagttgcttttgaggttccggccccctccaaacctctgaagcgctccgtgcacgcgacgcggcggcggggtaagctggagccctcgccgcgagccctctccgctgcctgcccgcagcacagccgcgccgacctcctcatcatggcggcggccgggcggggaagccgggccgtgcgtcgcgtgcgtgccctctccctcccctccccctcctcggcggcggcggcggcggcagaagcggcagcgctcgccattgccgctggtggcaggaggctgcgaggagccggcgcggtcgcagtctccacggcgcaggcccacggtagcgcagccgctctgaggtgagtgccctaccgcgcaatctccagctatttcagccccggcgcagccgcaacacgccgcccgcccgccggccggccggcccgccccgcagccggcaccctgccgcccccggctctgggcctgggccccc

SEQ ID NO: 39259 - DNA, 2300 bp, Homo sapien
ctaccttggattattatttgtgtttttttctctcttactgtactataagccaatggttctttttttttttttttttttttttttttgagacggagtcttgctctgtcgcccaggcaggagtgcagtggcatgatcttggctcactgcaagctctgcctcctgggttcactccattctcctacctcagcctcccaagtagctgggactacaggtgcccgccaccacgcccggctaatttttttgtttttttagtagagatggggtttcaccgtgttagccaggatggtctcaatctcctgacctcgtgatctgcccgtctcggtggttcttaatctttgctctcctgacccttttactctcataaaaattattgaggactccaaatataatagcttttatttatgtatgttataacttttgatactatattagaaattaaaactgagaaaatttaaaagtgcttaatttaaaaaataaccctgtacatgttaaaaagttaatattttaattatgttactattttatgaaaaacaactttttcaaaacagaacactttagtgagaaacattatattttacagtttttgcaaatctctttaatgtctggcttaagagaagacagctgaagtctcatctgcttttgcactcagtctgctgtagtatgttgctttggttaaagtataaaaagaagatctggtctcataccaaatatgtggttggaagagtattttaagagccttttcagataattgtggatattctttgatatattaaaactcagcagtggtagtttcttaaagatgagttgcaatgtgaaatctgaaatggtaactactcttacattaaaacctattggtttatcatgctctatgaatggatattttaactgatgcatgattttgtaacatcatctattggtaatttggaaaatattaattcatcaagtttatggagatctttcaaatattgacacaaaaatcacattctttaacatcaccaccagtctcatcagaaaaggcttttaagtaatggaaaactattagactcactgtagcagatacaagttttccgaaattctaattatcacttcaaatatcaaatttccatcattggcaaaaaatattgtcagttgttttccttgaagtgacagacccacttttaatttttgagaaaatgtctgtcaaataccgaggtctgaagaacaatatagtttgtctgtcagccactctttggagtaaaaattgtattccttgtgaaaaaaagcagctaattcagcttacaacataaaacatagcacacacgctttttttttttttttcctgagatggagtcttgctcttgtcacccaggctggagtacagtggcgcagtctcagctcactgcaacctccgcctcccgggttcaagcgattctctgcctcagcctcctgagtagctggggttacagctgccaccacacgcctggctgaattttgtacttttagtgagacggggttttgccatgttggccaggctgttctcaaactcctgacctcaggtgatctgtcagcctcagcctcccaaagtgctgggattacaggtgtgagccactgcacccggcccgcacacacgctttttgagacagccatttctgaatgcagcagaaagctgaatgcaacacttctgaatgcaacagaagcgctttatgcatactttccatttgttacgcagaatagtagaaagacataactctggggagaagagttaataaaattaataatatttactctcatcaagcacattcttaaataaaatggacttttttctcctttttatcgtgagcacatgaaggtgaaagatataatggctactagtatagttttgtgctgttaccttaaattgtgctaagtgtcagtagttttaccccaccattgcttttgcatcataagtgtaaatataaatgcattgagaaaaggcaaatagcatcttatttattatgaaaataattttgacctcattgatgacttgaagaatctcaaggacccccagggtcccatggtttactttgagaactgctgttaagctatttgagggtcgaactaatcatcctaatatcccctttcagttcctggtccagaactttacacagaaaaggtgctcaaaggatatttgtttaatgaatgtggtatgctgacatttaaacaggacaaaacttggtgagtaaaattaatgtaggcagtctcccatccattcaggcagcttttccatagacgtttgtgagaatagagtgaacaaatggaatgtggatgatatacacttggta

SEQ ID NO: 39260 - DNA, 2300 bp, Homo sapien
agcttactggaaaatttctagaagagttttagggttattttccctttttattaagttaaaggcctgtttgttttcctatattttataatcagccaccttattgaattctcattattgtttgtagtagtttttcatttgatctctttggaattctctagatataaggtgacttcatctataaataataatgattttatcagctcgcctcttatttctctcttatctaattgcatggattcctacttccagaacagtgttgaaaacaccccgagtttggcaccttacatgcatgaaaactgtagaagggaaataagctatagtaccagtaatatcttgggaagcagaaattaaacttaggggtagatattcttactcttagaggaacaagtctacaaaatgcagcctaaggtgcactttatcaacatatttataattctcaaccacccatggagatataggaacctatggaaaacagtgggttttcatcagtcacatcttagaattctctgggaccttcctggaaacctctctgttttataaggttagaatttaaggagtcataaacacaccccagatgtctttcatgagtattgatgaccacactgttctcttccaggcccagcttcgggcatttatcccagagatgctcaagtactctacaggtcggggaaaaccaggctgggggaaagaaagctgcaagcccatctggtggcctgaagatatcccctgggcaaatgtccggagtgatgtccgcacagaagagcaaaagcagagggtgagagttcctctgactgagttgcctggttgcttttccatcctaaattaaccacctcaatttttgtcatttctacatcttgtgctagaaagtctttgtgtaatagttaagcctgtccctccaaagactgatattctttgatttatagccttttccatttgtcgctccatcactatactataaagagaagactgggttgagttgatgaatttaaaatgtgtcttcggggttgccttttggagcagttttaattttatgaagtgcttgggaaagtcaaagaaacttgaagtaaaagtattaatcactttgaacacttagaaatgcttttatttctggttactaaaaatcattgttgaaaatgtaaatatggaattagagggatatgaagtctgccagctgagtctgctaataacaaaacttttacaagaaagactaaactacctaccattccttactttttttgcgtatttatttttctttttctttcttttctttcttttttttttttttttttgagacagagtctcactcttgttgcccaggctggagtgcaatgacgtgacctcggctcgccgcaacctctgcctcccgggttcaagcaattcttctgtctcagcctcccgagtagttgggattacaggcatgcaccaccatgcccagctaattttgtattttcagtagagatggggtttctccatgctggtcaggctggtctcgaactcccgacctcaggccatccgccctcctcagcctcccaaagtgctgggattacaggcgtgagccaccatgcctggccacgtatttatttttcatttagcttggaagtttactgagaatcttaatatgccattcttgatcagaataatctttctttgcaagaagtttaagagtttggcctcaggttggaatagggtgtaaactagactttgatcaagaagaaaccaatgagaagccctctttgatacttcgtacacagcttctttctaccagaaccagtctgtgggaggtaatcctaggagagtctaataagaggtttggtttggtttgatttgataaagaagtagctgcttattgcatattgggactaaataaccaaagttctttgtggcttaatgtgcttttccggtcatttggtgacaggtttcatggacccaggcactacggaccatagttaaaaactgttataaacagcatgggcgggaagaccttttgtatgcctttgaagatcagcaaacgcaaacacaggccacagccacacatagtatagctcatcttgtaccatcacagactgtagtccagacttttagtaaccctgatggcactgtctcacttatccaggtgagtaaacctgagggctaccagactgtggcttctgagatggatcagtgggcacctcacctcagactagggaaagtttcctttgtgcgaactcttgtatgaactttatatagctccccaagatcttcctacctgaaattgatttctgaagaatagtttaaattctttgcatttgctaaatacagag

SEQ ID NO: 39261 - DNA, 2300 bp, Homo sapien
tgtgtcttttttttttttaaatagagatggggatctcgctgtgttggcgaggctggtctcaaactcctggccttaagcgatcctcttgccttggccttccaaagtgctgggattaacagtgtgagccactgcaccaggcctttatggtgtgtctaaatggcacttccttagagacctttccgatcacctgaagtacatgcccaacagaccatcccaattattctctacctcattctattgtctatttccttgtaggttttatcatgagtactattttgtctttttatatcctccctcacctcgaacgaaattcgacttccaagagggcaagaaccttatttgcctttattcctgacatgtagctgagtgactagcctcggctacgtgtcagtggatgctcaacagaaactggttaaatgaatagtgtgagtaggtgccaggcactacgctagacagtaggatctggaaataagagagcatctgccctctgaaagctccaagtttagtggggaaatgaacaatcaataaactaccaaagaggcagttaagagtgatatgagggttactcagcagtgctgaagaggcacactgaaggtgctcctgtcctaatccaggaggtggggaagccaaaggtgttttcaagaggtggtgatgctggctaaatgcaatgggagattagcattttgctcttatatggcagctacagtgaagttttttccaaggacatgaagtaagatggcccctcagagttcaactcgagatcaacacacaatgactgaggggagtacaagccatttgaaagagaaaatctggttttccacatagcaagattcaagtacagccagaatcaatgtattcagacatgcaaaggattaaggtatctcataaaagggtcacccctgcaagctcagaagaagaatgaaaaagaaagactggcaggggccactgaagcaactagataggggagaaaaggagtctttgttcatagacatgaggtttctggtcacaacagatctacgatgagatggtggtatcatcagattgtgtcagaccattatacatttgattcatctcattgtttttgttctaatgccttctcgaataaccttctttccaatgatagtatgggatcccagctatgtttacctatagagaccagaaacactggtacacaattaaaattatatgctggttttccagttgtacctttcagacttatgagcttggttcatctgatgccatggaagtagatctgctcttagtacacaaattagatgcttggaaggcaggggagtccccttcccaacaaaggataaggttggccagaactcaaaacagaggaggaaaaggatttttgtaagaaatgtttgaggtgaacctcacagacacagaaagagaaggaagagggacaagccaaggatgattccaatgtttctggcttgagttatctcaagttgagttatcctggtattgctgatggtaataccattcagcaatcgaggaataagagagggcctaagacttacagagaggccaggcacagcggctcacgcctgcagtcccagctactcagaaggccaaagcagaaggatggtttgagcccaggagccaggagttagaggttacaatgagctatgacagtgccactgtactccagcctgggccactgagcgagacactgtctccaaaaaaaaaagacttatacagatgttccatttaggacatgttgaatctggggtctctgaaaagcagcaaagagaagatgtccagtaggcatttggccatccaagaccagagctcaagagatatggaatttttattctaaaaacacattcaggcaataatagatgaaatcactcaagaatagggtactaactaccaagagataaggatgaactgtgaaaccccgagtaaagccatttttttttctttctttttttttttttgagacagtcttgctctgttgcccaggctggagtgcagtggcgccaccttggctcactgcaacctccacctcccggttcaagcgattcttgtgcctcagcctcctgagtagctgggattacaggtgtgtgccaccacatgcggctaatttttgtatttttagtagaggcagggtttcaccatgttggccaggctggtctcgaactcctggcctcatgtgatccacccacatcagcctcccaaagtgctgggattacagttgtgagtcacgcgcccagccctgagtaaagccagtatttaagagaagaggaacctacaaggtatcctgagaaacagataggcatctagaattaagt

SEQ ID NO: 39262 - DNA, 2300 bp, Homo sapien
cttgctcactgcaacctccgcctcccgggttcaagtgattctcccgcctcagcctcccgagtagctgggactacaggtttgtgccaccacagctggctaatttttgtatttttagtagagacggtgtttcactacgctggccaggctggtctcaaactcctgacctcgtgatccgccccacctcggcctcccaaagtgctgggattacaggcgtgagccaccgcacccggccatgcaatttatttttattgttttttaaagctagtcaagtgaagcagtgggcgtgtagaaggaacaaagaaatctgtaactggttgtgatcaattagttttaaacaccactgcacctggaccagcagctatgtacaatttgaaagaacaatacactcctttcagaaacagctaaaatagcccacctttttcagaacataaagagaggttatcaagggctgggggggaaggggttattgtttaatgtttgggatggtgaacacgttctggaaatgggtagtgtgatggttgcacgacattgtgaatgtatttaatcctattgaattatacctttaaatatggttaaaatgttaaattttatgttacgtatgttttacaatttaaaaagcacaagttttttgaggcatgaaatgatagctgcaaaagatgttcaatcttagctcattgctgctgccccaggtgtgtgtgcataggagattatgtaaggaaggctcaactcacaacacatggtctgacaaagtacaagtgtatattcatgggaatgagggaaaagataaaacttttgaaaaggtagtgaaaatatgacataaatataggcgatgcctggaacactcttcactggcccctttgcctggttgactcctgagttccatatcacttcttttggaggaccttatagggcagtatttttccagacttcactgtgcataagaatcacctggggaccttgttaaaactgcaaattctcattcagtagatctgaagtgaagctctagcggcatttctaacaagttcccaggcgatgctgatactatagatccacaggctatactagggggctgcgtaaatttagtctttctttatcttttggaaacagatcttgctctgttgcctaggctggagtgcagtggcatgatcttggctcattgcgacctctgcctcccgggttcaagcgattctcctgcctcagcctcgcgagtagttgggactacaggcgcccgccaccacgcctggttaatttttgtatttttagtagagacggggtttcaccatattggccagactggtctggaactcccgacctcaggtgatccaccagcctcggcctcccaaagtgctgggattacaggcgtgagccaccgtgcccggctaaatttagtctttcttagttcaccattatatccctcatgtccagcaaggtgattagcacgtaggaggtgctaaataaatatttattggatgaatgaagtatttaaggttggtgtaggaggttcacacactttgcgaagttgcctcatgctctgtagaataaggatattaatactaaattatttctgaccttaccaccttgctgcgtcaactctaatctttgaaatagtggccgtagacactgcataccctggtatgcaagcctgaggaagccttgctgtggtctacaatccttggaaacaaattctctccagccaacgaggaagcggagtgcaaggaacctgctggtgtggggatttccagattttggtgcctgagtaattgctaccttggcctcctccaaatcaaagaaattaacagcttgttaaacagagtgttaagggaggttcattacccttaaatccacgaatgtaataatattgccattatttactcttatcgtttaggatgatgataacgacagtggcagttgagggatgaagtaggtggggaagttgggggaggggacagagggtgtgagacagccggagaaagaggaactacaactcccagaactccccgggaaagcccacgccgcggcggcgccccacccctctcagcgaccagacccgcccctccgatgacgtcacagaggtgacgtcacggcgcccagagcgaggctggggtagggaggccgactgagcaggagtcgtccgcttatagtggaggctgctaggagccggtcagagggtgagtggggagcaggcgagcgagccacagcaggcaggagggagcgtcgcgcggcgcagaggagcgccggggcagggccgcggcggaaccacagccggagaggggcagcccgagccgggcgccgcagggtcc

SEQ ID NO: 39263 - DNA, 2300 bp, Homo sapien
ctcggcctcccaaagtgctgggattacaggcatgagccggcacacccagcctacttaaactatttaacagaaaatactgaaatgtgactgcatatggtttattgcatatctttttttttttttttttttttttttttttttttttttgagacagagtcttgttctgtcgccaggctgtagtacagtggtgatcttggctcactgcaacctccgcctcctgggttcaagcgattcttctgtctcagcctcccaagtagctgggattacaggcacgtgcgaccacgcctagctaatttttgtaattttagtagagacagggtttcactgtgttgggcaggatgttctagatctcctgacctcgtgatccgcccacctcggcctcccaaagtgctgggattacagatgtgagccaccacacccggccatcatttttcaaagaaagtaacaaactcctttctccttgtgagtagaaatgtttaaatgctgtagtcagcccgggcacagtggctcatgcctgtaatcccggcactttgggaggctgaggtgggtagatcacctgaggtcaggagttcgagaccagcctggccaacatggtgaaaccccgtctctattaaaaatacaaaaaattagccggacatggtagtttatgcctgtagtcccagctacctgggaggctgaggcaggagaattgcttgaacctgggagacaggttgcagtgagccgagatcgcaccattgcactccagcctgggcaacaagagcgaaactccatctcaaaaataaaataaatgctctagtcaatctgtactttgaaactgaatatttactgttccatttaatcaccctatgggtactccatgaagacaagctttactgtaggaaatagtagcctcttcaaattaagagagtggtatgggttttagcatcaaactgttaacctcccaaagtcccctccaagtactaaccaggcctgaccctgcttagcttccgagatgagatgagactggacgcgttcagggtggtatggccatagactgaaactattaacctctgatgcttatgaatataaccctgtccctagccaaggcaattttttttttccacctggtcatagttccttatttttcttagaacaaaaataaagtctaacgagctttgttgttctgtcaaaaagtaaatttagagcctggggcacagtgatgtatgcctgtagtcccagctactcaggaggctgaggtgggaggattgcttgagctcaggagttcaagaccagcatggccaacatagtgagaccccatctctaaaatttttttttctttaatttttttttttttttttttttgatacggagtcttgctcattcgcccaggctggagtgcagtggtgcaatctcagctcactgcaagctccgcctcccaggttcacgctattctcctgcctcagcctccagggtagctgggactacaggtgcccgccaccacgcccggccaatttttttgtatttttagtagagacggggtttcaccatgttagccaggatggtctcgatctcctgaccttgtgatccacctgcctcggcctcccaaagtgctgggattacaggcgtgagccaccacgcctggcctctttaatgtttaagtaaatttagtgtcaggctaagacataagcagtaatttgtcttcactatttgggtttgaagtttgcaggtttcagggaaaatctgcagctggtaaattgaacaatttagtactaacaagagttttggcagttccagggagactccatctttctcagtcagcagattcagggcaattcagaaagcttctgtgtgatactatagccctgtccctggaagtattttgttctctgtgaagagaagtatcttcatgtttgtaatttccttcctgattttcggcttgtaccatctaggtatgttataatgtgtaatttttctttttatggtggttgaaacgaagttttttacttggctcccttgtagtgcttgacagaagacaagatcagtcttctcctacacttgcttgaagatgaacttgatcaccgaactgatgagagaaaaactacaatcaaattaggctcagacatccaagtccacgtcactgcctgtattctctctgtgtgtggctgggcgtgtaggtgagtcagcagattttgcctggagacatgaaccatgacaacagcattacacccatatatatcagtcactaatcgtatttagaaatcacatggtgtttcccgtgagaaaaagagacaaagaaaaactgggtgggggatggtgcgagg

SEQ ID NO: 39264 - DNA, 2300 bp, Homo sapien
tctcccacctaggctcagatcaaatggcttcactgttgtggctcagaaaggggcagactccttccttccaaatcaccccatcacagaacacccattgctaagtagcaagccagagggttagactggatgccccataagaggagacttcaaagtgttgagaccttcaagtgtagcctgtggaggaaaatcttaatctgtgggtgacaaaataagtgcttcaggaccacttgctccaaatccacattctgcaatacagtccaagaaaaaaggcaaagtggcgaggcgtgatggctcacacctgtgattccagcagtctggaaggccaaggcgggaggaccacaaggtcaggagttcgagaccagcctagccaatgtggtgaaaccccatctctactaaaaatacaaaaaaattagccgggcgtggtggcacatgcctgtaatcccagctactaggggatgttgaggcaggagaatcgcttgaacactgcaccccagcctgggcgacacagtgagactccattaaaaaaaaaagtgctgatatatttggggaatgctgaatagtttcacagggctcactgcaacctccgcctcccaggttcaggtgcgaaactacgagattttttgaagaaggaagccacttcactcggctgtttttttttttttttttttgagacagtctcactctgttgcccagacttgagtgcagtggcttgatctcagctcaccacaaactctgcttcccaggctcaagcgattcttctgcctcagcacccccgagtacctgggattacaggtgcatgccgctaccacctggctaagttttgtatttttagtagagacggggtttcaccatattagccaggctggtcttgaactgctgacctcaaatgatccactctcctcggcctcccaaagtgctatgattacaagcgtgaaccactgtgcctggcctctaggctgaatttgaaagaccagcaacagtgggtaaaagcaaaaggccaaaggatggtacatttggggaatgctgtaatagtttcacagggctggctcacagtgtccctgtggggagaatagaagagaagactaaagtgtagacagtggccaaaccatgattttattaaatgtatgtgatgagaagctacgagattttttgaaggaagagatgttatagataacatgaactagggtagagtacaaactgcaaggggtaagtcttgaggcaaagaactaaacttagaagacataaaaggacttaaagtaataaccccagccaggcatggagtctcatgcctgtaatcccagtgttttgcagggccaaggtgggaggatcacttgcggccaggagtttgggaccaggctgggcaccctgtctctacaaagaaaaaattttttaaaattagccagatgtggtggcatacccctgtcatcctaagctactcgtgaggttgaagcaggaggatccctttaacccaggaattccaagttatagtgagctataatcatgtcactgccttccagcctgcatgacagagcaagaccctgtctcttttttttttttttttttttttttttttgagacggagtctcgctctgtcgcccaggctagagtgcagtggcagggtctcggctcactgcaagctctgcctcccgggttcacgccattcttctgcctcagccaacccagtagctgggactacaggcgcccgccaccacacccggctaattttttgtatttttagtagagacggggtttcaccgtgttagccaggatagtctcaatctcctgacctcgtgatacgcccgcctcggcctcccaaagtgctgggattacaggcttgagccaaaatgccctgccgaccctgtctcttaaaaaaaaaaaaaaaggaaatgaaagaaaaacaggatagaataatatgcggcattaaattgggaaaataaattataaactcaaggtgttaaaatagaaacctagcagtgatggctacatggatgtgcacgttaaaacttatcaaacatgtgcagtttatgtcaattagacctcagtaaggctgtttaaaaaaatatcttttccagttttgctattagaaggggcccaaatgtagtaacagcagcacttctgcccacaattctttgcattgttagcaaccagattttggtccctcattttagtctactgtgattaaaaggatcaggctctttggagagttgctgattccatgtcttggggcaaggacaataaatcaacttggatccagaatatcctgttgttgctagaaagcaagaatgctttcaagaatgcta

SEQ ID NO: 39265 - DNA, 2300 bp, Homo sapien
taattactgggcagaattaaggtcccacttgaagtcaagaatataaagagacaagtttgtcatttctctttagccatatttagttgtatgggtacagaagcaataatagagaacttacttcaactgtgattgaggttttgtcaagtaagtactattaagcaagagaggttcaaggaaattcaaagggtattcaagaacatgtattttttagcttatttattttgctttttattatgatattgtcaaacatacttaatagcagaaagaataatataatgaatcccacaattctatcatccaagtccgacagtttaaaattttgcaatattttttcatctattcctccacatgttttcctggataacttcaaagcaaattccaaacatcatatcaattcacctataaacacttcaagatgcatttctaataaagaagggcttttaagaaccataactacaatgccattattacatatagtgaaatcaacaatgtttccttcatattaactaagtctcaacccatgttcaaattttgcaaagggatgatgataacaattagtaatgaatttaagctggctaagaaaagaagaaacaagggtggtggtggagttaggaagagcagaaaggtaattggatcaataggttgcaggtcctgctgctgggaacactgatagagttaggagcccacaggtagggtgctggaagggtaggaggtgatcccactttcctctttgcccattgtttagtcacatcagtcttccaacctggggtgttggaagattctgtacagatttcttcccttcaatctcatccgtctcagctccagtacctgatttttctcaggagaatgtgcaaactaaattagattctcctattataaccttggtacatccttggagcacttgtaatcataattttaaaactataggaaaatttgacatctaactccaccaagatctacagcttctttgctcacgactgtcattgctagtgcctagagactatcaataggatgctttcggccgggcgcggtggctcatgcctgtaatcccaacactttgggaggccgaggcgggcggatcacctgaggtcaggagttcaaggctagcctgaccaacatggtgaaatcccgtccctactaaaaatacaaaaaaaaaaaaaaaaaattgctgggcgtgttggcgaatgcctgtaatcccagctgctcggaaggctgacgtaggagaatcgcttgaacccgggaggcagaggttgcagtgagccgagatcgcgccattgcactgcagcctgagcaacaagagcgaaactccatctcaaaaaaaataaataggacgttttcaataaatatttgttggactaaggaaggagtatcaatagtgtcaaatgccacagacttctaaatccatccataacacggtttccaacaaggattctaaattatttgctctccaatgagggtcaccatttcctcgcttgtagaaaggtgcaacttaggagggtcgtatgagttaatttatttttatttttattttttttgagtcggagttttgctcttgtcgcccaggctggagtgcagtggcgcaatctcggctcactgcaacctccgcctcccgggttcaagcgattctcctacctcagcctccctagtagctgggattacaggcgcccgccagcaagtccagctaatttttgtatttttggtagagatggggtttcaccatgttggccaggctggtctcgaactcctgacctcaggcgatccgcccacctcggcctcccaaaccgctgggattacaggcatgagccacggcgcccggccgtattagttaatattacttgaaaattaagttgagcccctcatccctgctgaatttggactgacagcgttctaaaaatctcttatcaacctaaatatgctagttgataaaggaaacgattaatcaagattgtcctaaacagtacagccctccttaagctcgctctaaggttctaaaatgatgagaaaaggcgtgggccccgcggttagactttcccagccaggctgcctcaagaggcggatattaacctcccaggacggaagttccggagccttcaaactctcggggaagcaactcggcagcggaccaagatggcggcgccctgtgagggacaagcgtttgccgtaggggttgaaaagaattggggtgcagtagttcgctccccagaagggaccccccagaaaatccggcagctgatagatgaggggattgccccggaagagggaggcgtggacgcgtgagttcacgagttaaccctgggtcc

SEQ ID NO: 39266 - DNA, 2300 bp, Homo sapien
cgtagagaccgggtttcaccatgttggccaggcggtcttgaacccctgacctcaggtgatccacccacctcggcctcccaaagggttgggattacagaaagtgttaggattacagacatgagccatcgcgcccaaccaaaactttatatgttattttcttatttcatctctcccagttgattaattaaaaagtgttacttaagaatctactttggctgggcgtggtgctcatgcctataacccaatgctttagaaggccaaggcaggaggatggcttgaggccaggagttctagactagccggagcaacaaggcaaaaccaccccctcatccccacacactgccctatctctacaaatttgctttgcaaattgggaaaacagcatttcataggatttctgtgaggattagacaggttaaacatgtaaaatgtgtaagactgcattttgcctatatacataaaaaactggccagacgcagcagctcacacctgtaatcccatcactttgggaggccaaggcaggtggattacctgagatggggagttggagaccagcctgaccaacatggtgaaaacccatctctactaaaaatataattagcagagcgtggtggcacatgcctgtaatcccagctacttgggaggctgaggcaggagaattgtttgaacctgggaggcagaggttgcagtgaaccgagatcatgcctctgcactccagtctcggcgacagagtaagactccgtctcaaaaaaaaaaaaaaacagttaacatatattaattttggtttttatattttagaaccataggcttttttttttttcaagtctcaaacattttcataagcagcgtgctatggtgctagtgactaaaacatttctgcctacagggactggaagtaggaaaacaaggaggcagtgccagtggcgaccagaaatttgcacaccaggtacaaagggtatttgtcctcagctccagcagagtttcttttttttctctgcaaccatgtaaggttcttctaatgcaaaagaaaaaaaaatctgtcacatctaaggaccttgaaaagttttgtttcccttgaggaatttgatatgctttttccttatcattcagaaacatcagtgtatagtatgttttcccagtctgcattgcgcccagtaagtttcaagccaaaatttctgtttaattttggaacaatagaaactcctgatcggcacattaaaaattttctttgatcttgatcttccatacccgttgctgccttttatttaattttacatttcctcttgattatatatcttccaagctgattaaaattttctactagccaaaaggagtttgagcgaacaaaaatatttacagagccatcagccatctatgagaatacctttttcttggcattccacacactgccaggtgttatttgaaaagtctttactgatgtaataaaccagaaatggtttctcattggggttttattttgtatttctaagattacaggtgagagtgaacattttcccatatttgttaaccaggtttaaaactgtttgattgggacgtggcttatacagggacaaatgcagctaagccgactgaaagacaaatgaaacccaggaatatctggttcttacattttagctttgactccgcccctgggtcccctcacctacccggaccccaagcaagccctttgtgtgtgtcaaccatcagtgaatgggatctcaatctgaaaagctggcagaataccgtcttgcccccaaatatgtgtattatgcgtatatccagtgtctgattgcaatgtttatgggaaaaagttcctgaatcctaaccaagactgaggcactggccgtccccgggagtctttccgcaggcgcggcctctgacactcggtcttcgattggcccgcctggccccgcaggagtcggggtgacgccggccagcccagagcggacgatgagagctaggagtggctgcttctgcctttctctccccctacttttttttttttagccatagctatggttaccacgtttctctccgcctcccgccacctaccaagaaaacgactgaccattggctgcctttcaccaaggcggtaagtcattggtctctggtgggaccgggcgctgcccccttcccctgtctcctgggtctctggaggagcccaggaaggaggctccgctggttccgctgggtcaggcgctgacgggaccgggctgcggcaatcgttagcgggtcatgtcggccgcccagggctgggacaggaaccgccggaggggaggaggcgccgccggcgctggtgg

SEQ ID NO: 39267 - DNA, 2300 bp, Homo sapien
ctcaaggcctacaaaattctctagagcagccacgccacagcagcctcttacaggctatttagatttttaattctcttttcatttttaaccactggctattcatagccttacttttttgcaagctccattattcatcttaataatgttgtttttttttttgagatcgaggttttttttgtttttgagatagagtctagctctgttgctcaggctggagtgcagtggggtgatctcggctcactgaaacctccgcttcccgggttcaagcaattctcctgccttagcctcctgagtagctgggattacaggcatgcaccaccatacctggctaatttttgtatttttagtagagacagggtttcaccatgttggccaggcttgtctcgagctcctgacctcaagtgatctgcccgcctcggcctcccaaagtgctgggattacaggcgtgagccaccgcgcactggcctaaagaatgtattttatttaataaatgtttttagatatttatagtgggagatgttttaggttgtctggtttcctgtgttgcccagatttccaaatctccatgtgctttgactcttaggtctttgaggttctccagctatagattgtgtgctgttgttgtggtggtggtggtggtggtgatggtggtgttcatcatggaaaggccctattttgtcattacttgctatgtacattttttctttgctttgactaatgcccagaggtactagaacttcctatttctattcattgtctaaagccagtcctcaatgaaattttactcaaatacaagttttttcatagaaaacttacgtttcttaaagttaataatcgcaatgattaatcaaataggataactttatgctctgttatgaccatgtttttactttccatttctgttctctatttattaaatcatttatgttggttgacaactgcttttcttgacattaattcattcctaaagtcagttttgccagaatttcatacagtgtgatgtttctttactgtatataactttttatgccagcatgaaacattcaccaacgctaacaaaactagctaaccatcaaaattttgatgaattatattgctacatacccgtttgatgattcctaattctttgtacccgtaagcataaggaaaatgagttttattattttctagtcattccttttagaattctgctaagattaaaaaaaattgtttctatttataagttttgtttgagggtataaagtaccaattgatattttttatatcagttaaactccgaaaatataagcccttcataaataccatataattgttgtcaaaaacttgcttatttattcaggcgctatgctagatgctagggaaaaaaaatgctccctgctttcaaggagctcaaattctatttgggaaaacagacaaaaactataacccggaagtgtgattaatatcctggttcagaggcctctgtaggagtacattcctaaatagaacttttttttacatttcttaaaagtaaatttataaatttagaaggataaccatcagatagtcttttagtacaactcaggaattaccacaggctgttaagtaaaacacagtgaagtacagggacaaataagtttagcttgttaccaggagagtaatcttttagtaggaggctatagttatcccttttagaaagagcttctagaaatttcaaataaagaacttgcttggcctatttatttcctaaagaaatttgtcttttgtttgtttcttactaaatgatttaaaagtcttagagaatgaaacgagcttaacttttcaacagaactagacagatgcctttgactgcttattgtttttatgactgttaaattgatatggctcagaaaatactatttaaaatttttaatcacaagcagactgtgatctctaaagagaaaattatgttggggagaagagaatctccttgagggttggtcttctgattcctggattgccattgcctagatataagtgttaactgtagatgtcagaattgctacaacacactgatactgtttatcttaacaattgtagggagcccagattctacctctccttccagcagtcctactttctggaactatagtcgttctatgggggattatgcacaaactttaaagaagtttcagtatcagcttgcctgtaggtctcaggccccatgtgctaacaaagatgaagccgatctcagctctaaacaagccgcagaagaggtaagtggaaaataaaagtgacttaatatttatgatttatgcattgttagaaagtcttctacttct

SEQ ID NO: 39268 - DNA, 2300 bp, Homo sapien
agttctaatgtattaccgatcaaactgtgttccctaaaattcatatgttgaagccctcacctccagtgtgactctatttggagacagggcctttaaggaggtaattaaagttaaatgaggtcataagggccctaatccaatacaattggtatccttacaagaagacagcaaggattcacgagcacagaaatcaaggtcacaatacaagggggccgtctgcaaggagacccgcctcaggagaaaccaaccctgctgacaatttgatcttagacttccagcctccaaaattatgaaaaaaataatttctgttgtttaagccacctgtctgtgatattgcgttatggcagccctaatacataatgctgtcatttggtcagtggtgttcttttttaagccttgaataaatgcacaacagcttatagattaagagggaaaaacacagatgtgcccgttatgaactactatgaactacatcaaatgcatacaatttcttcttaggaaagagtcacatatggagggggtgggaaaccggtattctaattttttttttttttttttttagcagggtctcactctgtcgcccagactggaatgcagtggcaccatcttggctcaccgcaacctcggcttcccaggctcaagtgattctcctgcctcagcctccagagtaattgggattacaggcgcatgccaccacgccctactaattttttgtctttttagtagagacagggtttcagcgtcttggccaggctggtctccatctcctgacctcgtgatccgcccgcctcggcctcccaaagtgttgggattacaggcgtgagccaccgcgcccggccggtattctaattttgattgcaccttgagccctttcactttgaacaattttccagttagttcatctctaaatctaaaactagagcaaaacaacattgctgctaaagcaatctaaaaatgataaaacttaacagctcttcaagagcacagcatacctgccgattttcattaatatacaataccacgtggtattaatcttaggatcattttaggaaaaactttggccattggacatacatgatgtaatccactagcttactgtggcatggcttaatgtttttattaggaggcacacttcagaacaagtccccaggccctgggtttctggctgtggactctaacgcgtcatctcctccaggaagctcgcgagagctggggctgggctggatgcgcctccttggggagcactgcatccacctcacctgccaccgaaatgcatctgtgggcctccgctggggttgagctcctctgggtaataaccaggaaggtcttattttctatatccgtgcgcctggctcagcggcacacttgtaggtatttgtgctaaataaaacaaagctcaaccttttcctcaggatgagcagctcttccaaaaaatacatacgaaaatgtgttattatttttaacctcaaaaccactagcaacttcaataaaacaaattttgggtgtgcttgttattgctgcaccctattaaacagattaagaatttaggccgggcgcggtgggccacgcctgtaatcccaaaaggcggtgggaggccagcaggcgtttgggaggctgaggcgggcggatcccttgaggttaggaaatcgagaccagactggccaacatggcgaaaccctgtctctaccaaaaaaaaaattacatggggtcaggactcttgacatagatactttaacacaggggaaagaaatgctttgtcactgatggtgtctggccactttatcacgccactctatcctacggtgagccgccctacttaatcagtttacacatgtgagtccataaatgccctagggaagctaaaattatattaatagatacaaaattcagcttgttacaattattactttttactgcgggttcagagcctggtctgaattttgctgcttagctttctcccgcagctgagtgggagccgcaaaaccgagacctgtttccctggtaacgctccgagcgcctgggcctgcgacccctccctttctcgcgagaagagactacctagttcttccggtaactttagagccgcttgccggtggcctcccgcttgagcttggctttgcgcatgcccagagagagtggcgcgagcctgcgttttccggccagaggacatggtgcgttttcggggtcgtgtttgtgcttcctgtcttggaatctacgcgggttgtgggagttccgcgcctgctgatctgtcctgggttcagccaagggggatgtggctaggcgttccgcctctctagggg

SEQ ID NO: 39269 - DNA, 2300 bp, Homo sapien
gataaagtggccagacaccatcagtgacaaagcatttctttcccctgtgttaaagtatctatgtcaagagtcctgaccccatgtaattttttttttggtagagacagggtttcgccatgttggccagtctggtctcgatttcctaacctcaagggatccgcccgcctcagcctcccaaacgcctgctggcctcccaccgccttttgggattacaggcgtggcccaccgcgcccggcctaaattcttaatctgtttaatagggtgcagcaataacaagcacacccaaaatttgttttattgaagttgctagtggttttgaggttaaaaataataacacattttcgtatgtattttttggaagagctgctcatcctgaggaaaaggttgagctttgttttatttagcacaaatacctacaagtgtgccgctgagccaggcgcacggatatagaaaataagaccttcctggttattacccagaggagctcaaccccagcggaggcccacagatgcatttcggtggcaggtgaggtggatgcagtgctccccaaggaggcgcatccagcccagccccagctctcgcgagcttcctggaggagatgacgcgttagagtccacagccagaaacccagggcctggggacttgttctgaagtgtgcctcctaataaaaacattaagccatgccacagtaagctagtggattacatcatgtatgtccaatggccaaagtttttcctaaaatgatcctaagattaataccacgtggtattgtatattaatgaaaatcggcaggtatgctgtgctcttgaagagctgttaagttttatcatttttagattgctttagcagcaatgttgttttgctctagttttagatttagagatgaactaactggaaaattgttcaaagtgaaagggctcaaggtgcaatcaaaattagaataccggccgggcgcggtggctcacgcctgtaatcccaacactttgggaggccgaggcgggcggatcacgaggtcaggagatggagaccagcctggccaagacgctgaaaccctgtctctactaaaaagacaaaaaattagtagggcgtggtggcatgcgcctgtaatcccaattactctggaggctgaggcaggagaatcacttgagcctgggaagccgaggttgcggtgagccaagatggtgccactgcattccagtctgggcgacagagtgagaccctgctaaaaaaaaaaaaaaaaaaaattagaataccggtttcccaccccctccatatgtgactctttcctaagaagaaattgtatgcatttgatgtagttcatagtagttcataacgggcacatctgtgtttttccctcttaatctataagctgttgtgcatttattcaaggcttaaaaaagaacaccactgaccaaatgacagcattatgtattagggctgccataacgcaatatcacagacaggtggcttaaacaacagaaattatttttttcataattttggaggctggaagtctaagatcaaattgtcagcagggttggtttctcctgaggcgggtctccttgcagacggcccccttgtattgtgaccttgatttctgtgctcgtgaatccttgctgtcttcttgtaaggataccaattgtattggattagggcccttatgacctcatttaactttaattacctccttaaaggccctgtctccaaatagagtcacactggaggtgagggcttcaacatatgaattttagggaacacagtttgatcggtaatacattagaactgtctatgataatttgcaatggcatgatacatataaaagagactgaattaaaatgagtggatacattaaacacttagacgtgaagataggaaaatatagcatatacaagttttaggaaaaaaaattaaggcagaatgcaccatattgaggtatgggggaaaataacataaacattcagaggagtaatttgaataaccttccacaaacttagaagtccaagaagcatttgtcagttcctagaacagttgcttaagtatgtgtcataataggttgccaaggaaattgtcatacatcatagagggagtgaagtagttcccagtcatctttatccctttaagcatggtttattttctgagcaaggagtcatcatgggagaccttttttccttattttgggaggtagatcctcccccaatacctgtaaattgtgccattccaaatcaggattatgaatgctggaaggatgactcttgtggaaccatagggagcttcctgctttggtattttgttatcgtatt

SEQ ID NO: 39270 - DNA, 2300 bp, Homo sapien
attactcaccacaggcttgtgtttcttccactgaaatctctcttcaaggccatctcagacatttcctctgccatccacaagtccagatgtagcatcctaaatctcggtttccccaagaggctcatatttggctccctgcttagaggatctctgccaggcaccatcctgcaaggttcaccattttcagcattgccctcatcaatcagttacctgcttagaaaccttccaaggctctccatatcatctggtgtgtactcctctgtttggattgtgagatcctttgccctctagcccaccttctggtattttaccttccccaccactcccaggttcaagtctctgctctgctaggctaagtttcctccttaacccagctgtgtatcatgtgctctcccctggttccctgtctagcttatattttcttaccaccagaaatccaggctcttttcacatttgccttggcacaaaggctcagctcaaactccatttttttttttttttttttgagacggagtctcactctgttgcctaggctggagcgcagtggtgccatctgggctcactgcaagctctgcctcccgggttcacaccattctcctgcctcagcctcctgagtagctgggactacaggctcccgccaccacacccggctaactttttgtatttttagtagagacggagtttcaccatgctagccaggatggtctcgatctcctgacctcgtgatccacctgccttggcctcccaaagtgctgggattacaggcgtgagccactgagcccagcctgaaacttgattttttccaggaagcttttattgattctccaagtacatacttccagtttattgaactactgtttatttgataggtgctggagacatgaggatgaattatggcctctgccttttggtttctgtcttctctctgactcccaggagaatgaaaaaccaagttaatccagtcattcttaaaatcagaaacactgtgtatatacctttccccttaaagcagatatttgagaatgcaaacccagagatttaaagtgtgtgctgataaatttgacacacaaaggacagacgaaaatttccttgctgcttgttgtggttgaggctttctaggcttaatataacgtgtatgaacaactaaaattaaataaactatggtttctaaaaataagcagttatattttcttcttaagcaatgaagaacaaagtcagattaatgtagatctatgtttatgaacaagaaaagatcacctttgtttaaagaacagtatacgtgatatggtctaatctttgtttaagaaaaaaactcgaaagcagagaaagaaatttggaaagacatatgccaaatggttttctttggatggaagaattattgatggttaaagaaaacactttcttttaattcacactttttataacaagcaacttcattgttgcttgttataggaaatgtcatcagaaagacattttcattttgggaaaaagcacagaaagagggatatcaatttggtgcaaatgcagatggatcactttcgagaaagtgcaaaattgaatattaaaaggccttctgttttgttttaatgtagagtgaggattggaatgggccacatctacagggacactcagcagatgtggactgagtgactgcagtgtttcaaggtaaacattataaaaataaacaaatgagcaaactaatggaatgtgatagacaggatgcctgagtaattactataaatgctctggccttttttttgtgtgtgtgtcagagacccagaaaagactttaacctctaggtctattaatctggcttctatcacagggtagctagtggcgttttatggtctcaatcataactatattgcccttggtatgctctagcaattttgttctctttccatcaaagtttgttatcttatcctaggaatggaacatgtacacattggtgatatcacacaggtggatgtctacaaccttgagaatttcacatgcaggtgggaattttcccatgtgggaattcacgtgagttctcagaaggccagcagatcaccctcagctgccatccctacaaataaagttcaggaaggactctgaattctggactccaggaaaacccatggccatgaggttgatcctgttttttggtgccctttttgggcatatctactgtctagaaacatttgtggggtaagttatgctttctggtgcttctttgaattttacttacctgattgatggaggctttgattgttacagagtaaatgggtataagtgttcagtgttttcagagaagttct

SEQ ID NO: 39271 - DNA, 2300 bp, Homo sapien
tctgtacaaaaacaaaacaaagcacccgtcatggtggcaaacatctttagtctcagctgcttgggaggctaagttgggaggatcactcgagcccaagagtttgagacttcagtgagctatggtcgcaccactgtactccagcctggtcgacagagtgaaactctgtctcaaaaaaaacaaacacacaaatggtggggacccaagccaatgacattcctttttcctggttgccctatcaagcctcggtctcaggttgcacacagtttctctttagatattgactcccattagggatttaggttttcttcatgtggatgattttccctgggagaaaaggtaggaactaaatttcagcttgcctagaatgcttggtccttgattctcccacttcacatctcttacagatttgggtctcagttgttcttgttgctgacttcaaagctgacatcgatctcagtgacgctgagcccacgctttgtggtggacagggtgggtgtaggaattcagttgaagtgttgagaggacaaaaggaccctgagggagcaagaggagatgatggcccctagctccacagctcctaacaaaggctctctctgggaccacacttgagattctgcaccctccttttgattaggctggttcttgagccctggctaagccagcctgagcaaagatcctgcgaagtcatccctcccaccttgatatctgatcaagttcctcatccccacctttgatggggactttgatgtataagtccttggcctgcttttagcaagaatccccctaccttgatgtcttctcttagtaatcccactgatcctctctgttttctttgccgtattcagtgttaagcacagtaagtctttcctactgaaatagccatggtcctaatcataataatcttgaattaggtcttacattttaacacaggtcaggatagtttttctttaactctctcaactatgacccttggttgtgtccactccctttgagtgggtgtggaaagcatgtagaccgtagggagggtgggatgggaaaggctgtgggaactggggctcccaggacagactcaaaggtcccagagcccctgaaggcgttatggagatatgagtgtcttccatttattcagctgtgacttggcggaaaggacaccagacccacagtctaggaagtataagaaaatcttattatttatttatttatttatttgagatggagtctcactctgtcgcccaggctggagtgcagtggtgcgatctcggctcactgcaagctccgcctcccaggttcacgccattctcctgagtagctgggactacaggcgtccgccaccacgcccggctaattttttgtatttttagtagagacgaggtttcactgtgatagccaggatggtctcaatctcctgacctcgtgatccgcccacctcggcctcccaaagtgctaggattacaggcatgagccacctcgcccggctgaaaatcttattattgataaaaccattaagccttccccatagatcagaccccaaggaacactgataatttattcagactaaaacatcctttctatatcatttgcctgatacatttctatttccttagtggagtcagaagaattaggcttcagatacataaaagaggccccaaacctctttcctcatcctgacctgccctggtgaaattctctggcagggcttgtcaagcatgtggtcttggagccagctcagtcttgctttgatagtcttaacttttttattattattctagaggtaattctatgccaggtttataatctgacctctcctatcaggataaattccatccaacactgtggaattagcttattcactgaaaaaacactatttaaatgccaagtgatgagcaatatggtacccttggcacagactttttcagctcctggagcaagttcctgaccttgtaaattgagatgctcaacctttatcacttgaaaggaatgggagaggcattggtagggcctgcctgtcacagtcagagttgcaagggtgcttgggaatcacattagcatttttgaggacttgagtcactctcagactctttataaatacagcttgactcagccactgtatgactgactccccggggacatgaggtggatactgttcattggggcccttattgggtccagcatctgtggccaagaaaaattttttgggtaagttccttttggacttattatttggttatttcagaaatatgggagccaaatggaactgaaaatgaatggctgataatagctcacatggaggaagaagacct

SEQ ID NO: 39272 - DNA, 2300 bp, Homo sapien
aatttaaaaggaaaaaaacagagatagtgctagtcaccaaaagtacccatggggcgtcttcttgttcaaaaacatcattttaagccaccaatgatgagacaactatccctgtacttggcttaagggtgggaaaagagagagagtgagagagaaagaataagagtaaaagagagagagagaagcagttaggaagttttgagaattctatgacatagcttccaatagaactttctgtgataatggaaatattctatgtccacaccccccagtaggatagccactaacctcttgaaatgtggctattgtggttgaatattgattttggagttgtatttaactttaattaatttaaataaaatttaaatagccacatgtggctaatggctaccatattggacagcagagttctctgggaattcaccaaccctgaaagcaccatctccaatggctggatttgtttttggttttgcttcttctaagttcatgttagacgggtaatgtgctgacgtcataacaaggtttgagggtgacacatctcacacacgcatgcgtgagcacccaattatcatacttatgaactgcaattatcagcttatggctggatttgaagcggagacacatagctatgcttgacctaatacctcattttggcttttcacttataattaattactcacctaatcatttactcagtaaatgtcctctgaatacctgctatgttccaggcacttgctaaagtctggaaacaaaatagaaagcaacacatatctggcccttacatttctaaaggcgtaagtagaaaattaatttaaatagcatgaagataattggtaaacccaagacataatggtagcccatctcactccagataagtgtaaaactatagatggtgtttgtgttacaagggaaaggcacattgtaccatgaggacggggaacatgggctccacatagactgaaggagagtttccctaaattagaaatttttttggaggacttttatttcctgcaggtggggtgggttagatacctaagcaatcttgcccaaatgaaagaactcaaatgcagaagaaaatatttttagtaacaactttctaaagccattgctgggttggcacaaaaataagaatctatagatcccaaaaagaaggaaaagccagacagacacccaagtggtaagcaagttttgcctcagagaacttctcagaatgctggtgttcttgattttcctactggatgcatgtaccatgtatctagaatcatcttccctctgcttcaaatctatcttttcaaaccttcctttagttaaggtttctgtttttacttatttgaaaatttttggccaggtatggcagctcacatctgtaatcccagtgctttgggaggccaaggcaggaggagcccaggagttcgcttgagcccaggagtccgagaccagcctgggcaagtcagggagaccctatctctgcaaaaataaaataaaattagctgggcatggtgaggcacgcatctgtagtcctagctactcgggaagcaagcaagcagatcaactgagcccaggactttgaggctgcagagaaccatactccagcctgggtgacagaacaaaaacctatctcaaaaaaaaaaaaaagaaaaaaagaaaaagaaaagaaataaggaagggagggagggaggaagagagggagggagggagagagggagggagcgaggaaggaaggaaggaaggaaggacagacagaaaaaaaaagaaaggagagagggaaagagaaagaaaggaaaaaaaagaataaagaaagaagaaagaaaaaagagaaagaaagaaagaaagaaagagaagaaagaaggaaagaaaaagaaagaaaagaagaaagaagaaggaaggaaggaagaaagaaagaaagaagaagaaagaaagaaagaaagagaaaaagaaagaaagaaagaaagaattattttgctctcattcttgaaagggttttttgggatagaaattccaagttgattactgttttcctctcaacacattgaaaatattatcccacagtcttctggcttccatttttgctgctaaaaggtaatgtttgttgacttactgttcttcagaaggtgacctctctttgttcctggtttctttgaagagcttctctttgcttttgatgttccacagttttatcatcgtaagtccaggtatggattttttttgttttgtcttgcttgagaatcatttgaattcctgtatctgagtgtcactcgctttctattattttccaaatttctcagccattatatttttaaaca

SEQ ID NO: 39273 - DNA, 2300 bp, Homo sapien
aatggctgagaaatttggaaaataatagaaagcgagtgacactcagatacaggaattcaaatgattctcaagcaagacaaaacaaaaaaaatccatacctggacttacgatgataaaactgtggaacatcaaaagcaaagagaagctcttcaaagaaaccaggaacaaagagaggtcaccttctgaagaacagtaagtcaacaaacattaccttttagcagcaaaaatggaagccagaagactgtgggataatattttcaatgtgttgagaggaaaacagtaatcaacttggaatttctatcccaaaaaaccctttcaagaatgagagcaaaataattctttctttctttctttctttttctctttctttctttctttcttcttctttctttctttcttccttccttccttcttctttcttcttttctttctttttctttccttctttcttctctttctttctttctttctttctcttttttctttcttctttctttattcttttttttcctttctttctctttccctctctcctttctttttttttctgtctgtccttccttccttccttccttcctcgctccctccctctctccctccctccctctcttcctccctccctcccttccttatttcttttctttttctttttttcttttttttttttttgagataggtttttgttctgtcacccaggctggagtatggttctctgcagcctcaaagtcctgggctcagttgatctgcttgcttgcttcccgagtagctaggactacagatgcgtgcctcaccatgcccagctaattttattttatttttgcagagatagggtctccctgacttgcccaggctggtctcggactcctgggctcaagcgaactcctgggctcctcctgccttggcctcccaaagcactgggattacagatgtgagctgccatacctggccaaaaattttcaaataagtaaaaacagaaaccttaactaaaggaaggtttgaaaagatagatttgaagcagagggaagatgattctagatacatggtacatgcatccagtaggaaaatcaagaacaccagcattctgagaagttctctgaggcaaaacttgcttaccacttgggtgtctgtctggcttttccttctttttgggatctatagattcttatttttgtgccaacccagcaatggctttagaaagttgttactaaaaatattttcttctgcatttgagttctttcatttgggcaagattgcttaggtatctaacccaccccacctgcaggaaataaaagtcctccaaaaaaatttctaatttagggaaactctccttcagtctatgtggagcccatgttccccgtcctcatggtacaatgtgcctttcccttgtaacacaaacaccatctatagttttacacttatctggagtgagatgggctaccattatgtcttgggtttaccaattatcttcatgctatttaaattaattttctacttacgcctttagaaatgtaagggccagatatgtgttgctttctattttgtttccagactttagcaagtgcctggaacatagcaggtattcagaggacatttactgagtaaatgattaggtgagtaattaattataagtgaaaagccaaaatgaggtattaggtcaagcatagctatgtgtctccgcttcaaatccagccataagctgataattgcagttcataagtatgataattgggtgctcacgcatgcgtgtgtgagatgtgtcaccctcaaaccttgttatgacgtcagcacattacccgtctaacatgaacttagaagaagcaaaaccaaaaacaaatccagccattggagatggtgctttcagggttggtgaattcccagagaactctgctgtccaatatggtagccattagccacatgtggctatttaaattttatttaaattaattaaagttaaatacaactccaaaatcaatattcaaccacaatagccacatttcaagaggttagtggctatcctactggggggtgtggacatagaatatttccattatcacagaaagttctattggaagctatgtcatagaattctcaaaacttcctaactgcttctctctctctcttttactcttattctttctctctcactctctctcttttcccacccttaagccaagtacagggatagttgtctcatcattggtggcttaaaatgatgtttttgaacaagaagacgccccatgggtacttttggtgactagcactatctctgtttttttccttttaaattcctgagctattgt

SEQ ID NO: 39274 - DNA, 2300 bp, Homo sapien
gactacaggcgccaccacgcccagctaaggaagtttacagtctccatggagagacaaaaataacattttaggagcaacgaagaagaaatcaatgtaagtttgtgttcaagcactaaatagcgtgatgaacacccttccccacctggcaaaatcctatcataagacctaagttaagctgggctcaagcctataatcccaaccaacactttgggaggccaaggtgggagggttgcatgagcccaggagttcaagaccagcctgagcaacatagtgagactccatctctacaataaaaattttaaaattagccaagtgtggtggtgcacacctatagtctcagctactcgggaggctgaggtgggaggaccgcttaagcccaggaggttgagcctacagtgagccatgatggtgccactgctctccacagcctgggtgacagagcaagaacttgtcttaaaaaaaaaaaaaaggcctaggtcaaatgtcaccttcttggtaaagtcttccctggactttgtgccatagtgtgtgtccttttagccctcatggtacttttcataccacatcacatccctgtttaggtctcttgcagggaggagaacagtccccaaaagtcctttgcacgtctaatcccttattggtgacagcttcttggaggacctgttagaggaccaacaagttagttggttacttctgtcttcccgcctagaccgtgagctccctgaggtcagcgaacatctgtattgggtgtcgtgtccatgtggagcacagtacttggcccagaagaataagtattgattgaatacatcgacaaaggggtgagcatttagagaaggagcagacaggtgagccaggaagcagccagaagaagctccagggagcactgcagccctgccagaggcgggtggggccagcaaggctgtacaggggagagcaggagctgccgcataggctccacatctgttaaaagcgggtttagggctttctcaccttcctagagttaggtttgggagatagttgtggataaatataagggggtcactctgtcttggtgtgggagggttggccagctagggggtagggtaggaggcagtgggagtgaatagaaactagaacgggcactatggctctcaccagtgcccaaggtcggggtcctgacacagagcagagcctctagatggtgctgggaaagccctggggggcccgtgaatgaggatggatttgtgggatttgtgatggatttgtctctagggtgagatcagcatccagaacccagtgaattcccctgtgtgggttccagtttctcctggacactgtgcagtcctcacaggggtctggccctggctccccccgccacacttgctattcagacgacatctggttactgttcccatgaagggcaaccccgacctcggggccctgtactggtgggggtggagggaaatgctggcaagggttgggctcctgaccctgctgctgctgcccgggctggactcccacaggaccctaaggccagcaggagggggctgggaagtcccacagagggactgccccgcacagggccggggcagcctggacaaagccggtgtggtgacaggccaaaccgacgcaaaaggttagtccaccctgctggtctctccaaggcatcagggtccgtgggaggaggaggtgtccggcactccgcaggtatctgtgcttcacacaggtctaatgggggagagcctgggcctgcctgaagctgccttggggacaagagagggcagaagccccacttgctcgatcaccggaatgaaaggctggcactcaggagcacggaacaaggagacgcctggaatgaggccccagcaggagtggctgcttggagtcctggctccttctccgctacccagtgggcaaacagaaccgcagctttagggtgtgggcaggcagagtcctggctgggactccaggaggcctcgagcccccgctgaccctcaggccccgctggccccagatggtcgggggtggagctctggcttatctctccagctgcccagttccctgccactttatcatggagggtgagagggtgtcagagctcagaactcccaccccagcctccccgtgggacaggacccaggtgctgggggagaacagacctcgggagcagccaggagtcctcggtcctgggagggtttaaaagccagggggccgtctcgacctcagtctgaccttccctcccggcagcagcatgcgggggttgctggtgttgagtgtcctgttgggggctgtctttggcaaggaggactttgtggggtagg

SEQ ID NO: 39275 - DNA, 2300 bp, Homo sapien
gctccccccgccacacttgctattcagacgacatctggttactgttcccatgaagggcaaccccgacctcggggccctgtactggtgggggtggagggaaatgctggcaagggttgggctcctgaccctgctgctgctgcccgggctggactcccacaggaccctaaggccagcaggagggggctgggaagtcccacagagggactgccccgcacagggccggggcagcctggacaaagccggtgtggtgacaggccaaaccgacgcaaaaggttagtccaccctgctggtctctccaaggcatcagggtccgtgggaggaggaggtgtccggcactccgcaggtatctgtgcttcacacaggtctaatgggggagagcctgggcctgcctgaagctgccttggggacaagagagggcagaagccccacttgctcgatcaccggaatgaaaggctggcactcaggagcacggaacaaggagacgcctggaatgaggccccagcaggagtggctgcttggagtcctggctccttctccgctacccagtgggcaaacagaaccgcagctttagggtgtgggcaggcagagtcctggctgggactccaggaggcctcgagcccccgctgaccctcaggccccgctggccccagatggtcgggggtggagctctggcttatctctccagctgcccagttccctgccactttatcatggagggtgagagggtgtcagagctcagaactcccaccccagcctccccgtgggacaggacccaggtgctgggggagaacagacctcgggagcagccaggagtcctcggtcctgggagggtttaaaagccagggggccgtctcgacctcagtctgaccttccctcccggcagcagcatgcgggggttgctggtgttgagtgtcctgttgggggctgtctttggcaaggaggactttgtggggtagggatgtggagaggagggggtgccctctgagggtgatggggaggactcagcccccaaccagtagaggagacagacagacagatacatggcaacacagccagagaggatggcctggcaccacctgggacagctggcagataagcaaccagggttgggaagaggttgtgtctcccaagacagtctcctgagccctggagaaacctgagctctgaggaggagttttcaggagaggagaaaggaggaggcctggctggcttggaacagagaaatagtccaaactgggattgagatagtaacagcgtctagaagtttctaaagatggggagagaagaggtgagggagcccaggcctctccttgttgagacccttggtgctgtcccctgcccagcccagaggacgaggcccagtctggggattctgggctgctgcctccctcctgcacctggggagtgcttgtggccagggcaggtgcagcttgggtgctcactccccactcccactctgcccaggcatcaggtgctccgaatctctgtagccgatgaggcccaggtacagaaggtgaaggagctggaggacctggagcacctgcaggtcagaagaggggagaagggctctctgaggccccagggtatcagctggggccaccccaggtccccagcggccaactgtgcctgggctgtctccacccaacaaggagacatggaattgactctgttaggaagcgacttcaagcccccagctccagagccttgctgcccttgagcacctgggcaaggggccgggcccctttccagttcctccctctgccttgctgtctcaaaggcccctcactctgctcctgggccatttccctgaccacactggactctccagtccccagggtttccccgtatttctctggccctattacccctgacctatccccaattatatgagaacttctggcaccaacagcccctcccacgcaggccctgtccctgcctgctgtcctggctggtgcccccagcccgctgtgaccgtgccggctcttgtcctccccagctggacttctggcgggggcctgcccaccctggctcccccatcgacgtccgagtgcccttccccagcatccaggcggtcaagatctttctggagtcccacggcatcagctatgagaccatgatcgaggacgtgcagtcgctgctggacgaggagcaggagcagatgttcgccttccggtcccgggcgcgctccaccgacacttttaactacgccacctaccacaccctggaggaggtgagggcgcccctagcggccgctccctgcagccaccagctcttcatcatggctggtagaacgcggtagg

SEQ ID NO: 39276 - DNA, 2300 bp, Homo sapien
gcacttggcgttcgttttgatccagttttggcatagcaggatccaaaaggaatcctaaagagaaatacatgatgttaaaagtcttttggtttatagctttaagctttccaaggattccattgaggccaaatgtgaaggaaaggggtgactcttttaaaggagagtctccttggaccacaacaccccccgctccccacccgccggccagaatcagaattgagggattggggagggaacatgtatttaaattaccccacccagacacacagacacacagtcagttggatccaagaaccagccgggttctataatctctctataatgcttcctgtgcagtccaaatgtgacaaccacgatgactagtgaggcaagtaaaccagatgttctctggaacaaaagagagacaaccgtacaaagaagtgagccaaaacactgaagaatggaagttgaatggactgttggacctacttgtactttctgctgttttggctttttgactgttgttctttaacttgattaatgcattatcgcccatctactcagttcctcaagttagagaaactatagccatctttgatgaatttctattccttgcaccccttacctcttctcatgtatactattgattttacctacacgtctttaaatctctccttttctgtctttctcaccacctctgagtgtagtcccctatcatctccctctctcctttcccgttattctatccataatctctatggttacccacaaggtgcaccaggtaagcatacattctaaatactaatgaatctagaagtttctgcttgctatgcaaaagcttctagattaacattcttccctctgcctccttccaattttttgcagccttcaaacccttccttagcagaggagtgagagactgagaattttagaggggttaaagaactggcaaagattatggaaattaagacaaaacttaataaacatgaaagagtgacatgaaaagtccaagaagcagctgtggccagaattcaaaattctggtcaagcagcactgactggcaacatgatccaaggtgtagccctaaggttgggttgctgaagtgcctaagagaacaagggcatgtgaggccatgttgttgaatgggtcatctcacagaccctgaagtagctcaaatgtgtgctattattcactaacagacaactggcgagtatgaactgctcagagtaacctttctccattcctggaaaaacaacttagagcaaaggacaaagggttactgtgttgttcctttcatgtaaaaggaaataataattttgatggatttggtgggacatttaggagccaagtcaaactgtgtgtgtaattgttttgtaaaggtgctaggacttcattttcagatccggaatgggaacaggtggtggctggtggcaggagtcacaatggtttccatgacgacgggattgggtcctagtcatcctcccattctccacaagacctactgcagcttttctcataaggtgcttattaagtatttgttaaatgaacgatgaaccacagaatagcgcgtgtgctttgcaattaaggatgtcgctctatagctagcctaaaagcttttaaagcaccgataattactgtatttacccatgtattttgcataattcgcatattaacttaaccagaaaataataaaccatactctcccatttctgctgaacaaccctggcccatataatattccctgttgtggaatcagtagcccagatgtttggttgaaacggccataaaacggagctgggggatggggagtcttgtgttgtatttatggttccacattagctaaaactcgtgttttgtcccggctctcaagccactgcccccgcccccggctttgcgcaggcgccagccttcccctccccccgcgcctctcttcccgccctaaggctggagccggcgagccccagcccagagaacaaaaggcctcgctagccggcgtcccgcgttgcccttggcaaccattgagcggcgtcttgcccttctgcgaccctgagatgagagagtaaacggggcccccattggccggccggggaagacgggccaatcggagaagagggtatagggaggcggctgaacaaggttgtgggggtaggaagctagggttagaggcaacccgtgaggctagaaccccgaacgtggtcggttggagaaaatatgtccctccggaggcacattgggaaccctgaggtgagggccaggtctcggccggagagccggagggggcgggcgcaccggaaaaggctcatgtgggcagggaagagcag

SEQ ID NO: 39277 - DNA, 2300 bp, Homo sapien
tcacaactcattaaacattctatggttgtctttcaatttagatctctcttcttcaaaaggagtttttaagaaaaatctattactggcttgtaatatatcaatctctaagcaaaaatactcgtaacattcatataataagaacagattacatgggataaaagtaggatcattttctcatttagcctgacatcaagagtatttatttggctttctataccattagtttaaattagaacactctatttccatccactagagtagaatagctatgtgttttccctttaaaagataaattaactctgtaagcattaatactttaaaaaatgactagtggtttttcaaatattttagttctaccaaactgatgaatagataaacatgagcagatagatctggatttaaatcttgattccacaatttaccagctctgtgaccatgggcaagctccttaatctttcaaagcctgttttctcattagtaaaattaggataataatagttctttatagggtaatcatcagaagttaaaaatgtacatatgagaaattcagcacagagtctggcacaaagcgattaacaaatatttgctgttattcattcttatcatcattattataaaatgttgggttgagctgggcatgacggtgcatgcctgtaataccagctatttgagaggctgaagcaggaggatttcttgagctcaggagtttgaggctgcagcaagctatgatcgcaccactgcactccagcctgggagacagggtgagatctcttgtctataaaaagaaaattaaaatgttgggttggcaaaagggacatagaaatgagtaagatgctgtccttgtcctcaagaagctcagctctgtggtaggagagacaagacaggtctgcaaacatcatcacaaaacaatgtgataaggcaacagagggacagagaaagcacagaggagggagggatcatttccataggaaagtttcatggaaggcttgcaagaggatgtgaaaattacattgatttttaaagaacgaggaggaattttttaggtagcccaagtgggacaggacatagctggtcctggagaacatgtgtaaaggcacggagaaaggaaactgcatggtgttttgggaggaactataattagtaatgtttggtcagatcatgaggttttggtgggggtgggtaagatggaggtggtaagatagaagattctagaggaagtcaaggcaaggaccagattttgaagtgttttgcatgcggagctgaagagcttgaatttagcaccagcaatagggtgtcagtaaagagttttataagagagatgtgatcagatttgcattttagaaaaatcactttggcaggtttgtgaatgatggaccagaaatgtgtgatggtggagacttggaagccaattaggaggcagtagtccaggtgagaaataatgccccgaacaagggcaaatggcattaggaatggaggggagcaagctgaactcaagagacccttgggaggtaagatgaaaaggatggggaggagggaacttgttgggatctgtatctaagggtacccgaccccttggtctcattccactgttccacaggggttggtgacagtgtgtgggagacaggggtggacagaagtgcgttaaccaagatacagactagagaaggaagcgtcagttcttaggacaggggtcagtttgtagtgtgggaaagaggaggtgagaaagggtagtgaatttcacctggcccttgttgagtatgtgatgcctgtgttcgccatgtgaacagcagaaagcagcaaatataaggatcgagagcacggggtagagagagggctggcgatggacaccatctttagggtaattgcgaaattaggggaagggctgaaatacggaaggctcgccgaagatctctaggtagttaataactatcaaaatgtcacttctttggccttcacttttattatgtaaaagtactcagatcaggccgaatacaattttattctctttatccaatgccggaggctattgtcgaagccacggcctgccatttcataccctttgcaataggtggcgctgacgcctggcagggagaaggcggcagcacatgctgggctcgggggcgatgggcttgtgcgcggacctggcgacgctctagccccgagccgcgtattcgtggccgggtcctccctgggaacagggtgaaggccgagaacctctggcctcaggaagcgcatgcgcaaccggttctccgaaacatggagtcctgtaggcaaggtcttacctgaatcaggtaagaggc

SEQ ID NO: 39278 - DNA, 2300 bp, Homo sapien
tgaggcggaactgtgttagacttggaatgtgacaagaatgtgtgataagccactggctgagggagtactactgcatgagatatcctgcacagtccaggatagcatctgtccagaggaactgaaagggtgcaacttcgagcaagccagagccgactttgaatttatgtgtggctgtgtgttttctcagggctccaagtgttttataccttgggtcaaattctccccctgcggaggaagctcctttctggaagtaaatcaggcacatttagaagattcgttaactctttggctcctgggggattatggccagcattttctctcttagacttcccacagcgaattcctggttgggccaagctgatatctttgagctgacttctgtactcagggttcttccaaacaggaatatgctttctctgcctaagatctgggttccatgcccatctcaacctcaatccctccttcaaggaagtttttcctaactcctcggccagacatcaataatgtctgaagggaggatttctcccgagtgccagacttggaattcctgttgtcttcaggagctctccctggcgctccctccttcccccagggcctttaaactgtttctcctccagtctgcccacttgatccatgtgggtagacatgttccatggccttcagaataagatcttttgtggggtactcagtccataaacagaaaattgccttcatcttggatgctggtgtttctggcctggtgagaatgaaagtgtggaatttgtttgtaggactcaaagtttccattaacaataaatatgaaaaatatataatgcaaaggcttttgttattgttattattaaaataggaaagcctttacctttttggaagaaccgatttagattttgcagagtaattcagtctttaaaaggtagtggtagttaaaataggtaatctttgacttgtaaagagactaatttaaattttgttaagtaaccaattaaggccataaagagtttaaatccatctgtggcttctcattttctctagaacaaattcctaattccctacgatgaaattctcttgctatcctaattttttgccggctcaaaggactaaccgttttccccaaacacgcggccctgagcctccggtgctttgcgaaagccgtcccctccggctggaatgttctttgtctctctggtaaatgtctattcatcattcaagaccacccttcgcccctccccttaattacttcctcccctgtgcgccctcaaattcttgtactcattcaagcagtatttattaggggccagctttgtggccggcaccgtggcgggctctggggctacaaaaggtgaataatacttgggctctgcctctgagggccttacacgttagggaggagtgggtcaactgccacaaacgtcgctaggaaattaaaaggaaaattttacaaagtggcagttcttgtctgtcttcccctccagatggcccgtgtgttgttttcgggccggggctatttctcatttatttcgcacccccggttcttagtgccctgtaggtgctaaatcagcatttgtttcatgagtgctttttctgggggcaaccagacccctgcagaagtgtacctgtgttgtgccagaggttctgatgataggcttataggcggtagtttcctcagtgtccgtgggtcgcccccggtcccgggttggatgccccgcggtccagcaccgaacctttcggggtgcagagttgcagagccgcggagggcccgggccgtgcgcagccgaagggaggcctgcagcgccccctctggatgcagcgggcaccggccggccgccccgctcacccgctcgcaccccacgtttgttcaccagtatttcagtttacggtcagaaaatgaacacagacacttcgtgatactctacacttttcaaaggcgtaagggatgccttttaaaggattatggattagaaaaattcctccctctttcttgtgcctctgggcccttgcattgtgattctatcttacgtaaataaagggggctttgctctcctaattgtgcccactgttctgtgcagcgcggaccggcgcatgcagcgagcggggctgcgagggcgctgctgtggccaggcgtctggcatgctgaccacgtcgcgctgctgtaaaggaaacctgccccgcgcagcggcggtggctggagcgggagaaaccggactttgtgcaactttggccatagtggccatcccatgaatctgtttactagcttggtggtgggtccaacagagcttgttgctccctagccgcttgctcgtgcc

SEQ ID NO: 39279 - DNA, 2300 bp, Homo sapien
tgtttctggcctggtgagaatgaaagtgtggaatttgtttgtaggactcaaagtttccattaacaataaatatgaaaaatatataatgcaaaggcttttgttattgttattattaaaataggaaagcctttacctttttggaagaaccgatttagattttgcagagtaattcagtctttaaaaggtagtggtagttaaaataggtaatctttgacttgtaaagagactaatttaaattttgttaagtaaccaattaaggccataaagagtttaaatccatctgtggcttctcattttctctagaacaaattcctaattccctacgatgaaattctcttgctatcctaattttttgccggctcaaaggactaaccgttttccccaaacacgcggccctgagcctccggtgctttgcgaaagccgtcccctccggctggaatgttctttgtctctctggtaaatgtctattcatcattcaagaccacccttcgcccctccccttaattacttcctcccctgtgcgccctcaaattcttgtactcattcaagcagtatttattaggggccagctttgtggccggcaccgtggcgggctctggggctacaaaaggtgaataatacttgggctctgcctctgagggccttacacgttagggaggagtgggtcaactgccacaaacgtcgctaggaaattaaaaggaaaattttacaaagtggcagttcttgtctgtcttcccctccagatggcccgtgtgttgttttcgggccggggctatttctcatttatttcgcacccccggttcttagtgccctgtaggtgctaaatcagcatttgtttcatgagtgctttttctgggggcaaccagacccctgcagaagtgtacctgtgttgtgccagaggttctgatgataggcttataggcggtagtttcctcagtgtccgtgggtcgcccccggtcccgggttggatgccccgcggtccagcaccgaacctttcggggtgcagagttgcagagccgcggagggcccgggccgtgcgcagccgaagggaggcctgcagcgccccctctggatgcagcgggcaccggccggccgccccgctcacccgctcgcaccccacgtttgttcaccagtatttcagtttacggtcagaaaatgaacacagacacttcgtgatactctacacttttcaaaggcgtaagggatgccttttaaaggattatggattagaaaaattcctccctctttcttgtgcctctgggcccttgcattgtgattctatcttacgtaaataaagggggctttgctctcctaattgtgcccactgttctgtgcagcgcggaccggcgcatgcagcgagcggggctgcgagggcgctgctgtggccaggcgtctggcatgctgaccacgtcgcgctgctgtaaaggaaacctgccccgcgcagcggcggtggctggagcgggagaaaccggactttgtgcaactttggccatagtggccatcccatgaatctgtttactagcttggtggtgggtccaacagagcttgttgctccctagccgcttgctcgtgcccttggtggttaccggtagttaagcttagggcgcatagggccctcgtggctcgccacctctcacggttcagtacccacgcttcgaacgagggatgggagcaggcgccacggccggcaccccagagccctgctgccccttagttcgagcggccatcctcctgtggggcttgtgggcagcctgtggggtttgtgggcggcctgtggggtttgtgggtggtctaaggaaagagttggggcactcaggggtctgctgtttttgcccgtggccttaactcatcaggggagggtttctgcagcagaatctcgggctcagggttggcggttaacgagggagcagcggggtcttggggagggggctcgacacccctgaaggtgccccctaaaggagccactgttagaggggcaccccatctttgtggccatggcggtggtagagcggctgggaggggctctgcggcgagcaagggagcaggcggtaggggttctgcggcgatgggcgggctaggggcggggcgcgggtgggctctaaaagtcggtgcccactcgctccgcgctgccgcggcaaccagcacaccccggcacctcctctgcggcagctgcgcctcgcaagcgcagtgccgcagcgcacgccggagtggctgtagctgcccggcgcggcgccgccctgcgcgggctgtgggctgcgggctgcgcccccgctgctggccagctctgcacggctgcgggc

SEQ ID NO: 39280 - DNA, 2300 bp, Homo sapien
taatgcctaatgatctgaggtggaacagtttcatccaaaaactatccctctgccctctgtccatgggaaaattgtcttccataaaaccaatccctggtgccaaaaaggttggagattgctgatctataggatcattgagcaattaaaaacataaaatgttcgtatgtttgaaaggttttggaaatctgaaagttatgttgtacacataataaaagaggggtaagtgtggggtatgggacaggaaagaaacctaggacccttttctttcatttaaaatcttctttatgacctgcctttatgacttctactacttgtctctttgtcctctgctttttctggtgccctttgtctacgtgtatccttcaatccaaagtttcctgtcccacttctgaatttcctcccaggaagtggtcttttttttagtaatacatttttctttccgtttttcagcagaacacaatttatacattaaaacctatcacattgcatttgattaacgtcagttacctatatgtgaatgtgtaagacatctaaatacaagagttcctgattctggaatataattggctgagttttatagcagagaatatactagtactctctttcttccaggggagtttcctggaagtaaagcttgttatgataacgttatttaagcaccgttctgttgactgtccatccctatcctgttcttcctctttcattacttccttttacacacctctcccagcttacatatactcacctttgtaacaggtatgggagaaaatacttctggtttatcagttgctccaggagtaaagacacaaaatagacttataagagctacatagttttcttcctcttgggaaatgtctgtgattttcaaagaaaactaactcatgtttctaagcttctagtgaccaagcattatttattctcatttttttttttctgtatttagcacatgatgaagataagctatgatgtggttaagcgctggatcaatgaagcccaagaagctgcatcaagtgataatattatggtccaggtattgtcattgaatcacattagcttgtctcaggatcagcattctttaaacctgtattgtaggggcagtgtatcgattccctagataaacattaactaaaggcaaattaagcagctactagtacgtattctgaagtaggaatctcactaattatgattactgccatttgaatactgcccttcaggtgtttcatagaagctagatgaccctttgtaggaatatttgggaaagattgttatattcagtagtagattgagatgctcgtggcagtcttttatttgaaaaataatttgtgtaaaaagataattccaagttctgaggccttgattataggcattataaaaatcatacggagcagcttttactttatgaaactttgaaaccattttgtcaaaaagagctcttttgatatttattaggttattcttaagaggaataagattaaattcttcactggaaattgtgtgtaaagtaccccattttatttgagagggcgtttatgccctcttgatgtttataacttctatggtaacatattcagttattaggaaacagagtagtcatttttcccttgggaaacactctcattctcctgactctgatcatgtgtttttatacaaagtgtcaagatgatgacactcttgtagcctgctttaggagattaatcctttaattactaagatggccacagatgatgtaaagccactcgtagagacagatagcaccagtaaagccctggacccgagagcgtgtgtactgaggatgtgtgagccagtgttgagcctgctagagccatcttcaggttgtatgtcacctcctttatgcctgccagtctgaattgacagcttctaggggtaaattagaaacgtttaatcttttcagtcttgcctgtgtttagttcagtgtgaaaaaaatatttgtgtacatgtgacctgggtattttaaagaaatctttaatctagttccgtgtaattctatttttgtgtaaatattttgacatctttctaatccatgtgctaccttctttttcatgttctttagtaccatgcattgggagtcctgtatcaccttagaaagaatgatcgacttgctgtttccaagatgttgaataagtttactaaatctggtctcaagtcacagtttgcttactgcatgctgatccgaattgccagtcgcttactaaaagaaactgaggatgggtaagtgtcttcacctaaacctgggttattttccatttgcgaagttaatataccttagagtttatttcctt

SEQ ID NO: 39281 - DNA, 2300 bp, Homo sapien
cattggtagcagcgtgagacttgaccatgctagtgctagcaataaaactctttttttcatctgaatattgctctcagtctttttactcatctttatctgccaccaccttcccagtgctttttcccagttaaagttaaaaagaactgtatttccagaggattttatgttgagggctcactatagtagtacactacacatttaattctttatgtatctcagataatcagggattacgtttgatttctaggactctctgggatctgtatataatatgtgcccttcacatagaggaatcttcataacttcaaaagcaggctccatctccatataggaatttctttatgactttcctgatgggttcagcctctgcttgtgtatttcttccaaactgagattctccattttgagacagtttatttcattgttgaacagttattcttctttatatataatcttaaatgttctttcttaaagcttcaacttcgttgtttgggttctgccctttgggatattattactatattatcatccttttagtgcattctgaatatttgcacagaaacaaatataagattggtttttgaaaattattttgaagcataagagtaattttgcataagcatgtttttccttaacaattttttctttttgaatgttattagggaacaatgttgcaagccattgaaagatacatgaagcaggccattgtggataaagtttccagtgtatccagttcagcactggtatcttccctggtaagtgaacaagcagcttcctagttcttaagcatggtacagttttgagttgcgaaaacaaagtatcactatgattgtctcacaaatgaaacagttaaaaatatgtatacacctctattactttatccaagtgtgttttatctagagcaggggtccccaccccagggcttcagaccagtactggtctgtgacctgtcaggaactgggctgcacagcaggtggtgagtggcaggcaagcgagcattgctgcctgagctccgcctcctgccagaccagcagcagtgtgagattctcataggagctcgaaccctattgtgagctgcgcatgcagggatctaggttgccggcctcatatgagaatctaatgcctaatgatctgaggtggaacagtttcatccaaaaactatccctctgccctctgtccatgggaaaattgtcttccataaaaccaatccctggtgccaaaaaggttggagattgctgatctataggatcattgagcaattaaaaacataaaatgttcgtatgtttgaaaggttttggaaatctgaaagttatgttgtacacataataaaagaggggtaagtgtggggtatgggacaggaaagaaacctaggacccttttctttcatttaaaatcttctttatgacctgcctttatgacttctactacttgtctctttgtcctctgctttttctggtgccctttgtctacgtgtatccttcaatccaaagtttcctgtcccacttctgaatttcctcccaggaagtggtcttttttttagtaatacatttttctttccgtttttcagcagaacacaatttatacattaaaacctatcacattgcatttgattaacgtcagttacctatatgtgaatgtgtaagacatctaaatacaagagttcctgattctggaatataattggctgagttttatagcagagaatatactagtactctctttcttccaggggagtttcctggaagtaaagcttgttatgataacgttatttaagcaccgttctgttgactgtccatccctatcctgttcttcctctttcattacttccttttacacacctctcccagcttacatatactcacctttgtaacaggtatgggagaaaatacttctggtttatcagttgctccaggagtaaagacacaaaatagacttataagagctacatagttttcttcctcttgggaaatgtctgtgattttcaaagaaaactaactcatgtttctaagcttctagtgaccaagcattatttattctcatttttttttttctgtatttagcacatgatgaagataagctatgatgtggttaagcgctggatcaatgaagcccaagaagctgcatcaagtgataatattatggtccaggtattgtcattgaatcacattagcttgtctcaggatcagcattctttaaacctgtattgtaggggcagtgtatcgattccctagataaacattaactaaaggcaaattaagcagctactagtacgtattctgaagtaggaatctcactaatta

SEQ ID NO: 39282 - DNA, 2300 bp, Homo sapien
atagtgagatcctgtctctacaaaaaataatttaaaaaaatttaacagggtgtggcggcatgcacctgtagtctgagctacttggggggcttgaggaaggaggattgcttgaacctaggagttcaaggttgcagttagctgtgattatgccattgcactccagcctgggtaacagagtgagaccctgtctgaaaaacaaacaaacaacaataacaagaaatcgaaaataccacaatgccttaaatattatttaaataaaggtttgggttttatccagtaggcagtttggacccaatgaagaatttcagggcactgagtacacatttgtgtattagatatatataattggtgggtcctcagacttcaccagctcatggttttaagataaggtccatttctcctactgggtttctctcctcaaacaattcctgagactccctaaggtatccttgcctgtcccacaaagccattgcagtgattgctcaacccgtctgccagccatcctcagtccaaatagtcctgataccgaaggcctggggtcatattataccatcccttaactggcttcttcaggcttctctgctcctgctatacctatctgccaccacatcccatcccatttccacctactgatgctcttaactccgtaaatactgcacagctaaaaacaacctgtggtattaaacaaaacttcatagatatacagaaaagctgaagaacagcagagaatgattgatcttgctttacaaggggctagtcttagggtcagccccaaatctgaactcaggtccttctacttctcagcaggtctccggggcattacccaccttgagaacctctgggcctattatctacactgtctctgcctaggttcccaatacccttgggccaaggaagaggaagaggatgtttccttccccaaagcctgtttattttcacccccagaataaatgagtgcagacttctatttccttcaaagaaaactccacctacaaagtatgacttgacctttacaagccatataaagcaaacatagtagttaatagtacatttagtcaagtcggagttaaatcttaaatgataccatatgtaggatatcaacagttcatcttaaatctgtatttcagggaaagaatttctctaggatgtagaatgtaatctaggttagaatttctctaattttgcaggggcacgatcctgttgagtatagacccaatttacatttctaaacaagttatgccagtgaagccaaaggcagacaaagtttcttagctacactcttagacaagagaacagaaagccagcatacactctgagaaaaagaggaacatgagttaggaatgaatgcacgttaatttagtgagtttcttaagtgtcaatatggtttcagatggaatcattgaaagaaataggcttgaacaaggaagactctaaactggcaatgaattttccactgggttttgatgaaatgaaggaatccaaaaattataaaataggttgggaatggtattacacggtccaaaatctaccctctaaagaccagcctctggtccctccaagtgcgtctcctttacatctcacattaagtatccttcgagtacttctgaaaagccacattcaccagggtgcctgtgctttgtcgtagcttccaagaagtcagcgagtgaaaggccaatttccaaagtgattcgggaaccactgacactcgcatcgctcttggaagacatgcccaccagaaccgcgcccggggagagcgccttccgcaacgggagggccccgcagtggattatcaaaaaggccacggtcatcgggtgaacacagacccctcagtcctcccgcctcgctctcttgagactgaggggtccgcagaagtcgccacccaaataaaaccacattcctgctgctgcgggcgtgggctcccgggtcgcaagccgggagggtcgagccgaagtctccggcgggccgcaagaggagaagggggcgtggctgcgtcccgggggccgagggcggccggggagggcgggccttggccccgagtgaaggcgcggcggcccaaccggcgtgagagcgcggggccggccttcctgcagcctcttccgctcgccggctgcggcgcctgggacggttgcggtgggtctgggcgctgggaagtcgtccaagatgattaaaaaattcgacaagaaggacgaggagtctggtacgcgcggggcttccgaggcccaccctcagccgcgggacgccccttcccccgcccgccgccacctgctttcaggccggcggggctgggggcgtgggcgccg

SEQ ID NO: 39283 - DNA, 2300 bp, Homo sapien
aaaaactttcttaaaacattatgagttttttttgtgtgatttgttttagctcatcagctattgttagcgttagagtattttatgtgtggtccaatacaattcttccaacgtggcccagggaagccaaaagattggacaccctgcttcagagcccatattaggttttttttttttttttttttggtcataaactgcagaaatgaaccctaagaaaataaaggatttatttgaaagaatattaggaaagctcacagaactgaagagaaaattgtgtagtcttgctttaggaaggactagatctggggcagctccggggacctcagcaggtagagctcagagctcagagtcttccagcctgggataccacatgaggtggctcaggtgcaatcatcttacagctctgtgggtcattagcaaactttcaaattcttagtataacctggttggccacctttgaatcaatcatccagagctaggatgcaggagtgaatggcactaattggtgatggctatagacccttataatttctcaacccctcctcagcactgtcatagacttctcaaggacctctttgcatctttctaatctatagttcttctgtctttccaatctatagttcacatgccactatttttgtatttctaaaatatatattgttcaataaggagattatacctcatttaaaatctcttgttagcgcttcattactcagaataacccacaaacttcctatcaaatagttcattttaggatttggatcctgtcttcctctctagtctcacctctcactacccttcccctaaatcttatgttcctggcatattgcaattacagtattttcaattcccctaaataagccaggctttgttgtattctcatgtttttgcctctgcttctccctctttctcaaatgtctgtcctctcatcacctggttaattcacactcatcttccccagctcagtttaggcagtagttccaaatctctctcagtctcttctcagtatgggttaagtccccttcctcattgcttccatagtaccctaaatttagatctaatttggcattctactctgttgcaatcaaccgtttctttgtctctcttcctggctaaactgtgagctcctaaaggagctcaagaattacatctgatttatgctttgttctcatcacctaggagagtgtctaatatgtcataaatgttcagcaaatatattgaaataagcaaacactagttttgaatgcataagatacaaagcactgggaggggggcacaaatatgtttaaaatttacatttccacttttaagggactcacagcttaagaggcagacaagacccgcacataagaaaagtgaaaacagaactacaagacactatacaatgacatgcacaaaacccagtgactatagtctagagtttgggattgcattaatctagaaaatcttctctttaaaggaatgacctgagtagtaacataaagaaagaagattcagggctgggcatggtggctcatgcctgtaatcccagcactttgggaggctgaggtgggtggatcacaaggtcaagagatcgagaccatcctggccaacatggtgaaaccccgtctctactaaaaatacaaaaattagctgggcatggtggcaggcgcctgtagtcccagctactctggaggctgaggcaggaaaatcacttgaaccagggagacagaggttgcagtgaactgagactgtgccactgcactccagccttgtgacagtgtgaggctccgtcagaagaaagagaaggagaaggagaaggagaagattcaaatggctgaagagattggggacagcattttaagtatggggaataagaaaaaatgctcactgtatttgaagaatgcagtgaaaacattggcttaggtagaggtagattaagagatggtgaagatgtgtgtgtgtgtgtgtgtgtgtgtgtgtgtgtgtgtgtgtgtgtagagaagtcataggctggcaaaataagagattggcagattttgtttaaatatgcctttaagttttggccttttcattctctgtctccaacacagaacacctcagcattctagattgcctattcatcacaaattccctctgtctcctccagaatccagaaaagaataattacgatattttcaaaatggaaagttcccatgccaaagactttgccttcttcaccaaactatgatttcgtgatgttcttaaaggtagtgtacaccaggtttttacattcttattttgaatgtagttttagtgtttgtgtgatttgtttttcagcctgg

SEQ ID NO: 39284 - DNA, 2300 bp, Homo sapien
tatgatgctcttttttggatgtttacatagtctggggcatggttctatgctttagtctcttgttagtccaccatttttcctacttgatcttatctagtccaatggcttcaattagcacataatgcttgaggctgacttccaaatgcataattctacccaaatggcttagtctgttcaggctgctataacaaaataccataaactgggtggattataaacaacaggaatttatttctcacagttccagaggccgggaagtccaaaatcaaggtgctggcacattcagtatctggtgaggaccggctttttgttgtgtcctcacatggcagaaggagtaaagatgtgcttttgaagccacttctataagtgcactaattgcccccacaaaggctccacatcctaataccctcataattagggactcagtatcaacatatgaatttagggaggcagaggacataaacattcaatctatagtaccaaacctgtctctcctgagctccagtcccatattttaaactacttactagacaacatcctcacctctgcctcatactcaactgaccagaaacaaaattcatcatttatcccccaaacttgctccattccctttgttctctaatttggtaacttgcacctccattaactcaggtaacaaagctaaaaatgtgattatattccttatctcatgtattcaactagttaccaagttctattaattctaccctcctaacatctttcatatatccttttttaaccctcttcactgccactaccttgctttagagcaagcttgtccaacccatggcccatgggccacacgtggcccaggatggctttgaatgcagcccaacacaaattcaaaaactttcttaaaacattatgagttttttttgtgtgatttgttttagctcatcagctattgttagcgttagagtattttatgtgtggtccaatacaattcttccaacgtggcccagggaagccaaaagattggacaccctgcttcagagcccatattaggttttttttttttttttttttggtcataaactgcagaaatgaaccctaagaaaataaaggatttatttgaaagaatattaggaaagctcacagaactgaagagaaaattgtgtagtcttgctttaggaaggactagatctggggcagctccggggacctcagcaggtagagctcagagctcagagtcttccagcctgggataccacatgaggtggctcaggtgcaatcatcttacagctctgtgggtcattagcaaactttcaaattcttagtataacctggttggccacctttgaatcaatcatccagagctaggatgcaggagtgaatggcactaattggtgatggctatagacccttataatttctcaacccctcctcagcactgtcatagacttctcaaggacctctttgcatctttctaatctatagttcttctgtctttccaatctatagttcacatgccactatttttgtatttctaaaatatatattgttcaataaggagattatacctcatttaaaatctcttgttagcgcttcattactcagaataacccacaaacttcctatcaaatagttcattttaggatttggatcctgtcttcctctctagtctcacctctcactacccttcccctaaatcttatgttcctggcatattgcaattacagtattttcaattcccctaaataagccaggctttgttgtattctcatgtttttgcctctgcttctccctctttctcaaatgtctgtcctctcatcacctggttaattcacactcatcttccccagctcagtttaggcagtagttccaaatctctctcagtctcttctcagtatgggttaagtccccttcctcattgcttccatagtaccctaaatttagatctaatttggcattctactctgttgcaatcaaccgtttctttgtctctcttcctggctaaactgtgagctcctaaaggagctcaagaattacatctgatttatgctttgttctcatcacctaggagagtgtctaatatgtcataaatgttcagcaaatatattgaaataagcaaacactagttttgaatgcataagatacaaagcactgggaggggggcacaaatatgtttaaaatttacatttccacttttaagggactcacagcttaagaggcagacaagacccgcacataagaaaagtgaaaacagaactacaagacactatacaatgacatgcacaaaacccagtgactatagtctagagtttgggattgcattaatctag

SEQ ID NO: 39285 - DNA, 2300 bp, Homo sapien
aataccatgtttgtacatttaaaaaaatcatataaaccaatattctgcattttataggttcacatccagttaaattgtaaaacccagattggaaagttacataccaaattcatgttagtgtttgcctttggggaaaagggtggagaatggtattgggggcagtacaaggggaccttcaattttatcagaaatgttgaatacttaatagatctgagggagatataacaaaatgttaacatattcattatatgagacaggtatatgggtgcttgtaatgttctctctgcattttaaatatcttcacattttttctaaataataaaattaaaacagctagtaaattattctatctgatagattttaatgtgtagattaacgaagagttaatcgtctagaggaacttcagaaaaattaactgttttgcaatggaatcgccttaaaaataataacactgacaatattatttaaaaactgctgaaatgaataaagtagattctataggtgtcaacctggatagctgtcaaaatcatattgagggaaagaagttgcaaaatgatatgtatactagtgaaccatttacttaaaaattttaataaataagcatggagatatacatatatttacatgtataattaggtaatacgggtatcaaaacaaatgcagattaaatagccactttataatactaattacctagaaaagtgaagagggagaaaggtgaatggaactggggagggaaacaaagtgacattcaactctatctgtaatgtttaatataaataaaaacatgaaacaactataacaaaaatttcacatttgattaccctaggcagtaaatacatgaacgtatgttattcttgatacatacgtattaattttcaaaagaaaaagtactgaagaactacaaataaaatgcacacaattcactcatataaaagcttgtatacatcaaaaactaagatatgactatttttagaaattatcctgtttgtttttctatgtggttttacatttttaaaaagaaaaacgagggaaaaaatgagagcaatgaagacacgtaaaagaaaccgtacatgcatttgattataaaaaaggcaaacctccacaatcacaaaacaccatatgagcattctatatcatgtgctgcatttccttacatttaactttcgtcaaaagcaaattacaagataatgcctaattggaaacgtgactttctattattaaaatggtgggagtccattttaatgtgtttatctcgccgctagactataatttatatctcagcgtttaaatttgtttggatgccagtgacaggttaatgcagtttaaacatgcatttttctttcgttggctgaatagttaaatcgttactcaaaggattttaagtttcaatttcaaccgggagaggattctttgcttttccaaggttaaaactgtttctggttcgagatgctattaattaatggctacgtagcggatctatttagggaactgctcccggccccgggttcacagttgacctgctcaatgagaaaactttttttgctacagacttggggatatttgcaatttagtctgagagcggcgaacggggagtgaaatggaattcgagaccacttcgctaacaatcgcaattatgaaccgaaagacatgtcaggtattagcaatttttttccttaaaaaaaaaaaaaactttctgggactccgcgggacacccagctggcgacggaccagcgggcggcgggctgcggggagggggggcgaggctgctgcaacccagaagttccgactggggagtttcgctctgttaccattacctggctcgccggcagaagaaagaacgcggagacaagataatttctgaggctgttaaacatgacttagccggggggccgcgcgttccgagggggtgtcctgcgggccggggcgggtctctgccgcccccgcgggctccggtgcgtcaggggcgcgtcaggcggggcgggctccgcgcgggcggcggcggcagcggcggctgcggcggcggcggcggcagcaggcggcaggcggcgagcacccggcctcctgcttctcgctcgccggcggccgggcggtcccagcatgtcggccgccgtggcgtgcctggactacttcgccgccgagtgcctggtgtccatgtccgcgggcgccgtggttcaccgccgcccgccggaccccgagggcgcgggtggagccgcaggctcggaggtgggtgcggcgcatccggagtccgctctgccgggtccggggccatcggggcccgcgtcggtcccccagctccc

SEQ ID NO: 39286 - DNA, 2300 bp, Homo sapien
tctaaaaagagctttattgaggtatataactggcacacaataaactgcacatatttaatgcatacagttggatgagtttggacatatgcctacatccatggagccatcaccacagtcaagttaacagacataactataagctccaaaagtttccttgtgtccctttattttgggatatgtgcatgtatggtgaaaacatttaacacaaactctcatctttaataaattttaaagtgtataatacagcactgttgactgtgtattaatacgatgctatgtagatctcttcaactaattcatcttgcatcactgaaactttcctctcccctgaaacatgtctttaactgtttttttgaagtctgtccagtgacgtgctagtaaatgtttaacaaccagcttttgtggggagggaatgatatgtagcttttgctaatttccatgttgtaaatactcttaacatagcttataccaagctatagaagtaacatcagccagctcacaaaactgaaatgttagcatttagttctcatgagctagcttcagcatgctactaaatccgtccctgttgatgtggagatctgagttttgctttttagtttttatatgttaagactgtatcacaatgtttttatccatcaccctattgatggacgtctagactatgtctagggcttcactgctacaagatggtgctacagtaaacattcttgtgcatagcccttgtgcacatgtgcaaggatttctggagcagaaggtatgtttactagatgtggaaacactgtcctctgaagtagttgcccagtccacccacttcacaagcagtatgtgagagatcttatttccccacaaccttggcaatacttggtctcatcagacttggtttttgcccatctaaaggttataattccattgattttatacatagttgtccctcactgtgagatccagtaactattcataattacctatacgcttataatttctttttttcccccatttaactccagtatttgtctgtctctagttgattgtaatgaatgcaagaggctgttgtggagtgtcaatgccagaccccaaataagggcaacacggctacttagcttctttctgaatttaaaagaaatgtatagctttaatttgggaatttagaaacagaagctaaggtgtctgtaagcctgtattagttattgtagcctttacctgcaagcatcaaagaaccatagcagcagtgacttaaacaattgtgatgggcatttatttcaagcaataagaagtctgaagctagtaaaggaggcagtggtgccatcctggacccaggctcctgccattcttctctgccacccttagctgtaggctgtaattctcacgctcctcatctcacggttgcaagatggctgccgcagctctaggcttcacatcagcgctcaaggcggaaggagcagtgcttgagtagaaacacaagagctttcacataaatacctagaagccttttgtcagcatcactaaccagacctgtgtcacaggccactcagtgtgttaggcaagtatttaatgggatatattttccgtcgtcctctgaacaaaattgtattctgttaggatgggaaaagggaagaagggaattatctgcaacaagagttatttggaatgtggattttagagacataattttttcatagtagcatcaaattgggtgaatactgggaaattattcagagatatataccatccagaacaagaaccaccaccacagaacacacagtcgccacattccattgatttataggctgctgttttgttattttccactatctattaggtatctaaatttcacttctctttgttcctttttgccaattcaaaagaatttaaaatgttagaatgaacaaatactaatgaggcgcatgttacctaaggatgagttttcaggcattccttgtgccacaaatatgaagaaaacggaatcattataggctctagggtgcggtagagaagcacatgggactaaaacaacttggatttgtcatttactgttttgtttgtaggacaagtctcttttagtgtctcatattattgacataactcatgaatgcttttttccagagttgatcacacttaacaatatgtgcaggcaggaccgaaaaaaggtgtggtgccttccagcccataaatcaaaggtgagtcatgagaatgctgtccattaaacaggaaggaggagatttggatatggaagtaggacatgcattagattccacagcaattaggcttttccataaaagaagcatctgcttttggaactt

SEQ ID NO: 39287 - DNA, 2300 bp, Homo sapien
gggggcttccttctaagtaatagagaagagtgaatattctaatcattgagtagtggtcaggcctgtaatcactgctttttcttttgctgagctcggtatcaacggacaagctcaaaaattgtagctatttaaaattactctccatgtaaagggttcctgttcctttgatcctatcacagacttcctttttttctattgaggaggttcataagatctcgtgggcaagggctgaggagatgactattgcgtagtgtagttgttttaaattaaaaatttacctctagttataggtgctactttttacttaccctcaatttggagattacatcatgcaggctgggcacagtggttcatgcctgtaaccccagtgctttaggaggccaaggcgggagaattgctaaaggccaggaattagagaccaccctgggcaacacagcaaggcgtcatctctaccaaaaaaaaaaaaattatctgggcatggtggtacttacctgtagtttcagctactctggaggctgagatgaagtgagaccctgcctctaaaataaataaataaatcaattatgtatatcaggcaaatgatttccatactcttcttgttaaaatatcagtttggtaaagatggtaaaagcttatcacatcccaggaagtcgaggcttccgtgagccaggatcgcaccactgcactccagcctgggcgacaagagtgagaccccgtctcaaacaaacaaaaaaaaaaagtgaaaattccctttcagaatttcacatccaaaaatgtgaaataaaagagttggggtctaagtggcaaagtgctgccgtgtttcaagttaagggcttccatggattgtgtgataaatacaggtgtgaatgtgggtgatttgttttattcttcagtgcccattaagtagaagcttgtattttcctccttcccccttcaagagcccccctccccaccatgcaggcacatggaggccccaagttggaagcacattcacagcctgaagctgaaggacaggctctgaaaaatctttctttcagcaaaacgtctactaatctcagaaagtgagctttgtcaccattgatactctgtaaggtgggatgaaagcaagttttcttactcattttgcccagttgtcaagaaatgctgcccttctctctaacataaattaacaggtttggctacagcctagagaaatacaaaatgtcacattttagccttagtggccggttttcaaagggtgcctgagtgtgaacaccatgtcggctgctctgttaatgtgactgggtctcataaataggtatttttctacccctgtgatggacaaatctgaaaaagttttttcatcttacaagcccagaggatggtatttagaggctgatttttggtatctcagttcctggtagggaagacgaattccgtatttgaaatttggggacaaacaaaaataattctttctctttccttgaagggttaatgctccaaccagcctcagattggttcgcttgaatcttaaaattacttttctggtcacgcgcaccgaaggtctaagcatttgtgaaatgtcttttttttttttctttcctcttgatgctgttctctttgggctgtcttaattacacaggggttgagaaaccaaattaaaattaggcgtgtctggtcaacagtgatcacgttgcatgcttttagctttgcttgttgaagttgcttctcctccccgagtggctttcctccccacaattttttttttttgaaggaaatatcataagctctttcagaaatactcacaggaagtgagagtccgtatgctggttactcaccagcaactgagtgttggcaggtggagaatgctaccgcagcccgcccagacggatctgcagactggccccatcgcagaggattagacagagggtgcatggatcatagggtttttgaacagaagggagttttaagaggaaattggtcactgcgtgtcatctcgaggggtggtgattcagggagcagggctgggggtcagaaggcacgtggctgccatctcagaggttgctgctcacttctcagagggcaggctggcttctaaaaatcaacgctccctccacccccaaacagcgattcttctgcagtgaatcacttccagaaatgaatagccacagttttttggaatgaacgttgtgaaatccctcctttataatggcaggttttcagttggtggttttatcagaatttctcaagatcaaaacgaaaccttctctttaaaaaggaaagaaagtactatcgatacagaaagcaaaagtatttccagt

SEQ ID NO: 39288 - DNA, 2300 bp, Homo sapien
tgtgagtttccacacatccctggacttgagtgagtctttccaagtgtttgttaatggtacaaatgatgacaaaattagtggttcaaaaatattaaagtgcacatgctttttgctttctctatgtatacagagattacatatatgtatactttctagcgtctagcaagtatggtatggctagggataattatgtttttctgattattttgtttcccatcaaacaccccacgaattttacagcagaccgccttcttgtcaccatttgaaagaatgtggtcagaaaagtaatgcaaaaactgccactttggttttgtctgtaccttccaggtcatatctccgtacctcacttcctgacacaaacaagttttcactgttgtcagcaacaaagccctaatatagctgcggaagagaaaaactgcattgcattttgcctcctgcaagcatcatcaacagttactggaggaacgtaattccagaaagcttgaaagccgtggtgatggtaattatgtatcaaatgcctggttctatttctgttattattgttttgtcatttctgttttcccagcgatctgactgaactcgcagagggacaaatccagtttttctttttgacttttgtcaaactaaatcaggcctgatagaaaactcattgctctccggggaaacaaagtaggagccacgaaatgtcattttaacagagcgtgggtttggtgactgtaggaaaggatttgaggacgctccttctgttcggcttcctatgtcatgagcacaggctccacgcacgcacagacaccacggctcccggatgctgtggctccccgatcggggctcctgcagcgccagaagcccctccgggatgcttcgaggggctcccggtgggtggaggtacggacgccgctgcggccgccgccgccagtcctgctgctgttgttgctgctgcagtcacgtgggagcccctttaagtttccatagagaggcctctctggtgtcacatgatggacatgatataatgaaacaacattgtggagaggaaagcattaggggagcccacggctacaaaaacaagtgagtgagaagaggtgggaggaagagaaactacgccacctcccctgcagccgagtgcacgcagcagcctggcgtgacaagtgggcgacgccggggggcagggagccggggtccttggccctggccggggaccccaccgcccaccgcgcggaggacaacttttagccggcagcccagaccagcgcggcacctgtctccggagtctccaccgctcctcccgattcatcccagggaaattctcaagaatacgctctacaaatctacgtgcgcatcattttcacctcgcgtcgcgcccgggaggaaggaacgaggcaaggagctaaagcagcgtgcgttcagccctggggtaagttcgtcgggtggggaagccggtcccgcaggactttgggatgggaattttgctctcctttgcgatctcagggcgtgaagaaggcgtcccctccgctgccggcggagctgatcggctggctagtcaatttccccttagcacgccccgtgcgcccaccctcgctcagcccggggccccctcgccgtcccccggaaggggtctgcggttcctggccaggacgttcggaaggcgagcgggggaaggtagggctgtcgcgggaacccggcttgtgagagcgatttcgccatgtttgtgttgctaagagcactttttcccctttgctgtggcttgatgccacatggctcctccggagctgctgccgggctgagagagtgtttttttttttttttcaatgtccgcattccagctaatgttgcgcagataaaattcaaacttgaggtaaacagaagaagaggaggaggaggaggaggaggggaggggggaggaaggggggactgtttccatttcgagatcccacctcttccctccgcgcagcccaacatcccgaacctagagacaactcttgcctttctcccacgtcccccacctttgctgtcaacaagaaataaaggcggggcgggggggggggttggaggtagggggtggcgtgcttattaattagaaaggacgcggtgtctcggttctccactggaatcagcaactccctggaactcgggcctctggccccgtccctcttttctccggcagggacgcaggatgccttggtgcactctagagacggggaccggagggtgcagcgcgcctgggtggggcgaagggcgccggtctcctcacgccctctgactttaggataccagacagtgtctcttcaaccccaccccaggcg

SEQ ID NO: 39289 - DNA, 2300 bp, Homo sapien
accgccccacttaccatctgccccgcggggagggccccccgggctagcggagccctccctgctcccgggcggctctggaggagctcggtgtttgcctctagcccttcgctaccggaggatcaggttcctcccctcctccccctccagctccggccgccgccgccgccgccgccgcctccttcttgcatgacacagcagaaccgcagctgctgcagcaatttcaagccatccgcccaggaagcgccgcaaccgggactcgggaggggtggagggggcgaggcagaggccgcggccccaggggatccttggccccactgtgcaccacacactcctttcccagcccaggggcacgcgaacaaaatgaggctcaagctgaccaggccgagccggaggaacgctggggcttggcagcagaagggatgggaccagagagaagggtgtggaggagaccccagtgagggccaggacatttcaggtaaagagaggtaagaagaggcccagaagtcaagggccagactgtgaaggtgattagaggtcaaaagaggtaaggaggtagagttgcaaagaagagaggccgagctgggaagggcgtgggggtgggggtagctgcaggggagggtggggggtacagtctttggggaggcccgagctgagcccccaggcagaaaaggggctgagttgggaggcaagggaggtaggaggaaagggatgaaaagaattaggcatgagataggaaggtaaaacttgggagagatattatagaattagaagggttggaatggagctcattcatcatggctgatgaagtaaactgatgaggtggagagagacagagtcaaggcaaggccaaacgaaaagatcttccatcccactcttcagtttcttgcgaagtttttcttgattccgccaatccacacagtttcctttataaaatggaaaagcatgaactaaaaaacccagaaatagctatctggcttagatttacaggataaaatctccatgtctgtaaaaactttaaggcagaaatttgggatttatggtacaaaccctttaagggactgtgagtcagtaatacccacagcactcaacattgtgagtttccacacatccctggacttgagtgagtctttccaagtgtttgttaatggtacaaatgatgacaaaattagtggttcaaaaatattaaagtgcacatgctttttgctttctctatgtatacagagattacatatatgtatactttctagcgtctagcaagtatggtatggctagggataattatgtttttctgattattttgtttcccatcaaacaccccacgaattttacagcagaccgccttcttgtcaccatttgaaagaatgtggtcagaaaagtaatgcaaaaactgccactttggttttgtctgtaccttccaggtcatatctccgtacctcacttcctgacacaaacaagttttcactgttgtcagcaacaaagccctaatatagctgcggaagagaaaaactgcattgcattttgcctcctgcaagcatcatcaacagttactggaggaacgtaattccagaaagcttgaaagccgtggtgatggtaattatgtatcaaatgcctggttctatttctgttattattgttttgtcatttctgttttcccagcgatctgactgaactcgcagagggacaaatccagtttttctttttgacttttgtcaaactaaatcaggcctgatagaaaactcattgctctccggggaaacaaagtaggagccacgaaatgtcattttaacagagcgtgggtttggtgactgtaggaaaggatttgaggacgctccttctgttcggcttcctatgtcatgagcacaggctccacgcacgcacagacaccacggctcccggatgctgtggctccccgatcggggctcctgcagcgccagaagcccctccgggatgcttcgaggggctcccggtgggtggaggtacggacgccgctgcggccgccgccgccagtcctgctgctgttgttgctgctgcagtcacgtgggagcccctttaagtttccatagagaggcctctctggtgtcacatgatggacatgatataatgaaacaacattgtggagaggaaagcattaggggagcccacggctacaaaaacaagtgagtgagaagaggtgggaggaagagaaactacgccacctcccctgcagccgagtgcacgcagcagcctggcgtgacaagtgggcgacgccggggggcagggagccggggtccttggccctggccggggaccccaccgcccac

SEQ ID NO: 39290 - DNA, 2300 bp, Homo sapien
acatagaggaattggtaaaaaagacaattagtacacaaagtgatggggtttcctatttgtagtgtagccttgtagtcacactgtgttctccgaatgccacaatgctaacccaaaattacttgtccttcctgggcctggattccattcaattttatgccttgtttagtctaaatgatttccccagcttcgacatgtatttatttatttatttatttatttatttatgcgtttcattttagaagtatacttaaatctactctttactcgagtttgtcttagttctagtgctgaggaatgaagattctgggtaaaagaaatcaagatgatgttttttttttctaggctttacatttcaaggattgtttctcaaatggcaactggcagtctactcctcaaatgatgacgttttccacaggaattacaatttaattggaatattttgttttcaatgggaagcaaagatttctttccaagaggatcagtttgataatgttttaccagctagtgctacgagaccaaatataaaccagttctgagaaacaggaagtgaactgactggtctagtctgagtgtccctggcagtgacgcaaatacagaaatcaaattaggaaaacaagatatgtgggtgtgaggcaatcgataataatccaggatgctacaacataagcaagaatgcctttaacccgatgccattcattttaataacaccctgagcagtttgatttccacggaacacgctggtgattagagagcagcaggagcttgggttccctagcaacagcatgtgcttttgagacagtcattagcctttcagttaatcccatcaaccccttacctctaaatgtatgactgacataaaaaaaatgatgttttagaaagtgctttgaaatttccaggagtgcaatggaagggaataatcataattaaaaagttgtctggagaactacactccagtgaaggaagtaatgttcctacgtgccaagcctgtccgtatatttccctgctctcagttgtaggtttctgaatcccctgtggcaaagggcaagggaggtgaaattgttcagagtttcaggcagtcttctcacctaaagtgagtagtattgcaatgtctcttggaatcatggctctgaagatgaggagagaagcgggatgggcagtttgtgtggtgaggaggctggctgcaggtaggctgggagggaatgtcacacatagttttctttctcctttaagccgaatgaggtatgctggtcaaaggaacttggggaaggaggatggtgaggggaatgaagttcttcttcctattgattgttttgttgcaccagaggctgtttgtccaaggccactggccaagagcattattttcgtggctaaagtgaggttgggcaggtttcccatccctttcactagttttgaacaagacaacccagaaagcgcagcaaggctctgggaatatgatgtgggttggcttttcctactcagctgcaccttaaagcgccaggccgatgggctgatacttctcaaaccctgaatcattgcctccagctctgtcctgggttcaggatgcaccactccaccctctgtgtagcttggggtcaacttcggggcgtcactccaatagtaattattgctgcgtttggctggacatccttattacggcctgggtccctctcagctggaaactgggctccttcagtttggctggggtgacttctagcacttcccgccgccccaccttacccccctgcgcgctcccttcccaaggcgaccacctgcaccgccccacttaccatctgccccgcggggagggccccccgggctagcggagccctccctgctcccgggcggctctggaggagctcggtgtttgcctctagcccttcgctaccggaggatcaggttcctcccctcctccccctccagctccggccgccgccgccgccgccgccgcctccttcttgcatgacacagcagaaccgcagctgctgcagcaatttcaagccatccgcccaggaagcgccgcaaccgggactcgggaggggtggagggggcgaggcagaggccgcggccccaggggatccttggccccactgtgcaccacacactcctttcccagcccaggggcacgcgaacaaaatgaggctcaagctgaccaggccgagccggaggaacgctggggcttggcagcagaagggatgggaccagagagaagggtgtggaggagaccccagtgagggccaggacatttcaggtaaagagaggtaagaagaggcccagaagtcaagggccagactgtgaaggtg

SEQ ID NO: 39291 - DNA, 2300 bp, Homo sapien
ttagccaggtaaagaatgggaaagaatattccatgcctggcttagagcaagctccggaggctagagagaacaaggactctatgggaacaaattcagtgtgctagttagtgggcagatgtcaaaagcgcaaaggagaaaagtggggggggggtggtggtgaggaagctggagagaaaaatcaaggcaggttatgaagggcctctgttaaacagtttagaagggtattgaaagtcaccaaaaggatttaagcttaagaagaactaattaacatgtgtttttaaaaaagattgctcaggaactatgtctggaaaagaacaaggacttgacttacattaaggtaagaagtggaattataaaatctggggcccaaaggaattggagtgagttaattcctcccctttaaagtgtctattttcttcaaagataaccactatatcatctctggggctaacattctctggccctttcccactgtctctggcagctcccgacccaagtcactacagttacagcattcccttaaggaacacatgcttttccaacctgctgcaacacagaaagcacatgtaattttttattttattgtattttatttgtttttctgagacagaatttcactctgttgcccaggctggagtgcagtggtgtgatcttggctcactgcaacctctgcctcctgggttcaagtgattcttgtgcctcggcctcccaagtagctgagattataggtgtatgtcaccacacgcagctaacttttgtatttttagtagagacggggtttcaccatgttggccacgctggtttcgaactcctgacctcaggtgatccacccacctcagcctcccaacgtgctgggattacaggtgtgagccaccgtgccgggcctggcctttctatctggcttttttgatttgatatcctagtagagcccactattaaaatttccatctatagaaacaggaagtcaggaaaggactggagggaatttcggcaggttaatgattacaacgggaagagaatacaattattgaggtgttttgactcacttggtcatttcctgagaaactctttgcttgaatttttccactcttcaggtgaagatgatgacactgtccaggctttcaggagtccaacctcttagacaataagcgacatactctttggtaactgcagtggctaagccaaggaataaatatgcataactacaacaaacaggtacttgatgagaacgttatctagagctgccagataatttagaccaagtgcaccttttgttgtaagaagctggtatgatgtccacatagttttcagggctgctgttccctctaagaagaaggaatagtctttttcctgaactactctctctctgaacttttaggctacaattatgtcagttcaaagtgggcagatttgccaactgaaaaaatgatgacacgcagcttcccaactctgtaaggacttttcaggtctgtgggtgaacgtcattcccgagcaaaccaatgccacaagattagtaggatgcggctcacaagaaatgtttacaatgaagggcatcacagactgcaaaccaaacagggtaggaggacacgggaccatttccttttcctgtctccatctgactctggaaggcggggacaagacatttaaaaccaggaccactccaggaggacagcacattagctactgccctccagctcccttcagtgttgtttccgtaaaggacttataaactggcgagggcggtggcttccaaaagcgcacaggcgtcccttttccaacttggtcttcttattttcccttcctgctccataactacaacgtgtttctgttcgtaatcatctcggcttttccttacctctgcttgtaagaaaagtcctttgcgccattcccctccaagccccagggaagggcctggaaagcgcttacacctcagacccagtgtcggtcagccgtcaaggagcgagcgacgtgggaaaccctgagataggacattggcccggcgctgggctcgggtaacgatgcggggcggggagcgcgggcggccggggagggcggcggcccctttaagagcaggccacgccccctcccctcctcccgttcgctgccagcggtcggtggcggccgctacggtgctgacaagatggcggctggcggagctgtcgctgcggcgcccgagtgccggcttctcccctacgcgctacacaagtggagctccttttcctccacctaccttcccgagtaagtgccgggccttgagctcgtgctgccccacccttccgcgtcagcacggttgggccagg

SEQ ID NO: 39292 - DNA, 2300 bp, Homo sapien
ttatgtatgtacttgagaaaattgcagcaatgtatttctccaatctcaaattgttgctttctaactccaaaactagtgttctgcccactgcaaaccaggggccagagtaacaagacacaaaagattaaagttgccatcccactaaatcatttcctgcttgaaatgtactttcttaaaatgtctatacaacagataacgcggatggtacttgtgttatccaagcctcaggcctacatcaaaaatttaaggagtgacgtcctggaaatacgctaattcaagaccagaaaaatgtctctacagttagatcaaacaatgccacaccaattcccaactgtccataatcctagcctgggtatagaaaaaagctgaataacttcagatccaagaacaagatagcccagaatatcagaggtcaagtacatagggccacatttcaactccaactacatggctggactgtttatctggctcactctcaaattcaaagttgggtttcagcatcaatcagggatatggccatgaataggctacgcaggccagatcaaaccacaggtcacttggcacccttcattgggccagatcctactgaatgccaacccttgacctggtgaataaaatgggaggctggcagtcatgacagattcttccagttgcagctccattttgagattcttcattgatataaccagtgaaatcaaatttggataaatgtgaagaatttctcaaatacagatggaaaacttacttgagtatgcttcacagatctagtcacttttttgtttagtaaaatactcagtaaaatatattattcattaatttgtttcgttcataaaatcgtttcggtcctgtgagatggttagagggacaactagcacttttcttcaggatctgcacagatcttaaccctttactaagccagttcctccactagcatgtaaaattggagttagatctgctcctcctttcaaagataagccaaagataaataagatactatgtaagagtattttcagcatttcagaaggaatttgctagagaaaaaaacaccaccaacaaaaacctaacaatgcaactgaatttttttaacacctaaatcagggatcaagacaaagccggtgttgaaaatcaaattcattaaagccagatgtttctatgtttgagtttccggactgggaaacgtgtctgtgtccatacaaacccatcttctaatgagccgtaatactgaaattcttcggtaacgtccctccttcccactccctatctttttcagaacttccaggcattaaagacaacgtctgccaatcctacaagttctccccgcctgctaggattcagatggattccacaacttttcagccttccgtgacttttaacactactctagagctaatcacttttaatgaccccactctggaatagacactcctcggctttacactttgtcccggcagcaatcgactgaactgtcccccgacgccgaccacctcggacgacctcagacattcggggtagtttgcccgcgggcagggccccgccaactccgattcctgccccagagccgtccgccccccaagccctcctcaacctcaacccccaaatcccaagcgcagaaccgctgggcttccggttctcctgtgcgcgccccggatccgccacacacctcgccccttctccctgggctcgctctccggaccctaaccccttcccgagcgaggccgagcaacgctctcagcagctgaactaagactccggaggccgcacgtccccctcagcaggccccgcctgggcctctcggctcggctgccctccattgcacccctggcccaaccgtgctgacgcggaagggtggggcagcacgagctcaaggcccggcacttactcgggaaggtaggtggaggaaaaggagctccacttgtgtagcgcgtaggggagaagccggcactcgggcgccgcagcgacagctccgccagccgccatcttgtcagcaccgtagcggccgccaccgaccgctggcagcgaacgggaggaggggagggggcgtggcctgctcttaaaggggccgccgccctccccggccgcccgcgctccccgccccgcatcgttacccgagcccagcgccgggccaatgtcctatctcagggtttcccacgtcgctcgctccttgacggctgaccgacactgggtctgaggtgtaagcgctttccaggcccttccctggggcttggaggggaatggcgcaaaggacttttcttacaagcagaggtaaggaaaagccgagatgattacgaacagaaacacgt

SEQ ID NO: 39293 - DNA, 2300 bp, Homo sapien
tagtgcttttactttgctaaagttttatttgaactgtgttaatatttttcttcttctttttgttttttctccttaaagttccactcttgtcctggggacccagctttaactttagcatctggtatgttgaacttagtggcattgatgatcctgatatagtacaaccttgtctcaactggtatagcaaggtaggactgtgttttaaatcctgactttaatgcctataaaaggagaaatatgtcaatctcttatcttcattgagaataatttaaaatattcaaaataataataacaacagttagctaacattttattaagcacttccagtctgccagcttttaaggaatcctgataactcacttagtcattatcactctatgagacaggtgcacttattatccccattagtttatagatgaagaaatgaagaacagagagattaaatagtttgcctaggatcacacaattgtaaagtgtttgagccagtatatgaattcaggcagtttggctccacagtctgcttttatgttattatacccatttgactctgaattttgttttttcacttgtattcatataaatacttaaaacatagtttttagtgggatagttttgcagcctaatggaaaatttaagatgtggatgtgatttagactcctaaagtagtcaacagggttaaaaaatactgctgtttaatataactgtaatatatattgttacatggtagttatgataagtcttttttagaggccaagagtaagttaattatagttaactaattataattaagttgttaattaattatagttaattataacgtgtaaggattaggtgtttaatgaccttttattagttaagtcagctatcaactgatttgtttcaaatcttatacatcttcctaaacacattattttcttgccttattaaagggtcatgcctataagtaaatcattgttgtttgattatcatgcaggcttccatgtcatctgtttgtttgaatagtggtatacttaggaagtttgaggtagtcccagaacatattcctgaagttgagatttttttaaaaaaatcctttttataagattgtatttttggcatctatcctattaggggaaaattttaataaattaagtgcctgctttttggattccagttaattgagatgtctactttatagctgcttaatagatgaggtagttcaggcttagaaaacaattaaattgggccgggcgcagtggctcacacctgtaatcccagcactttgggagaccaaagtgggcagattgcctgaggtcaggagttcaagaccatcctgaccaacatggtgaaaccccgactctactaaaaatacaaaaattagctgggcgtggtagcgcgtgcctgtaagctcagctacttaggaggctgaggcagaattgcttgaacctgggaggcggaggttgcagtgagctgagattatgccgctacagtccagcctgggagacagagcaagaccctgtctcaaaaaaagaaagaaaaaaaaaaagattaaatgtctctttttgatgatttttgagtcataaaatgtgtttgtaaatttgaaatatctgtatacttgatacttgtcattcaagtaatagtttatttttaaaaaccaaaaatagcataatataatttatgtggattatttaatgttcttttgtgctctcagtacctgcattgtaatgggattaatagatgctatggagttataatttttacagtattaagtggagtttaagaaatagatgttctccctttcttcaaagttgaggctctggaattaggtttggtttaataacttttggctacatattttgtgaccttgagcaagttattggaacaggccaagctttagttttgctagttaaaagagccaaataatgatacctaatgaatcaggttagtaaactgcttggcacatagtgttaataaatgctcagtgtagattagttatttttactgttgttattgtttcctacagtatcatctaaccaaatctcttctttccatacttactctgtgttctagtagtaccgtgaacaggaagctattcgcctttgcctaaaacacttcagacaacacaactatacagaagcttttgagtcactgcaaaagaaaaccaagattgcactggaacatcccatgttaacagatattcatgacaagctggtgttgaagggtgattttgatgcttgcgaagagttgattgaaaaggctgtaaatggtatgaaacttagattggttattagggtaaattcaagtacatacgggaaactttt

SEQ ID NO: 39294 - DNA, 2300 bp, Homo sapien
gttttttagattttttttttcacagttgttatgatcatcatcattgtgcctgttgtcaggacattgacagctgactatcaactatataacaaaaaaatgttattggcttcctccagtcttcagaacatgggttctgaattggtgatgaacttacaataaatcttataaaaaatgatatttttttctagaaaagccatgagaaaaggatgcctaatcaattataccactttcagagaagacttctataatagagaaggaatgagaataagttttcagctacaataacacattttatattcattacacttctgcggagtttccagagtgctggtgtcattcatttaacagttgtgtatcgattccccataataggtcaggcattctaggcagaggagctgtatcagcaaacccaacaagatccctgcccaggaggtacttacattttagtggagaaagacaataaacattaaagaagcaaattatatagtacattagaattgaataagtactgggccgggcacagtggttcacgcctgtaatccccgcacttcaggaggctgaggtgggtggatcacctgaggtcaggagttcaagaccagcctggccaacatggtaaaactccgtctctactaaaaatacaaaaaattggccgggcatggtgggaggcgcctgtaatcccagctgatcgggaggttgaggcaggagaatctcttgaacccgggaggtggaggttgcagtgagctgagattgtgccacagcactccagcctgggcaacaaggagttactgtagctcagcccaaagtaatagtagagcagtgagaagtaaaatagagcagattcttaatatattttaaagatagaaccaacagaattttatgatagattagatctagtgtttgaaagaaacgactcaaaggttttggcctgaaaaactggaaggatggagttactatcaactgaagtgagaaagttctgtggggaactggtttgtggggactcctgactggcattcaggagtttaaatttggaaatgttcagtttgagatatctatgagacagccaacttaagatgttgaggtgactgttggatatttgaatccagagtttgggaaagaggtctgtaatatcccttggtatgtgttaaaatccttaggccagtacatacagttcacttatttaatcagattgttaagataatagttttctccttatcctatatgtagagccaatacaatttatttttcaccttaggagttagaaaagaggaacaaattcaaccccaaataagtaggaaataagaaattcatgaaataggaaacaaacaatggagaaattttaaaagtgaaaagttggccttttgaaaaggtaaataaattgataaaccccaagcaagacttaccaagtgtattagcctgttctcacactgttgtaaagaactacctgagactgggtaatttatgaagaaaagagatttaattgactcacaggcccacaggcttaacaggaagcatgactgggagtcctcagtaaacttacagtcatggcagaaggtgaagggcaagcaagcacctttttcacatgatggcaggagagagagtgacaatgaggggggaaatgccacacatgtttaaaccatcagatctcatgagaactcactatcacaagaacagcaagggggaaattggcccctgtgatccaatggtcccccaccaaacccctcccccaattcaacatgagatttgggcaaggatgcaaatccaaactatatcaccaagaaaaaaagtgaaaacataaattatccacatcacaaatgaaaagagggcatcagtttagaccctacatatattaaaagtaaagtgggtatggaaaacttcattgacaagccgcaacttgatgaaattgacaaatactttaaaagacacagtttaccaaaactgacacaagaagaaatagaaaatcttaaggaactccatatctactacagagattgaatttgtaataaaaaattttctaacaaaaaaaactctaggcccataatagcagtaaattttatcaaccattcaaagaaggaagaaaaaaatacaattttacatagactctcagaaattagaggaaggcaatacttcttaaatccttttataagccaggttaactttgatataaaatcccaacagaagctgggcgtggtggctcacgcttgtaatcacagcattttgggaggctgaggggtggatcgcctgagcccatgagtttgagaccagcttgggcaacatagcaaaaacctgtctctacaaaaaca

SEQ ID NO: 39295 - DNA, 2300 bp, Homo sapien
ctcagaaggaataatcggtaaattaagaattgctactcgaaggtgccagaatgacacaaaggacagaattcctttcccagttgttaccctagcaaggctagggagggcatgaacacaaacataagaactggtcttctacactttctctgaatcatttaggtttaagatgtaagtgaacaattctttctttctgccaagaaacaaagttttggatgagcttttatatatggaacttactccaacaggactgagggaccaaggaaacatgatgggggaggcagagagggcaagagtaaaactgtagcatagcttttgtcacggtcactagctgatccctcaggtctgctgcaaacacagcatggaggacacagatgactctttggtgttggtctttttgtctgcagtgaatgttcaacagtttgcccaggaactgggggatcatatatgtcttagtggacaggggtctgaagtacactggaatttactgagaaacttgtttgtaaaaactatagttaataattattgcattttcttacaaaaatatattttggaaaattgtatactgtcaattaaagtgtttttgtgtaaactggttcaagctctagtagtttcctcggacttcttaaagccttcacttgtgtatgaggctcatcgccaaagtgcctgagaatgtcggctcacacccgtagcacaggagcctccgtgctgagttacacttgtccaactctgcaggcaaagaaattaggcaagagaaggagagaaaccggaagaaaaaaaaagggggatcctaaaggtggttatgagtctttatgttactcaagctatcctagtgactctaaagaacctcactttcccctaagatgacgttgtatgtttcgctgtcttccttccctctacttctgcctcagatacattgtgaatcaccactatcagaaatccccaagagggctgctgaacattgatcaggtatgaaaacactggcaaagagactatatatatacatatatatgtgtgtgtgtgtgtgtgtgtgtgtgtgtgtatgtatatatatatatatatatatatatatatatatatatgtaaaaacaaagctctgttctggccctgtttctgccataaaaggatctgtttactgccacaagaggcttctgcctatccctcctccaggtctgcagtgaagatagatagcggtttaaggaaggaatcactggagatgattctttcttcatctcctagtgtggtattatccacagctgcatgcttcttcatcggaaggggtaaacttcatcattccaaacttgcagaagggaaactgtcaggtagaactggtccataatcttagttgctagacaacaatcttgtctacttgcctagcatcttaccatttacaaaccattttataggaaacctataggtttacaaacctatcttataggaattgtccccactagggaaattagatgcaggagttaagtattctctttgagattgatcacacaaccatttaaatggcagcatgggccttgattctctttttgctctttagtcctacactcttttctcagtatcacgttaatgccagagttccaacaacagcaaaatacatttctagaatgcaactactgttacaacatgattttccttccatgaaagttgttgtgaaaagcagttaaaccctgaagagaggtctagagttgggcccgggtaattttgaggttagcttcgagagggtgccaaggatacagaaaggagtccaagtacaaggaactcacacaggaccctggccatggtcgaggtgcactgttctaagagtgacccacagcttattgtgggccacaagttagacctaagatcccattctctttctgagtaggtcattcaccctgatccctgcctgccaaccaagacacacgctcagttgtcaatttaaatgtgttatgctcatttgtcactcagaaccttccctataagctccctcccaaatcacagatttcttctgtaccacaagggaaaaaagtaaataaagaatagaactggctacataattaacactagtgataaacactgagatatctattgctttcaaagaccttggtggggaatggtggcttatgcctttaatcccagcactttaggaggtcaaagtgggaggatagcttgagctcaggaattcgaggccagcctgggcaacacagccagatcccatctttacattttttttttttaaattagccagttttgctggcacatgcctgtagtcctagctactcaggatgctaaggcaggatcacttgagccca

SEQ ID NO: 39296 - DNA, 2300 bp, Homo sapien
tctatgtcttctctaagcccagatgtctgctctcattttaattttgcatgatcttgtaatggcaccaatcccaaatcatgtgaatttaaaatgccctaagcttcaaaatatacgctctctctttataaagttaacatgattgcttctgagtttttagataaattgaatgattgagtgcaaaaacactgtttaaatcagagtgcgatacacattttttaaaatcccagtgtaaaaaaaaatatatatatatattgcttggtttcagaagagaaacaagccttttgttgacatgatatcaggggaacagtactaaaaaaacatcaaagatagtcacacacacaaatatcccagagtattcatagggaacaccctctgtctttcccatatgcggtgtggaaaacggggccagaacgatcctgcagaaacttcctgatgaaaacaaccccgtcagcccttcccaagcttgaggccggctgccacggaaccccagccagggctccagcgcttccttcgcggctccagggacgcagtgccctgcaggcatcgcctgcttgcagccgacttgaggggctcacggagtcccctgtgcccgggacgcggctagatcctggagaaaacccctccacccagccccatctggcagatagactccagattagcaaccccggagtcacgtgagccaaatttacgccgtacccgggttccaaggttaatcacccctcgccccctccgcttcccggctccgccgatgtgcctcctcttcaggcgggcctggggtctgcgtctcccaggcagctttgggggtggaaaaaaggaggggagcgggggaggggaaaggaacttctttgttctttcaccggataaactcagtttacggaattctccaacacccactcccacccccagtgtgcaaatatctctgatcctcacttggagggcgaactacttcattcattgagacttttgtgttcctggccctaggctaagtattatcttgtaagatcacatttaagtttcccaacaaccccctgaggtaggtgttattatccctattttacagataaaaagaaatgaggtactgagaatagcttgcctagggttttacaattaatagattggcacagttaggttttgagccccagcctgttttgacccaaaagccctaatctttatagctgttctttatatagcaggaataagagtaataaccactccttgcagagcaattactatattccaggcacggtgcacggtatttctccaaacttctctcagaggcaggtttgccacttacccgttatgtggcctcaggaagtttcttaacctctttttgactcaattgccctgtctgcaaaatgaggctaaaaatatggttgtcatgaagagtaaaagaattaatatatgtaaagcctggcacacattcatccctgaaattgttgttgctgttgttttttaaccatcatctccatttcacaggtaaggaacctacccttggagaggtgaaggagtgaattagtccagcttgcccgctgcacacctagctgcagagagaccccgctcagaagccgtgcgggatgggggccccacaggcaggtgaattgcacttggcaggtgggagatgagcttctccggggtcgctgcagaacgcgcagcagcccgggaggccgtgaatggttatcagttaccacgcaaggctgggggtccgcccgctccggatttgctcgtagtgcgagggccccggcggtgtgctgggggatcccgccgggcccacttagaagcactcggggggacacacctgttcgggacacctgtggacggggcccggctgcaccgcaggagccccccgccctggcccccgcgcacacacagccccccaaggcgcggaggccgccggccctcccgcccgtcgcgctccagggcggagtttcctcctctgctcattgttcacggcccagcgcccgcccagccccggccccggccccgcccggcccggccgccgccgctggcgggctcctgggggagggggaggggcgggggcgggggcgggggccggcgctgacgggacgggccaggagtagccgcagccgccagtggggccgcagccgcgcagacgccgcccaggacgcagccgccgccgccgccgctcctctgccactggctctgcgccccagcccggctctgctgcagcggcagggaggaagagccgccgcagcgcgactcgggagccccgggccacagcctggcctccggagccacccacaggcctccccgggcggcgcccacgctcctaccgcccggac

SEQ ID NO: 39297 - DNA, 2300 bp, Homo sapien
gataggaatagccttggaatgagtcagcccagaacttcatctttgctttgtgacttagtagccatgtgattttgagcttttacttaacttctgtgagcccgagtcttcccctctatgaaataagtaacatcaattttgcagaatctctgtgagaatttgtgtgtgggggggatgcacaatgcctagctggtgcacaataaatacatttaaaaagtaaaactttgtgtccacagcagagctccaaggcccatgtgattcctgctgcattcactccggtgaggagcctgctcttcagcaggcgtttttcttttggacgctcttcgccgtgggttggaagagcaggtcatgccctggcgcagcaggaagagagggttttccacaatggctgcatccattgcaggccagagctgtgggttgcaaaattggggttgtccctcctgctcggatgtaatggagttacctgaacgtgggcccttgggaccaggcctagcacctaagagagagctgaaggctcagcagatgttagagagcacttgacccaatgtgggaagaaagcagagtcctagagagtggaggtgaagtcctcattcactcaactcgtcaacagcgcaggttccagaaccagcttagaactctagctcctgttctaacagcccattgcatgcatctgtgtcccacagctgttggtcttacaactcaaaaaagcacaggtcccctggcaggtgcaaaagaaaatgtgccatggagatgaaactgggggagggagttacgagtcaattactacttatgttgaactaaaagaagcccaaggcatcagcttcggctcagtcttctccatacaccccaagctgctttccattctcactcagcccctgactattcctcccattcccctgcccagtacaataaaaacagcatgcagttagcttcctccaccccggaggctgaccaggaccagaatcagcacttggatagtactgcatggaattttgcctgtattctgggcatggtgctgaacgctttacattcctaacataatttaatcttcatacatctggaaaggtaaatatattaccatgatcccattttacagatgagcagatgaaaaccttatttccctaggataacccgaagatagaaatgtgtattactctgttttcacatttgctagaagaaaaacttcaggctgggcgtggtggctcacgcctgtaatcccagcactctgggagaccgagatgggcagatcacttgaggtcaggagttcaagaccagcctggccaatatggtgaaacaccatctctactaaaaaatacaaaaattagctgggcgtggtggcaggtgcctgtagtcccagctactgaggaggctgaggcaggagaatcgcttgaacccaggaggcagaggttgcagtgagccgagatcacaccactgcactccagcctgggtgacagggtgagactccatctcaaaaaaaaaaaatatatatatatatatatgtatatagatagatagatagatagatagatagatagatagatagataaagaaaaacttcagctgaattaaatttaaaggagtttgattgagcaatgaccgatttgcaaattgggcagcccccagaatcacagcagattcacagagactctagtgcagtcacgtggtggaagaggatttatagacaaaaaaagggaaatgacgtatagaaattggaggcgaggtacagaacagctggattggttacagcttggtgtgtttgccttatttgaacacagtttgtacactcaacattagatgaatggttgaagtatggccgctgggattggccaagacttggctactgttacaggcacatactcctaagttaggttttcaattttgtctgcctgttaagctaggttacagtttatccacaaggactcaaatatagtccttctcaggccatgtttagtttgctttaacacattgctataaagaagtacctgaggctggataatttataaagaaagagatttagcctggtgcagtggctcacgcctgtaatcccagcactttgggaggctgaggcgggtggatcactgagttcaggagtttgagaccagcctggccagcctggcaaacatggtgaaacccatctctactaaaaatacaaaaacttagctgggcgtggtggtgtgcgcctgtaatcccagctacttgagaggctgaggcaggagaatctcttgaacccgggaggcagaggttgcagtgagctgagatcgcaccactgcactccagcctgggtgacaagagctagactccat

SEQ ID NO: 39298 - DNA, 2300 bp, Homo sapien
ctaaagaaggctagtttgctcagggtttccgataatagaagaaaactagagaaagctggtggttccatttttcaggtctccctatctccaaggcccctctactgactcccatctgagtgaggatgtctgcgcctgtgctcaagggcaggtgcccctgctgaggaggctgggagatgctgggggaggtcaacatgagctgcacttaacaagcaaaggaaaggagaggcgttacacagatttaagatttaacaaaaggagaattaaattgacattttattgacttgcagtgggagttgttaaagacagattactgcagcaagggttgagtttgattgaaaggacgggagagaactcagcttccaaaagcatcaaacttgaaggccagtaataccccaaggggcaaggtgagcacataaatttgaactcatacaagaatactttccagcacatgcactcataccacacatcacaaatagctcccagaagccaggcccagagacaccaggtgaaatgagggggtaagagcacagtgttctagatttgactcttatcaacgtcccgtccccaccccaacccgatgtctggccccactgggagcttcagagatggaatttctcatactttaatggagaaatagtgtcttgaggaaacacccttttgcttccaggaagaaaatgatcccatttcaaagctgtctcttcagggactccctgcatgcttagtggctcgcagagatgcagcacttgctgggaggccagcagcggtctgcaaaggccttctcgggagagcctagccccgtgcgatttgtcttggtgcaggcgtgggtgtgggcgacacccagggaacctgggaaaggaagaacagagatatgtggagagggggcaaagggcagggatgagaccagattacaaggagcaggctggcttagattgtccttggagatagcaccactctggtctcttgtttcacacaggtgttcaaatgagggtctggattctagggtggctgatgatgattcttgtctcaggaagcttttcctctgtgggggtgagaggtgacaagcgtgctagcagccctcgctctcggcgcctcctcggcctcggcgtccactctggcggcgcttgaggagcccttcagctcaccactgcaccgtggaagcctctcgctgggccggagccggctccctctgcttgcggggaggtgtggagggagaggcgcgggcggcaaccggggctgcgcgcggcgctcgcgggccagcttgagttccgggtaggtgcgggctcggcgggccccgcactcggaggggccggccggcgctgccggccccgggcagtgagggacttagcacccaggccagcagctgcggagggtgcgccgggtcccccagcagtgccggccggccggcgcctcgctcgaattctcgccgggcctcagctgcctcccgcggggcagggctcgggatctgcagcccgccatgtccgagtctccccccgcgccttgggctcctgcgcggccagagccttcccgacgagcgctgccccgtgctccgcggcgcccggtcccatcgaccgcccaagggctgaggagtgcaggtgcacagctcgggactggcaggcagctccgccctggccctggtgcgggatccaccaggcgaagccagctgggctcctgagttgggtggggacttggagaacttttatgtctagctggaggattgtatatgcactaatcagcactgtgtatctagctaatctggtggggacttggagaacctttatgtctagctaaaggattgtaaatacaccaatcagcactctgtgtctagctcaaggtttgtaaacacaccaatcagtgctgtgtctagttaatctagtggggacttggagaacttttacttctagctagagggttgtaaatgcaccaatcagcactctgtgtcgagctcagggattgtaaatgcaccaatcagcatcctgtcaaaacagaccaatcagctctctgtaaaacggaccaatcagctctctgtaaaatggaccaatcagcaggatgtgggtggggccagataagggaataaacgcacaatggcaacctgcttggggcctcttgcacacggtggaagctttgttttttagctctttgtagtaaatcttgctgctgctcgttgtttgggtccacagtgtctttatgagctgtaacactcactgcgaaggtctgcagcttcactcctgaggccagcaagaccacgaacccacggggaggaatgaacaactccccacgggaggaacgaacaactccccaca

SEQ ID NO: 39299 - DNA, 2300 bp, Homo sapien
aagccagaagaagccctgttctgccctatctgtgtgctttggggctagtcatctgaccactatgagccttggttatttatttatttaccagaagaagagactgaaaaatctaccgactgaacaggatcattctagataatcaatagatgaatacagagaatagtgcctgcacacagtaggaccgccatttctttttcctgctcagtactcatttcacaacacttcacaaacactggcaggaatttcagcaaataaacaggaataattggcgcaggccagaggggaggacagacgaaggtgagcaggttacccagtgattactcatccgatcagcggttattgagggagacaggctacctgctcttaagtatgtacttaattggctgcacagaacacatcctgagacgtgacttgagaactcttacaaggaaaagcattaaaaaagtacaggcttatatttttacaaattgaataattaagggttgacacgatgcagagtacaggaagaagggggagatctgagtgggtagaattagccacagatagtttcctggaggtggtgagaaaggcatcccagtttcagggaatgcaccaaaccaaggcaaggtgacagcaccgaccaatggcaggaatgatcagacagtcgttggcttctgccggagcaagggatgcatggtaagtgatgggctaaggctgtgtggcctcacatatgtcggggggtgatccttgccttggcagaaaacatgatccggtacacgggcagccccgacagcctccgctcacggacacctatgatcactcctgacctggagagtggagtcaagatgtggcacctagtgaagaaccacgagcacggagaccagaaggagggggaccgggggagcaagatggtgtctgaaatctacctgacccgactcctggccactaaggtatcagacttgagaactgggtgcagggagcccagaggctatggagagggacttcatcagcccacagaaatgccagagtagccagtacccagcattcatgctggtgcccactctattacccaccccaggaggcactgctgaccattccccgtaccgaacctcagaatccttctcaatccagaactccaggcaaaccctgccaatacatcagtgttggcatgcaatctgaagatttgtttctaccccttctccatgcccttctgaaatactgagactctaactgcctcttttcacattcttctgccatgccttataaaagaatgatttcttctctgtggtatcatctacaatctcaagttggggaagtcggggctccatcacgacttcccaggcaccatatcttttcttttttttttttttttttttttttgagacagagtcttgttctgtcacccaggctgaagtgcagtggtgcaatctctgctcactgcaacctcctcctcccaggttcaaacaatcctcctgcctcccaagtagctgaaactacaagcatgcaccaccacgcctggctaatttttttttttttttttttttgtatttttagtagaggtggggtttcaccatgttggccaggctggtcttaaactcctggcctcaaatgatccgtccgcctcagcctcccagaagttgggattacaggcatgagccaccgtgtctggcctccggcaccatttctaatcctggttctggggacgttgcttgcctgcagtgctagtctttcactcctgagactgggctcagctctgctctctgcagagccaagtgagtcactgttcattagccagtgtgagtaatgcccaaacaaagccagcagattgtgtttgtctgctctgaccaagtgagtgttcattagcatttgtgaaaagtgctaaaataacaccgccagagggtgttcaaccaaaccgtgttgttggcagaggaagccttacgtaggtccagtcatcagtgttatatctcttttccatgtgcaggggaaatttaaagctgttagagacagatgaaatgggaaaaaatgatttaatgcatggacttacccaattttacccaagtagggtgggctgtataccatcctcccctgcctaggtctgtgaggcaggttttaaaagccatcctcagaactacgtgagtcgagctgtgtctggacgtatcctgcctctccagggcacactgcagaagtttgtggatgacctctttgagaccatcttcagcacggcacaccgtggctctgccctgcccctggccatcaagtacatgtttgacttcctggatgagcaggctgataaacatggcattcatgacccgcacgtccgc

SEQ ID NO: 39300 - DNA, 2300 bp, Homo sapien
gcctgccagggtgctaggtgcccgcccgggagcctgctagagttctagatgcgcacctggaagcctgctagagcgctagatgcccaccggggaacctgggagcactagctagttgcctgggaacctggaaaaatgcagaatctcaggccccatcccagacctcctagatcagattttgtatctcaacaaagcccccaagtgcttctattcacattagcgtttgagaggcacttccctggcagagaaatcatgaggcagcttgtccacaaactagccaaggagcatggaggaagggaacctgtgggtggagctctagcttggccagtggccaggggctctgtccttctgtggggccactgcttccactttagaacgccaactcctgccctgaagtgcaccatggagttgttctcatgaggccacgctgaattcctgcggcaattagaaatgccaggggattacgtttaggtggcagcctctgccccatgggtccctcagaggaggaagcccagggcaagctgtgttgctgtcttgggaaggctgagctgccccaccagggcccagaggacaggacagcaggggctgccagaacagcccaagggtcaggctttgcctggctgctgagcagagggaaggggccagaagactcttagaaggaggggagagctgggaggaggcacacatggagcgcttgaggcagcagtctctccaccattgttttcaggttagggcattttgagtgtgaaagtttggttttatagatttcaggggtttttttttcttccccttcttaatggaataagcatgttcgcatttgagctcatagcagtctagttgctaatgaaaggcaggtgcccagagcccagggttctgattgccaccacatgcagcaagaagggggtggagtgggagagagactgctgtctggctctgcaaaccagatgggacaattgggaaatgcttatgggggcacagagggagtgaaagttccgagaaggagagagacacacagagggctctctggcagcagggcccgagggagagttcgggagcccagaaggggagggccacttggcatcagtacccctaggatgcccagcctctctgccttggatcttgtgccctcacttactccagtacgcacagcacccaccccgttcccctccagtccacccaggagcccacacggtgccgtcgatgtagaaagatcccactgtgagaacagcaagagaagaaaagccttgttctttttaaaggaaaagcccagaactttttaaaggaaaaaaaataaaaagataatttggtgaagcagtttcaacttttcctactagttccaaaaggagaaatggaggccctgaactatgcagtcgcctcttcccccaacacaggggccctattcagggccacgaaagaatctcaggtgtcctgaacctgcaatctttaaagggcatctttttatttttaaagaatacattaagtgtcttatagatttgccaacctctaatcaggtgaatgaaaccttcataaaaattgaagcttgtgaaatatttggagaaagaagccagattcctattagttctgtgtgtgtgtgtccaagaaggagtgacaagaaggagacagacaaacatggatgggcagggggtttcagaagtgggcgagggtctgggtgtgccgctgagacactgcctcctgtatgcatgtgagagagatagcacgtgtgcatgcatgcactggtgtctgttctgttgcaaatttcccctcactgcttccacatgcttgggcattgtccctttgaaaaatcaggattttaatgaagtttgttctgacagggagtgaagtgtgcagctcgcactccctcaaggacattgaagccaaggcattgtcctgcttgcctggacaggaaagggcagtgggcttggtgggagcacagatggcctggagccaccctactcctccctagcccatcctggagaggatgagccattcaggacggaatcccagggtgctgctggggatctaggagcttttcctgctaccccatttcatatgcttcctctccccacctttccttcaggtcctgagctgtgtcagcccagacaatgccaacagccccgaggtcccagtaaagatcctcaactgtgacaccatcactcaggtcaaggagaagattctggatgccatcttcaagaatgtgccttgctcccaccggcccaaagctgcagatatggatctgggtgagtaggctgtccacccaggggctgtccttgtggctgctcctgaacacacctcaccttctcctg

SEQ ID NO: 39301 - DNA, 2300 bp, Homo sapien
ggggtgaccacactcatgcctgatccttcactcctgggagggggttttctagaagcaccctggagaatttatcttcgtccaacaagttgcaataacactcaaagtgcttcccagtgccaggcaaaaatagcgattagcctagacagaaagattgaggggaaaatgtttgaattgccctaaggatatgaagggggcatcaggatggcgagaagaaccagcttagtctgcagcaaggggtctgccccttactcctcagtctggaagcttcaggaggtagagctccgtaggctctacaggccgcagggtgcgtctttgtcccaacacatcctgacaaggtggggtttgttgcagcattgttatgagacttaaacgctagacaatgtaaactccatatcatgtgcctattaataagcacttgtacctcgcagccatgaatgtactgttcaggggtgttttttactttcgcattgcacatccaatctactctgaagtcctttgttctgtccctgtgttcctccatttatcccatccttagagggacagcttcagtccatggccttcaatgatttctccttcatttgctagattctcctctcaggctctccacccaggctgcccctcttgctgtggccaaaggttaggaggagaaacccccatagctttccctaagcctgagttaccccaatagcagctcagggtgtccaggtacccccttccctcatctccttgccccacaccacacctgtctgcttcctgagacagtcgttccctctccaaggctccctccccaaggctccctccccatgtagattccctatccctggctgttctgtgtcctaataaactccttgcctggggctctctcctgccctgcaacagctcctgacatcttccttcctctgcaaaatcttttctctttaatcaaaagagatcagcaactctggagtgatttccctgctgtctcatctcctcttgtcttgtccctcctgaggaccctgcttgcccccaccccacaacagaatctgtagtccagagtttccaaatcatgaccacttggtgaagccccatgtccacaaagttcacctgacttggattaaatactgctccctgaaattcagatgcctccatgcagtgacctcaagtgatgcctgcatttcaggagagttccatgttttttacatgcatctttcacaaaccttcatcagctaggactgcaagatcccaggtcacactggacatggtccacttgtgacaccatacactttacacagcacagagcactgaagagtaacagcaaaccttagagccaggattctgatccagagcaagcttttaactacagttcttagctcctttgatccttccttccctctctcccacctgcctacatgaggggattctaaaataaatggaacatagctgctttttttgaaaagctcctacttggcaggagaggactgcacttagcccaataattgtcatacaatctaagaaattccagacttattaaagtaggagactccgaggtgctatgagatcataggaggaagctcttcactttgcctagggtgggcaggagagattgcaggtgcatcttgagccatggctggaagaaaaagtaggaactggacaggtggagaagtgaggaaaaggaagtccagcagaagaactggcatgttcaaagccaaggaggtatattttctatatgaagaaaacaaatctctggttgcctaaggaggagaagagaatggcaagggctaaggatgtgcagagagggtgaatagacagaactgtgcaacaccttatgtgagtttggagaggatgaggggagttaggatgactctcaagtttctgcctttggcaagaggtgattgaaattgccatcttttctaaatttgggaatgatggaggaggaccaggcttgaggaaggacacaaaaaggttagctctgggcgcattgagtttggacacatcctgggagctgctggaaacacctgacctcagcatccgcccctccctggaccaagcggccatctcctgagtaactcgagggtatgtccttcccagttgcacccggaaggagcggtgtgagcggtccaaggagccccgcaggtttgcctcggagatgaagcagtgtgtccggctgacggtccatcccaacaatatctccgtctctcagtacaacgtgctggtaagggtcgtgggggttggggtggggtccagggatgcaaggaaaactctcccctcactaaaaagtgccttagcccaaggcccctctggaggactgggccaagcccggc

SEQ ID NO: 39302 - DNA, 2300 bp, Homo sapien
tcaaaggctccccaattcacacaacttcgatttctgtgagaatataacccctatagggaggtataggcatttaagccattatcagtcatgtccacctaataaggaggctctgagatgtttcgatgggagggacagtaatgggcgggagtttctgggtgtgaggacagtgaaaactaaagaagggacaggagagaggaggccaagagccatgggctcctttagagggtcgtccttgctggttgcctatcccagggaatgcttactggactctgctgaaggtgccacttccctcagactatggtgggagcgggtatgaggatgagggtggcatgcacagagttgagttaacaggtgtgggaatcccttcggtttctcttggtgggtgggcccattcctagggggatctaggcagaggtttgggaggtagtgccacccactccccatcttcactgcctaaaccagagctacatggtgatttctttctttgggcttcagaaaccaccctgatgttggcatggtctgttctggatgtagtctaggatctagggtttcagagaagagaggagccaggagagccgctcagtataaacatgaatggaaaagtcaggttaccaagccagctctggggcactggccactcatgttctctcgtgcgggccttgtgccctcagtgtcctcggcctccttgggtgccatgtgggggtgacttggtggggtgttgggaggggttctgactagcaatgggtgtatgcctcagagtcagtgtgcgcttgtgtcagctctgagcacctgagggtccctccgacggccagcgcccagagctgcaaattccgaggcggctgagcgcctccctctgagcgcgcgccgtgcgctccggtcacccatgtatgcccctctctccgccccacatcgccaccgccagggtagctccgtgcgggccgaggggacccaggggggtgtcggcaaacgttggtgcggaggagagccggcaagccgggcggcggcgggtgggagcatgtagggaggcgccccctgccccctctgccggccgctctccctcgctctagatgtcagccgcgagctccgagccagcgagagcgagccagagagggagcggcggcgggcggcgggcggcagggaggagaggaggcgaggcgagggagggaggaagggaagcagggagggcgggagggaggagaggaggacccagagagcgccaggcagctggagtttttgcagcgcttggccgggcttcaatgcacagcagcagcgagccgcggcggcagcaggcagcccgggagctccggcggcggccgagccagcggcggccccgctccctgccccctgcaaactttgcgagcagcccgcccggggggccgggggcgcgcccgggaggcccggctcggcccgcggccgagctctccgccgccgcagcgccagccgccgcagccaccaccgccgcagccccgcgcctccccggggagcagccggcggctcccgcggccccccagccccggccccagggcactgcccggcgagtgtctcggcaagggtgggggctgccgcggcgcggccggccgcgggctgccggggggcggccgccgctacccagagaggcgcgcagaggcgccgagagcgctccccggcgggtcccccgcgcactcgccgcgcccgggcagcggcccgaccgggcgagcatgggcggcgcggagtgacgccgctgtgcccgcttggcatcaaggacattcagcccgcgggggtggggacgaaggggggcagcccggcgtcgccaccgcagcccccgagagccgccgccgctgctcgggctccggggctgggtggaggaaaggggtgttcggaatcgatccccattttccgacctttttgttggacattacgcccaccttggacgccgcaagagaagctgtcaagccccgcaggctctgattcggcgccctccgcgttcctcggctgctcccggcttccctgtgcctcggtggagtatttgcgttcggggctggggctggaggaggcagccacacgcgcgcacacgcacacgttcagaggagggcgagaggcagcggcataggctccatctgcagtgtcaatgcggcgctcccgctgaaggagggaaacgcggcgcgtccaggtaaggagccggcccgccggggagtggggccgggcgggcggcgagggcagcaaggtcggacagacctgggccgacccgggagtcctcagtgtcccggagccagcccgcggcacacgcacacgcacacacgcaggcacacacacagatccac

SEQ ID NO: 39303 - DNA, 2300 bp, Homo sapien
actcagtctgagccctactggtgggctcatcttatgaaagaggatatttgagatgtagagttgttgaatgcatgaaactaggctggaactaggacccaattcccaagccactgccagttccacagtctcacagacacacggccacacatacgaacacacactgtcatacactcacaaacacatgctatcatatacacacacatgcattcacacgtacaccaacatacacacacatgcagtcacacacatatacaaacacacgctgtcatacactcacaaatacccacatgctatcatatacacacatacactcacacatacaccaacatacacacatacacgcagtcacacacatatacattcacaaacacatgctgtcatacattcacaaacacccacatgctatcatatacacgcatatacactcacacatacactgacttacacacatgcagtcacacatatatatacattcacaaacccacagtcatacattcacaaacacccacatgctatcatatacacacatatacactcacacatacactgacatacacacagacatgcagtcacacatatatatacattcacaaacccacactgtcatacattcacaaacacccacatgctatcatatacacacatatacactcacacatacactgacatacacacacacatgcagtcatgcacatatacactctcaagcacacactgtcatacaatcacactatcatacacatatgcactcacacacttacatacacagtcacacatatactcacatgtatattcatgaacacacacttccatacactcaaaaacacatgctatcatatacacacgtacactcacatactcacacatatgcagtcacacacatgcatatacattcacaaacacatgctgttatccactcacaaacacccacatgctatcatacacacatacacactcatacactcacatacacacagtcacacatatactcacatacacactcacaaacacacacagtcacaatatactcacatacattcacacaagcaattacacacatacatatacactcacaaacactatcatatacacacatatacacacacagtcacacacatacacatacactcaaaatatacactcataaacacacactatcatatacacacatacactcacacacatccacattcttccatatatactcacgaacacacactgtcatacactcacactcatacacttacatacacattcacacacagtcacatatatactcacataaacactcatgaacacacagtcatatacccacaaacacacatatactcacacacacacagtcatatatatactcacatatacactcatgcacacacacaaactcacaaactcagtgtcatatacacatatacacacatatgcactcacacatacactcacgtacacacacacttatgcatacattcagtcacacatatactcatgtacactgtgtcacacacacatatgcatacacttacacactcacacatcgtgtatgtccttctaagcacagaaacgctttccatttccaacagtatcaataattcctgattactgagactagtgacttacagaaccttccctttttccaactcttaccaatttttcagtgacataaaatatagaatttggccatttcccatggggcttcagccaagggacatcactaagagctgtatctcagctttcctctgccttcacactctcaacagtaatgctgctcagtatccccagtgatccctaatgagggggctcctccgcccaatgctttttaccttttcggggtaattaaagcagaagcattcaaggtttcagtccccatgttccctcctcaatccagctccagaggggaaatactggtctgattgggctgtgtcccaaaacgctgggccacgctactagtgggcaagatctccatgcattaaggtctccatgtggtctgcatctcatgattagactggggttctggaatgcattgaaactcatctcacaattagactggggttctggaatgcataaccccagtctaatcatgagaatccaccagacagacccaaattgagggggattctacaaaatacacgacccgcactcttctaaggtgtcaaggtcatgaaaaacaagactggaaaaccaacacagactggaggagactaagaagacctgacaactaaatgccatgtgggaccctggaggggacccgggaacagtagtagaagagctggtgacatctgaatgaagtctgtaatttgggt

SEQ ID NO: 39304 - DNA, 2300 bp, Homo sapien
ttcaattaaggaaattccaagtctcatttagccttgggctatactttcaatatccttctaagtactgaattcctaagacagtgaaaccatctgacaggaatgttggggtttacccaaggacaggatatcagtgtttggcttgtaaaccagatgcggtggatgtgacagtcctgggagggaagcagcatggtctcaggatggcttgcagccagtggtgccgtcctgtcacacattaggaagagaaaatgaagcagaagaaaaacgctgcctgagatgttctcagcaaagtgcttttccatcaaagcctctgcttcttgacaaacagactctgagatgcatctaggaatagctctgatgtagaaaaatacaaggtcagagacacatcgggtatgggaagagtccatttactcatctatacaatagctatttattgagtgcctactatgtgccaagcactattctatgggctgggattcagccttgaacaaaacagacaagttgctgacgtttgaatgggggaaagcagacactaaacagctaaacaaatgagccagataatcttacctatgaataacagttatctagaaaggaaaactgcatgatgctcagggaaggtttctctgggacagtgtgaatggcaggaagcggcagcctcggcaagatctgctgttcaactcagtccttcaacaaaggcagctcaatagagcagctggacccaggtgttggcacttctgttcccttctcttgcagagacctggagttttcttccatgctcttggaggtggtctttcactcaccagctgcctcacaccctatcccccatccaatccctcctgcggactgtggtggcctccttagagagctgctgcctgacactcgctcttcagagttgccattgtgttcttcctgaccagccctatctgcatgagctatgggaccgtgtgctctcggctgccccagccaacctggccttgcctgttttgcagtgatgtaccaggctgtctggggattcaggctccattgctggagctgtccttcactcatcaggttcagagagctcagaaccagaaaccaggagacctaggttctcatcctaacttgctatgtgaccttggttaagcctgtctggactcccatctataaaataaaaggactgcattagtgattctctaactgttctgtgggacccaggtcttttctctctgcagaagtgattcgaattttatccaaaaactatttttatggttgtaatagaaaaaacaaaactccaatggtttatatgccaaatatcaacagtttaaaacccaacatgttaatttgttttgctaggcaaactcgtttttgcacagatcttagactaaatctcttattgccatctgtgtgtgtgcatgtgtgcatatatatatatgtaaactatttattaaaatgtcattgatttggatgcttgtaactcagctcttatctgggatgtctgcacctaataaacagtaccagcaagtgcatgactacagtgcatacgttccctgagcaactcaccaccaggtctgtgctagcagcatgttctcagtgaacattgtaatataggctaggcctggctttttttttttttttttttttttttttttttttttgtagttaaatgttttagttggaaggaactttagatatacagaaaagttgtcaagacagtagacagttcctatgtattcttcaccagcctcccctaatgttaaccttttacatacccctcatcgcattggcagagcagggaaattaacattggtacagtactgttacccaaattacagacttcattcagatgtcaccagctcttctactactgttcccgggtcccctccagggtcccacatggcatttagttgtcaggtcttcttagtctcctccagtctgtgttggttttccagtcttgtttttcatgaccttgacaccttagaagagtgcgggtcgtgtattttgtagaatccccctcaatttgggtctgtctggtggattctcatgattagactggggttatgcattccagaaccccagtctaattgtgagatgagtttcaatgcattccagaaccccagtctaatcatgagatgcagaccacatggagaccttaatgcatggagatcttgcccactagtagcgtggcccagcgttttgggacacagcccaatcagaccagtatttcccctctggagctggattgaggagggaacatggggactgaaaccttgaatgcttctgctttaattaccccgaaaaggtaaaaagcattgggcggaggagcc

SEQ ID NO: 39305 - DNA, 2300 bp, Homo sapien
acttcatggaccttcttatatcactttcctcaatctattataatagcttacaatcacagactcttgctgttgggtagtatgcaagctgcgttctgtgcagaaatataagtgggcacacattcatgcggagcttctatttttaggtgattataatttttcacaaagaattgccctttgggatgaattttatatgctcattctcagctgaggggtgactcgggtggtgcgaagtttggtgaaatttcatttgagtagtccatgcataaaaatacattccagtacccctacctcttccctgccgtgatcaaatttaagagagtgcttttaataccaagagaagtcaagaacagtttaattttaaaaatttcaaaactgtcacatatctcaatgaggactgtgacacattctaaaaaactaggttaagaccaaaatttaagtttgtggtgagagagcgtgttacattactttacgtgatacacttttttctactacattttaaaagcaagatccaaataccagatacacactggaaggactgtgtctggctcccttaactgaaagaattgcaaatgtatttattttagggacaagtgaagaaaaaaaattatccatattgatttgccctttaagtgtcagagtgctaaaaatgaagagtggcgggagcagcagtgggaggaggggtagagtcaagccttttgtctgttttccatccctatcggttacttgaagaggagaatgcttaggcactgctactggaagagggaaatcccaaaatggggccaataggccatgctgccaaacttccttggatgcagtgctgcgaggcagaaagaatgtcatgtggacatcagagctgtgccactgtgtacagactaggaagggggagtaaaggatgtgcaggaacaaaggggaggggagagaatactaaatactcccccaagaaacttatttactgggggagaaacatacacactcataaaggtcacaagtaacacaaggcaaccgaagtgtcaaggaaacagtacaggcagtatacactacagctgttctgagggcataaccattctattgtgcgtggacagtgtgggggaaggggtagtctgggggggttccaaggaagagaggagatgggactttaaaaatcccacagagtgaagggcaggactgtaagactcagagggcgtttgagaggatctaggtgagctgaggtccaggctcaatcgagtctggcatattcaagggactcaggttgtagtagagggttggaagggttgggtagtgctaagaagggaggggccgggatatggacagtctgccaagaagagacagcacacctagagtctatcctgcaggtgttgacaagccactggcctttctaaatgagagggtgaagttataaaggtaccatcttgagaaggcggatccagtgtaaaaataaatcagatggatagaagtggaactccatggcagagaggtcagtggagcagcacccagctataaagatgaaacaagctgatgaagagaatgatccggcaagaatggaggcatggaaagcaaggatggaatgatgtggtaactgagaggacatggaagtaaagaagaggaaggactgagagaatcacaggatggcttaggccttggggatttaaagaataaacatgctcgagtaatgacaggaagctcaagtggaaatgacacctcctcaccacgatctaaagcgtggagttggagctcagcatgatggcagggctacagctgcagtgtcaaaatgccctgcaagatgtggtggggagcatagaggcaaagggcagaaaggacagcagaagcttggggaacagtccatacctgggggtgacagggaaggaagatggagcagtaggggaactgaccgtggagagaactggtgtaacacagcatcacaaggctggggagaccagagtttcacgacagagaagacagtcaaaaagaaggaagactgataaatggccaaggaatgtgctccatagcaagctggagaaagaatctgagcagagagcgtgaggcagaagccaggtagaaattggtaaagaagaaagtgggcagtgaagaagaaatggaggtggcaggatgaggtcaattccatatcctttagagtgcctgtgagatactaggcactgtgggacaagaccaagagactgagtcaggcagacctatctagcccattaagaactgctttaaagggacacatctggcaacagtaaaataccaaagggaaggattacatctggctggagatgactaggaaaagttttagatgagat

SEQ ID NO: 39306 - DNA, 2300 bp, Homo sapien
ctctattgtatacttgaaatttgccaagggaatggatcttaaatgttcttaaccgcacgcatgcattgtgtgcgagcacacgcacaggtgtgagatgatagatgtgttaattaacttgattgtggtagtcattttatattgtatatgtatatataaagtcatcatgctgcatacctaaaacatatgtaatttttacttgtcagttacaccccagtaaaactggggaaaaataaagaaccggtgggaaaaaataattaagtgacccaaatttttgtatcatagtggatgaaacccctttgctgtctctaagcttaaacaaagattcatcttttcgaatggttgcttattttccatttctttcttcaactcattaaaacttaatatatttgtgggacagggtctttctctgttacccaggctggagtacagtggtgcaatcatagctcactgtagcctcgacctcctgggctcaagtgatcctcctgcttcagcctcccaaacagctgggattacaggtgtgtactaccacacctggctaatttattttttatcttttgtagagatgaggtctcactatgatgtctaggctgattttgaactcgtgggctcaatcgagcctcctttctaggcctcccaaagtgctgggatgacaggtgtgagatgctgcatcctgagcccctttttttgtttgttttttgttttggcgatagagtctgtcacacaggctggagtgcagtggcaccatatttgctcactgctacctccgcttctggtgttcaagcaattcttgtgctgcctcctgagtagctgggactatggatgcatgccaccatacctggtgaattttttgtatttttagtagagatggggtttcaccatgttggccaggctggtcttgaactcctgacctcagtgttctgcatgccttggcttcccaaagtgctaggattacaggcatgagccaccatgcctggccccatttgttaatttttaatgtgaccattagatcttctgttttgctaatttctgacgttgtttttctcctttctaaacacctccttgctccatgttgaattttaagcatatggacagtggcatcattagaaagtttcccatcattccctgtcatgcacaggtgatagaagaatgtattggtgcttcaaactgattattactttttacctccttgatgaactcaatatattattaagagagtggctcagtttcaaccctggaggcatcaaaaagaacaagttctaaataacatcctcctttagaatgcagcatattttaactgtgtctctccatcttgcacatcaccacttccaagctccatctctaactgtacatatgctctctgtgtgtatgataatactgctttccccgtcctctcttctcctctctcctctctttgaatatttttttttttgtgagccttaggaacatgtacactggtcccgtagagtgacacaacaaaagcaggctcttggtgtagtcaggttttgtccttgtaaatgacatggtacaagtgcatgcggtggattaaaatatgttcaccctgacagaaatcttttagttgaagtgaaaaagcctccgtcaattctgattgcaacaaaggttgctgctgcgagtgagagggacttgccaagactgcaagtttttcaagctctattctggagatacgtttgttacttggttctcagctttgacttggttataatcttgtcttggcttgttctctttccagaatacactagttttcatttttctttggccttttctcaagatttatgaaagggggtatttagctttttgtctggcaaatagcaaaggctgtttgagttccctaatcaataattgtaaaataactagaaattgatctatgccagctgtaaacccatgcatgcatttattttttctttttctttttcttttttttttttttttttgagacggagttttgctctgtcgcccaggctggagtacagtggcacgatctcggctcactgcaacctctgtctccagggttcaagtgattctcccacctcaacctcctgagtagctgggattacaggtgcctgccaccatgccttgctaatttttgtattttcatcggagacagagtttcaccatgttggccgggctggtcttgaactcctgacctcaaatgatgtacccacctcagcctcccaaagtgttgggattataggcgtgagccaccatgcccagccccatccatgcatttctattaatgtctgctatccttgagaaactgtacataaaacatttttgtccccaca

SEQ ID NO: 39307 - DNA, 2300 bp, Homo sapien
taaaactaaggtcatatggctaaacttatgtgtaacagtgtgtttagcaaaaaagaaatatgtagatgaataacctaataactatgtactggtctcgtagaggtgaaatgttgaactattaataggaactttccacaatagatcatctcaacttttctgatgtagttttaattcctccactaatttatgccatctttggcaatcacttaacttttctctgcctaaccctattatggcctaacttatgtaactgaactagtagtagaaggagacacaaaagtggaaagtaaattctctacatacttggtgcaaataatttattctatgaagaaatgtattttctcatagacaggtttgaaaaccatagtacttaaaattttactttacaaaaagaaaaaaatacagatactagttcatgagacaagagacatggaccaaacacacgtttacgttttttatttttttattttatggctactactaaaatgccaccattcatgtactgcataacagtgtttcagtcaaagaagaacctcatttctggcagtggaatcataagattataatggagctggaaaattcctgtctcctagtatttactatactatgctttttatctttaggttaaagtgcattctttctacctatataaaaaagttaactgtaaaacagcctcaggcaggtccttcaggaggtgttacagaaggtgctgttatcataggagatagctccatacgtgttattgcctctgaagacctttcagtgggacaagatgtgaaggtggaagacagtgatattgatgatcctgaccccgtgtaggtctaggctaatgtgtgtgtgtttgtcttaatttttaacaaaaatgtttaaaaagtaaaaagtaaataatttcaaaaatagaaaaagcttatagactaagtatataaagaaagaaatatttttgtacagctatatagtgtgtttgtgttttaagctaagtgttattaaagagtcaaaaagtcacaaaaaaagaagtttataagtttaaaaagttacagtaagctaaggtcaatttattcttgaagaatgaaaatatatgaaaataaatttagtgttgcctaagtgcacagtgttgataaaaggtacagtactgcatagttgcgtcccaggccttcacattcaactccccactcactcactgactcactcagggcaacttccagtcctgtaagctccattcatggtaagtgccctatagaagcataccattttttatctttgattttttttttaatggaatgcttcagaaattcatgtgtcaaccttgctcaggggctgtgctaatctctgtattgttcaaatggtcctagatgtgttgccaaagcaatcacttttacactgtttttgctgtagcttttctatgtttacatatatttgtacacacaaataccactgtgttacaattgcctacagtatttagtacagtgacatgctgtacatctttgcagcctgggagcaataggttacaccaagtagcccaggtgtgtagtaggctacaccatctgggtttgtgtaagtacactctatgatgtttgcacaaccacagatatcacagggtcacctaacgaggcatttctcagaagtagtcttcattaagctaccctacgactgtaatgaaacgctaagttttgagccaggaatttgtgtatagaacactaggaatggcttcattagtatcatgcatctttttcattaaactgtgagtccctttgagagaaagattgtgtctctgaacttagtggcctaaatttctagaattatgtcttcaaaaagttgcccagttaggcgtctctggggagtcaaaaccacaactcccagaatgccgtgctcccttagcgcgctcaggcgcggggagagaatgtcccatcacccaccgcgccagatcgagaccacagttcccactacacccagggactccgcggaaagctatcaaacaccacctgttgccatagcatccgggtcgggtgaaccaatccgggcgccctcgccgaacagaggcgggcagttcgcatcgccgaccaacctgaggcgtttttgttgtggcgcgtgaccggaggaggcgggagctcaggaccggcgccttctccttgcttctgggggtcgtggccttgctcccgctgtgcgggaaaagaatccaggcccttccacgcgcgtgtgggtgcgggggccccgaagtgctcgtggttccccgctaggtctccgctggggcaggaaccggaatcatgggtgggaccaccagcacccgccgggtcaccttcgag

SEQ ID NO: 39308 - DNA, 2300 bp, Homo sapien
atccctagttttctgagtgtttttattgtaagagtgttttggattttgacaaagcttttttctgcaacagttgagatgatcacacactttttatcctatgtcctacattcttttttttttttttttttttttttgagacagagtcttgctctgtcgcccaggctggagtgcagtggcgcgatctcgactcactgcaagctccacctcccgggttcacgccattctcctgactcaggctcccgagtagctgggactacaggcgcccgccaacacgcccggctaattttttgtatttttttttagtagatacagggtttcaccgtgttagccaggatggtcttgatctcctgacctcgtgatccgcccgcctcggcctcccaaagtgctgggattacaggcatgagccacccggcgcccggcctgtcctgcattcttaaccactaggcccaactgcctctccctttctctatgaattatttaattttatagcccagtttttgtacttataccataaaaatcttttttttttttttttttttgagacagagtttccctctgttgcccaggctggcgtgcagtgtgcagtggaacgatcttggctcactgcagcctccgccttctaggttcaagcaattctcatgcctcagcctcccaagcagctgggattacaggcacacaccaccacggtccggctaacttttgcatttttagtagagacggagtttcaccatgttggccaggcttgtcttaaactcctggcctcaagtggtctgctcggctctgcctctcaaaaagtgttgggattacaggtgtgagccatcacacttggcccaaaaatcttattttctttaaaagccattaaaattatgatttccagaagctatatgttatttcctcatttgaatgttacataatttatttaattcttctgtgttatttaaaaaatgtcaatactctatatttctttaggaacaaagtccctagaactggaattattgggccaaaggttatgaatacttttaagttatcgtgtgtgtgtgtgtgtgtgtgttatcttcaactaatttttaaaaatgtgaacttctaccagctcgatgtctatttaataaaagtaattgatgtgttctgagcttgctgctcacaactccatgacctctgagttagtttgctttctattcctttaagttcttcaatctttattgctactgagcaggccacctccttccttacttttaaattattattattcttgttcctcagtctaaccactttccacgcacattctggtcttttttgttttgttttgttcatttggtcttatgaattaatgactaagccaacggaaccaaatgcaggaaatactaaaaacttaccggtaaaagtattaacacaaatgtgcattactactaagtatttcatttagcttgaaaaaaaaaaaaaaggaatctgcagtgtggtctgtttgtttttagcttatactgtcttttcttcatcaatattcatttattcctgtacgtgtggttttagaactatctggaaatataggaacattgggaaaaattgaactccacataaacctaatgtagaaacattagttttacagaatactaaagaaaagcatttctgcttatattcattttcgtattttattggattttttaaaaaatcacttgcacttaaggcaaaaacttcgcacatagacatccggcagagaacccctctttcatttaaatacaaaccctaacacattttggcatcatcagataaatttgatttaaagcctgacaaaattctaaaagcaaggaaactgaaaaaagctggaagtcagaataaagataaatgaagacactcattacaagacttaggaagttgcagctggtttagctttcctgcgcgcccaggagacggagaaggaaaactacgactcccagagtgcttagagagaacacgcgcgtcgtggcctcaaaacttgctcccttagtcccgcctcctcacttcagtgattggattttccacttccgcgcctctggaattctcttcacccattggtggagactcctgcggggtcaaatacagaatttacgcacccttggcttccttggagcctagcggctctccccgcgtccaagatggcggcagaagcagctggtgggaaatacagaagcacagtcagcaaaagcaaagacccctcggggctgctcatctctgtgatcaggtgagggaggcaggaggcagggtctggggactgggggcagcggctcgacctccgctttggaagggagaagggttagctgggtccc

SEQ ID NO: 39309 - DNA, 2300 bp, Homo sapien
gaacttcatgccattgggacattagacaccagtgtgcctcaggcatctgaatgtcatggatcaatatggtttcaaaccatattttgaataccccaatatttaccttaacatacattaagttttaattttctccggtaaggacatttggcaacataactgccattcatggcagaaaataactaagattttcctatcaagagagtacaaaagatataatgttaaataaatttacctttgtgaagagtcaatatattattcatactttgctatctaccactcaaaaacatattacagtctgtagattcatatttgagaactacagtcttacatacctaggataaatctttgttggaaaaggagaaccttcacttaatcaggtatttactgattaagttactgatctgtatgatgccagataccagttttataccgattatttccctgcaccacattaagtgtttcagttggtatgtttagacacatgtttctgtattttgtatgtatctttgctaatatttgagtagttcttcagtaacacagatgagaaagaagaattattttagatatatgtgagtataaatatgaatttgacctttaaggattaaaaagaatcatcaatcaaaaggtagaatggcttctatttataaatacaatgtgtaacttctggattatatatgtatagtctaggctgggagtactacataaattctattgattttgtctcatctgaattacaatgtcaaatagatactagggttttaccataagatagttatgggctgtctcattgtcacattaattacaataattaggcagtaaagaagccataggaatagataatatgttgtatgtttggatgagattgtagttataaccccttatttatggtaataaaaccttgttaattgacactgctgacaagctcttttgctttccttttcaactttccaagttggtttatcagtctatttaggaattacaagctgagagccacaaaatatacaataaagctcacattgcaagattttctgtacttgttcatgctatacacattaaattcattcagcagtatttgctaattattgttctaagtgctcttaagtattcagagatgtataaagcagtgcctactctgaaagattaataatggagaagtgaggtaaagtatctatatataaagaaatatgactgacatttattgagcagcatatgtgaggctcatgtgataagttccttaaaagcagacaaaagagtatacaagttcagaggaagaaaagatgattccaggcctgtgtgatcattgaaactataagtctcagtggtagaggaattattttgcatctatgccataaatctttgagctatctattctagagctgtagtgaaaggtaggtggctaaatgtactgacatggaaatcaacttttgttctaggcttagctgcactgcaaccttattttgtgtccttgagtatataaaattgatgtaataatatgtgtccagcatatctcactgtgatgaatgagataatgtggatgcctgagcttctccctgtggtgaaagtcagattgcttggcaggtgtatgttttttttttcaggcaactcaggctgtacatttggatggtagtaagcatagctttccatgactaaatggattaatatccttatcaaagtgcctaatttattgctagggaatagcatattctgtgtaacatctgagctgttgtctgaaaaaattacatgaattccttggagaagctgcctgtatgaatacatagtagtagtattgtaatccgtgaactatgttaaaacggcaacatatgtttattgagatgctattgctggtttaggggctttacaattgcttttaaaattcttacatcatttacatgttatagcagaggaaactgaggcttagataagtttttaaaagttgcttagataatacagttgtttgaattcacatctgctgaaatctaacgttaatgctgtttacattgtagaatgctactttagtttgatgtttttcttgcaggtcactgtaagccatttatctgcgtgtacgtatgtgtaaatgttatttatttgtttatgccactaggttgcttctagaactgctggagttactgtttgacaagtttaatgctgtagccgctgcacactctgtggtcctgggatacctgcaggacactgtagtgactccactgactcagcaggaagatatcaaactgtatgatatggcagatgtatgggtgaagatccaagatgttctacaggtaagagccttttacaaagggtgt

SEQ ID NO: 39310 - DNA, 2300 bp, Homo sapien
gtagtttgggtgatgtattaacagagctagtacttatcattatattatttcatccacataccgaataatactctagtggcttcataaataaataaaaaatatttaccagtctgttgacatgttttgtattttccaagtgcaatccttattggacagaaaattaaataaagtacatttactgccacctatagacctgtgcttatttgggtgctctggtgtcaggtgcatatatatttactattgttgtattctcttgcagtattgacccctttattaatgaccttttttgtctttttgtacagtttttgacttaaagtctattttgtctggtattggtatagcaaatcctactctgttgtgttttccatttgtatggaatatctttttccatatctttacttttagtcagtgtgtctttataggcgaagtgagtttcttgaatgcaccaatattactgggtcttgttttttttttttaaaacggagcctcactctgtcgcccaggctggagtgcagaggcgcgatctctgctcactgcaagctccgcctcctgggttcacaccatcctcctgcctcagcctcctgagtagctgggactacaggcaccaaccaccatgcccggctaattttttgtatttttagtagagacagggtttcactgtgttagccaggatgctctcgatctcctgacctcgtgatctgcctgcctcggcctcctaaagtcccaaagtgctgggattacaggtgtgagccactgcgcctggcctgggtcttgttttttaattcattcagctactgtgtgtgtttaatcagggaatttagttcacttacattgtgttattattgataggtaaggacttactgctggcattttgttacttgttttctagttgttttataactcttccttcttattatctttctttgtggttacatgatctctctggtagcatgttttaatttgctgccttttgtttttagtgtatctattatgggtttttgccttgtgataattcttagattttaaattggattgattttataagtagaacctattggcagtagtagattttttaactttttaatttttttgagacggagtctcaccctgttgcccaggctggagtgcagtggcatgatctcggctcactgcaacctctggttcaagtgattcttgtgcctcagcctctcaagtagctgggactacaggtgtgcaccatcatgcccagccaattttttttttttttttaaagtagagatgagctttcactatgttggtcaggctggtcttgaacttctggcctcaagtgatcctcctacctcagcctcccaaagtgctgggattacaggcatgagccactgtgcctagctagtagttgattttttaaaaagcagctgcttttcttgtgttgaagctctcaatatgagtagtggctatggaaattctttgtaggtcaggacttcgtagcttcctgtggcctttctatatctctttttgcaggtttgttttagtatttatccactatgtgtaatagtgagtggtaacagcatgcactccctagtacactagggatcactttacaggtcttgaacctctgtaagccccatttctttatctataatctgtgaatttatctgataaaattttgtgctttaaaagagataatacattttacatggattagcatgttgcctgcatcatagtaagccctcagtaaatgttatggcattgctgctaatgctgctgtagtttggaatatgaggattaaattgtgattaaagaggaatgttgattaactcactcagcacaatatctagcacatagtagatacccaataaaaacgttccttttactcccatgttcaaatgcccaccccgcctcttccccatgaataggaacaagtagatgacttactagctataatgaatcttttcttagatccccaacttggaaaatgaatgaccaggttaatatactcctgaatgttggttttagaattagatttgcatggttttaaaatagtttttcttaattgcacattaaaaatgtgtatattaacattaactgatttatctggttgtacagatgctattaactgagtacttggatatgaaaaatactcgtacggcctctgaaccatcagctcaactaagctatgccagcactggacgagagtttgcagccttttttgccaagaagaaacctcaaaggccaaaaaattctcttttcaagtaagtattattctgctgttaataggttttaagaattgttagactgaagtaagatgacttcctacttta

SEQ ID NO: 39311 - DNA, 2300 bp, Homo sapien
gaatgaattagattgaatctagattataagcttcttcactaaggggtttgcttcttgagggtagacattttctcttgttctttttacttaatagacactgaataaaacatttgttacttgccctgattttgggactgggtaaattgttatatttctctaaaggataattcaggtcagcgtactttgtgtgtgtataagccagtcactttgtctagaggattgctgagctgcaaccactgatagctgccttgaccctgaagtatctgttctttacacgaatgaagaatgaagctcgtggtcagcatgaccattgcttctcagaaatgtaaattttctcactcttgtgaatatcatacttacacctcatgctggctactctcctcttcttctcttcatgatctttctcattataactttgtccgttgcacccagatacatccgaaaagttgtcacctgcagagatgctatttggtgaagatttgaaacctcttaacggttaagagtgtcctttatcttcagcgttgatgacaaacctgttacaaacaaatttttggatgggatattgtaatacaaatgaaactgtttgtgaaacagatgacctgattgtttcatatgcgtttatattatctgtattggtgatgtgctccacaggatcagataattatgataatacacacgtgttgaaaagagatgcattcaattcacagctatggaagttttaaattgatttttttttccccaaaagaagtcagaatgtattcattttttctcgtcatttccttcttagcttagagttaccccttgtggcttcctaatttcattgctaccacattgtccgagtcttcatcacctgaaacctgagttactgtacacttaatgcttgtctctcctgtttctggttcattctatatactgtatacttcagcacacatttatttaccatggtggtgatagtggtgataagattttagttctagactagaaggcataatccatcaaaaagtgcacaagagaggtattggtttgtaatttttagaacactaactttaaaatagtcccccacccagttaaaaaataattgtggacctataacgtatacaatactgctttagatggtgaaaacatttaatatatttattgaattgaaatagtttgttgatttaaaaattctgctatgatggtaggatagggtaatgggacaattctagagaggagcacatctggtatgtggcatgttcattgtccgaagagaaccagttctggtaatgagtagagcatttcttgaaattaacattgtaataagcacagcaaagcaaagagggtttaaatcatagtggtgcctctctcctccctggcttccctgatgcccagtggtatacaattcagaaatatctgatgagtggttataacatttctctgattttcccctttcttttcttcatctccaggttcatcttaaatgaacctctccttggtcccataaggccagtctgtttttgcattcctcagttctgatttcttttggcaggaggactacatgtggttgacagattatatctgaaaagggctttggtaattgctcgttctcttcagtgactgtgttgctgacagatgggcacagtgaatattgaaagtgttctggacctccgcttactccttcagctcatgagtgctgagcactgccagcacttttcttattatctattagcaaatttaaaaagaattgcttggatctttacatctttttggacctataactaaatcacatgtatggctaggttctttcccacctcttctacccccaacccccgttatgtattttttggaatagagaaaattctcaagatgttaatgcaggctggcatgaatgggtgccaatagttcttacagacttgttaaaagatttattttttgcctgagaattacacatatggcctagaatgataatattaggatctgtgttggttgagataattggcagatcacaccttaagaaaagtgattggttggcttgtttctttcattttaatctgttgtctccgtcacagtcaaattagcattatgtagtatattactacacttaaaaaattatttaacccatttatagagggcatctgtcggttgcatttgatttatttaaaacgttttcttacatggccaatttagtaacagcaagcaaaaccaaaatgagcaaaggagaggatcccaataatcccagatctataaagcggatttctcaagggggtagagataaccacctagctattgctaaatgtgatctcactcagttgaaaaagaaa

SEQ ID NO: 39312 - DNA, 2300 bp, Homo sapien
cagggaatgacgcagaattcatttctgtgaaggctgaagaggaatcaaaatgaccaggtttggttatgctataaaacaaatatagaagaatgttaatgttagaatccgggtggtgagtatgtgggtgttcactggacatttttttcttgattttttgtatatttaaaacatctttgtgataaactggggaaaaaatattgccaggttcttatactggttgtctaatcatatatgaaacaaaccagtaaatatcagtgaggctttctacttggtagaaaatatttttattcatgtaggtgttttcttagcaccactcctgttaacactgttggattttttttctgaatggagcaatcatgtgggtatgtggaccactaataataattatgaaacagatcaatatgtagaagacttcataaagccctactgaatccatgataccatagtacttctcatcctagtctttggaggaagtctgggcaagtgtcattctcattttatacatgagagaggggaagctcagacaagacaagtagcttggacttgtctaaggtcactgagctgatgattatggagaccaaatctatgttttatatgcatttcccacctcaccatgatgaaatgtagcagtaagcactttcaaagatggctatgaagaatcacaacaaaactacaaaattaaaatgtactaaataagtaatagaattaacaatacataagtaacacaacttgataaaaatgatctgaaaacatggacgaatgttatcagatcccaaaagtctctattagcaataaaaaatttaatttgctctggtatcttggaagtgaacaggtgagtgctggacaatctaaacaaagacaagaacacaggcatcttccactccatcttcctcaataaagtcttaggtagccacaagtcattattcttgacatgaagaggcaaaataatactgttagtgaataaataaaataacaagagtaaaatgcaaagaaaatcaaaactatgagtgataagttaatgtttctttaggtatcgataaatactgaagaatcagattagaccccaaggcatcttggttctaagacttattttagcacagtgagaccattagcaccatctctcagagcttacagggggaaaaaaaatcaattgatcagttctcttttcaacctaatgattttcataatgacttccagcagaccttaaatgggactaatctatttacactaataaaagctgaatctattctctaccagagtggaagggcaacaactggctgtgatgcaaatgccactcaaatgcaacattcttcatatgaacataatgtgatatgatgaaaacaatacgctactgctgctggccacacttcctcgggaaaccagaagaagttactggcagtgccttagcttggctggggagataataggtttgggcagcagtataattatctctagcaaattattatactgtaagtagctgtgtccaccaactttcagtaagagctccagcaatcactcagcctaccaaaaactttcactttgaaccttgttgacatctagaatttagaccatcctgggcctactgccttaacagaatacctatttatttatttatttatttttagagacagagtctcactctatcattcaggctgcagtgcagtggcatgatcattgctcactgcaacctgaaactcctgagcttaagtgatccaaccctcctgcctcagcctcccgagtagctgggactacaggcatacatcatgaaacctggctttttttctttctttctttttttttttttagagacagttgcttgctatgttgcctaggctggtctcgaattcctggcctcaagcaatacccccaccttggcctcccaaagtattgagattacaggtgtgtaccacccagactagccaatggcaatacttccacactgcttcctgccagagagtcgtcaaggaaaacatagcaaactgaatcgattgcattctagttatgagttgtagtggactgaatagtgtctccctccaaaattctacacggaacttcagaatgtgacttaacttggaaatctttttagatgtaattaaggtaaggattgagatgagatcgtcctggattaagacaaaccctaaatccaatgaaagtatccttacaagagccagaaaagaaaacataggagacacacgggagaacgccacgttacgatagagacagagattgcagttacgctgccagagccaaaaatccacgggagccaccagaagctgaaagagtcaaggaaggatcgtcct

SEQ ID NO: 39313 - DNA, 2300 bp, Homo sapien
attttttttcacacgcaaaaggggtagttgaaggtgaactgtggagttgatcattctaggtttggatttcagtaccaccacttggcttttggccagttatttaacctctctgaggctcagtgttctcatctgtctaatgaggatggacagagggtagatgtgaagatgaaaggaggcagaattcttagactaacctcaaaggctatagtttgattgtcctgtaggacattaaccagttttgtctataacttggcaaacttatttcagaatgtcttttctcatggactctgaatgcctgattactatcttcctgatttcttcattaattagtgagtctaatagaatctttcacatgtgcttcattctattttttatataagaatcctgtttttaactttttgaaaattattctttgactgccttcagacactctcctcgatagactgacataggcgaaactcactagaaatgctgattaagttactgaaaaaaagaaaaaccactttgggaggccggggcgggcggatcacgaggtcaggagagcgagaccatcctggctaacacggtgaaaccccgtctctactaaaaatacaaaaaattagccgggcgtggtagcgggcgcctgtagtcccagctactcgggaggctgaggcaggagaatggcgtgaacccgggaggcggagcttgcagtgagccgagatcgcgccactgcactccagcctgggcgacagagcgagactccgtctcaaaaaaaaaaaaaaaaaaaagaaaaacgatcgagatttgcatttttacactttctgcctgattcttccctatgtcacttagccgaagccaggccctacgagggtaagggtggggaaaattcccttggaggaatctctacttattggaaaaagaaataagcaaaaagcaagatgagcctggcagaaagagatattttgcttgtggcctttacatttatgactagcaagataatgaaggaaggtaattctgaaagctttatgtcagttttaacggtccctcaagcactgagaaagataatcgtcaatggatggtgtccataaggattttttctccttctcccctgacagccattgacaggatcattttgtatttgcaactgctgtcattgaagcgtgcagaaaaggccctgtaaggccagaaggatgagggctacttccctgcaaggatctctattgtcatcactatggcaataatagttactataattttcattctgcttttctatagagtgtcgacgttgtggagcttaaggctatgggatttgggtcacataaaatcacactagcataaaatcgtgctttgttatcttgaaagagtattttttttaactgcaaagagagcctgtgcaacaagattaaaataattgccaatgcaggtcacttgactaatataattatttatgggatgctaatagcttttcagacgctttcagatacagtgtcaatttgacagcagttttttctctctctgtttggattgtaagaccactgccagtttttctccccaaggacaaggcttatcattggggggtgggggtggggaatgtaaattaattggaaatcagctctcaggcgtcgtctggtagtttctctttattatctgcaattaaatcataaggacaggaaccatgccttctatttcacttatatgcaccctcatctcctagcgtcgcgctttgcataaatttcagtggtactagctttcctacagactgctttagagacattagacacttctaaagtacgactctgcggaaagagccctttgggaatgaagcggcaacggtggcgcacctgcgatcctatcgtgggatgacaaagctctaagaggggtctcagggtagggaggaaacagctggagacaaagaaagggggtgtagcgaaaagaggtgaaaacaggaaagataagcgaacagaacagaccaaagagagaaaaataacagaagagactgagaaaaagaaaagtcaagtggagcgcccactgccccgcctgcagaaggcgagtacgcgcggaggagactacaggccccagaatcctccgcggttccccttgcctggggtcagtctcctaggcaaccccgctaaacaagatggcgacctccgagagggctctcctgaggaccagagctgcctctctcctgagaggcttgggcagatcccgaactggagcccgatcgttacagtttcgcgcagaaaaagagcgtcagccttgctggtcttttcccatggggcagaagacgaaaggcagctctaacatagcctcctcctacctgc

SEQ ID NO: 39314 - DNA, 2300 bp, Homo sapien
tccccagaaccaggtgtctactgtggagcagggcagctggaagggaagactgcgccccaggagcagtcagagcaccaaggtttaagccatccctggagccaccagctcattaaggtctgggaaccccgaggcagcactgtcacagaacgaccagctatggctgggtcctgtgagtctccacactggcttcctcctgaacccatggtcagcgtaggtggaggggctgttcagcactgtccaaaccttggattcctagaaggcagccaatctgcactcctgtgcctcttctgctgttgccgtcacagcctggaagagcagttgttgcagagggatgcagctctatcagctgctgccaccaaattgagccattctggaaggctggtgtcagcaagtagcctttgtgtccagacacgaatccaacctgagttccaactctggctgaagcagggccatattgccattaagttttcttctcttcataaggaaaattcgcttctagacttctagaaaattctctcacccctcttgcattatcgaggagttccaaagcaaaaagaacttttgagacaggaagactttgctgttcctggaggttccaaacctacagttaacttgtgggaatcttctgtagggaagaagacatattttgcatgcatgactctgtgatcaaatgcttcagatttgtcttggcaatatgttgcctgaaacttacttttgcttgaaatgtatttcaaaatgaataccttccttctttctctgaatagaaatctcatgtaaattagctcatgcctttattatgccaaaccatctggttgaatcaattaaaagaattaatggggagaacatttaagtgaatcagttgttcgtttatctattcataccatcaggattctttcgctggcaaatgataggagtccactctaagccagcttctgtgactctattagaagggagtagaagatttcatatgaacaaactatgggaagggcagggctacagcaagtctcagagagactgggggccagttgtggaacataaccaggactctagtcatctcctggactctggtctaggactctcaccacttctcttctctgtttctttctccatgttggcttcattctttggactacagatgactctatcagtttctgcacatggtgggaaacatggttaccagcagctctcaagcccatatctgattttacctctggaagctcccactactgtaaagggattaatttgaatgaatgttcattaatcctaatccaaagaaagtcttgttggcctagcttggtttaggcacttgttcttaaaccaatctactctggcaaggaccagggttaccttcagacatacctattgaacctactcctatgtatggacactatactccacccaaaaagaggataattgtgactgaaacggacaactcaagatgtgactcttaaaaagctgcaagatatctattgagcacttactgtgtacacagcagcatgctaaactgtatttggtatctcatatttaaaaatgtaactgatgactaaatgcctgtgtaaatgtctcttacacaaaagagaggtgtctatgaaactatgaatttcaaatgttatttcaagggcagtagaggaaactgatattttagaaatccaggatatagaaatcctcttgcaaaatgaagagcttatataatgccagtaattgccctctgatttatctgatttgtccatgatgaaaataatacagtaattgtagaaaatatatcatttgtttatttttactaaaagtgtatttatttttactaaaagttcattcatccaacaagcatttattgagcacacgctatgtgccagacagtgatggttgctagataaggggaagtgatgaggatacttcaagaagctttgtcttttatcaaggaagacagagagttcattatattaataacaccatgtgattagggcagctgaaggccccacagcgtgttaggctacattttacatcctacagacaggaaaatccatttgttaacttttccagatgtcataagaataccaaggaaggacactgaattcggcctgggatacaaacattggatcaggaaacactcctaagagaaggtcagccttcagcttagtcatcgcggttgcagaatagtcagcagactgatggagaggggaagttttcttagaagaaggaaccacgtacgcctaagcagaggcacgcgcaggcatagcatcttctaaggacccgaatgccaggagagatgcaggtctatatagatccaaagtgctttttgt

SEQ ID NO: 39315 - DNA, 2300 bp, Homo sapien
ggattacaggcatgcaccaccacatctggctaatttttgtatttttagtagagatgggtttcaccatgttggccaagctggtctcgaactcctgacctcaggtgatccacctgccttagcctcccaaagtgctgggattataggtgtgagccagccaccgtgccgaccatttgggaaacaggtttttaaaaagcagagtaggctggcccgagttccaaagcaccgtgctaggaaccatctagagttaaagttccttctgtcactcatatttaggctaatggttttaattaggtccttgaatgaggtaaatgtcttacatgattatttatggattcctgcatttagccttgtcctttgaacataagaagtgctaaaagagaacttgttgaattgaatagaaagcagttttcaaggaaaccttcataggcagcagagcttaaagagtagcaacatttctgtttcagttagtaagcctagttctgtagaagaatggctcatgcctgtattgtcttatttttgtgcctaatgggtatatttaaggacttgtatatcttggcattgctgtataatactaataccaatggagaatggagtcatttctggtaagtagcagtatattaatatgtaataatacaattacatacctctcaccagcttcaggtaaatgcctttggtcaagatgaaaatacagaggccgggtgtggtggctcacgcctgtaatcccagcactttgggaggccgaggcaggtggatcgcaaggtcaggaggtggagaccatcctggctaacacagtgaaacgctgtctctactgaaaaaaaacaaaaaaattagccgggcctggtggcgggcacctgtagtcccagctcctcgggaggctgaggcaggagaatggcacgaacccgggaggcggagcttgcagtgagccaagatggcaccactgcactccagcctgggcgacagagcgagactctgtctcaaaaaaaaaaaaaaaagatgaaaacacagaatacgaaggcaggtgaatattggtattataggaaatctggaagcttcaggagagcaaagataactgctcactttgttcttcttccagcgattgagcagagctgaatggaagacaagctcaagaaaacctgaacattttaaatgactagttttcagagtgcctcaagatgaatgtcaggaggaagtttttaactttgtaaatttgttcctaacaatcactgttgaatgtggggaatcttccccaactgtttcacagatcactaaagagactctattgaattccacaaacattttttgagtgcctaatatattcaaaacactgggttaagagctgtagagaatagtagactacggcagtgtttttcagtcttttgttcattatgcctcctccagaatactttttagacgttgttttcttaatccctcccctgccatagatatagtgtgtactggttcaggtactgtatgtatatttgtactttattgttataaaaagagtaagatatctcccccatcccaagaaccaattttgccccgttgctgggcaccatttaaagtaatgttcctatcatcaacactgggtccatttttcgtttgacagcagtcttggtgattcctggtcaggagggatatataaacattccaggagacctgagcatatttctgtccctgggctttgctacctaagctgactgggatcctgattaaagacctttctggtgaagcaaagatcccaataagaacatatgaccaatttcctgcagtttactaggaaagctgtatcgtagttctgggaacaagtgtgtcgtcacagtaattctcactcatggcctgatacacgcaaggaagagttaaataagaaagcttgacattcttctctgtgagatcaatgctaagtatatgtgatccaaaggctatgaacattgagataaaggacagtgggtaattgaaatccatccacgctgttattctggccctctaattagaatgcattttagtgttctgtatctcagtttttgtgccttcaccccctcttttattattcactatacaggaagcatccaggatgtgggaacattgtgacatttgcacaatttttatttattgctgtggaaggcttcctctttgaagctgatttgggaaggaagccaccagctatcccaataaggtatggtacattagagtctcttttagcttttggattttttaagaaagtaaagaggtggtacctgtataaaaggaggatgagacattcttttataagatttatttcaaagataccagtagaataataa

SEQ ID NO: 39316 - DNA, 2300 bp, Homo sapien
gaaagataagttagtttctttgagcatgattttggtctgagaacaggtttgctagcaagagttctctgagcaaatgagaggggaggatagagaggtcttcagagttaatgattttacaggcttctgctctccaagtgcagtcaacaggtcagtagcaccagcatcacctgggagctacttagaaatgcagaatctcaggccatgctgcaggcctagtgaatcagaatctgcattttaacaagatccccaagtgattaacatgcacattaaattaatactcactgcagtaggtgaagacagaaatgtggaggaaggaagaaagatacagaactcttgcaaatattacagtactcaggccatttttttcttgtgcaatcacttagacatgcttgggtttttatctgagatgtaatgagaaatgtttagaacatcctttaagggcttccaaattagtggcatatatggaaaatgaaggtctgtgtgaagagaaatcacctctaatgaaatccagatgaaaatccagaccagcttcctgttggcaggattattgatagtggaggtggagatattatcattgcttcagcctcactcccagatagtccactttacttggtctgaggtagaactggtactattatatacctgtatatataccagttatatatatatatatatgtgtgtgtgtatatatgtgtatatgaatataactggtatatatacgtgtatatatgtatatataattcattgtttaatgtgccagcactgtgcaaactcaagacgggtgctcattaaatactgaatttcacaggtagtaggctttctatttatgttagttcttcttcctactcacctttttaaggcagcagttctcaaattctagaatgcattagaattagaacgtggagtgcttgttaaaaatacaagtttctagaacccatacacaaggattttgacttggtaggtctaaagcgagacccaataatctgcactcgataacgagtacttcagatgattccaatgtgatctcccagtcacggactgggaaaaaagcattccaaactattttgtagatctcgagaaagacttcagaatgttcgtgtctcacaggaaatagcaaaaacaatatagcattccaaaatcctacctagctttgtaccgtgtactttgctattgctgttggattcaattacaacggaaatatttgatgtggtaaaatactgagcagtgatgctaaccttttatagtagacactgggaagcagaaaggaagtgtaaacacgtttcccttaaaaactagtcttgctgggtggataaagtgtgcatacctattttacaaataaagaatagtgccgcactagcttatgtacgtaatatgtgcttaacaaacatttgttcattgagtaagtaagagtcaagtcgaatggctcagattgtaagtgctatgagaattccactgtaagaagagggaagtatgccttcttttcaccattaaagatctgattgctgatattggcatttttgccagtagaagagcctggacgttggcagttttcaaagcccccaggtgatttgactgcgcagctaagtttgagaaccacggaggtaaaggaagggagtaccttaaagagctaggattagggataatatcaatagatcacctttaaggctgcacctcagcctaattaaatcagaatcgctgggggtgggacttggctatcagtcatctttaaagctctccaagtgattccaatgtacagacgtggttgagagccattgctttacttgaattctcagtggttcttaatcctggcagcataatagagtcaccaaagatacatatatatatatcagttcaggaagcagagttgtttcagatgctagaacacctccaacgagcagtcacagctctgtagttctagtgccgccgctgccagcaagtttgttgtgaccctggcggccgagttactttcagcgctctgggcggtctcgcaagaaacactgacgctttgggacttcatttcccagcaagacccgcggccgcctatcgcgcgagtcatgccgggcacctcgtccccctgtcctctctggcggagctgcctggcggaagcgggaacgtcgcatcctgaggtaaaggtgcacggcatcctgggacatgtagtctggccggggctcggacgccccctcggatgaatgggaccgaagctgactgcgaactacagcttcttggcagcgtcggtgttggccgcgggagaaggggagaccgcggcggcccccagtgagagcggctttccaggacggtgc

SEQ ID NO: 39317 - DNA, 2300 bp, Homo sapien
ggaggctgggagggagggaggcaggcaggcaccactgggtgagacccacaagaggctgacacacactcccagagccgaagggctcttagcttcagatgatcacagaatgtgcagaaagagagtctgctacaggctctgtggttatgatcacagaaaaatgtgcaaaagctatacagtaagatgcaaaaataaaataattaggttagcattttgagattagtcatttattttttctttcctaattccttaaaaaatgaaatacgaaacaaacgatgcatctctggtgggatatgcctttccctcagtggccactgttttgccattttatcttgtgtacttagaacatctacctgcacgtaagaagaaaaacgtctcctctcctaaacaatgagctccacttccctcttcagggatcactctcatccctgtctcatatgtgacaggtggcaggcactatggccacagtctttgggcagtggaattgggcaaaatcagctgctcacctaagctggggcctgcccaagagccccaggcccatggctgtgctgcgctcggcacagatcttggataaagacagagcatccctggcagagccactttgctcagtgagaacagaggctcttgggccatcaggactcccctgagctgctctcctttgggcgtgccccccccctcccccacacccccgccaccaatgctgcaagggcaggcagggagggaggtggcgccaagtagcctgagctgctccagctgccacactgagcgcttcgccagagtcctgacacaggtctaggctctgcccatcatcacacgaactccttgcagagctggtgaatggactaaatggcccagagggtcctttgcagtccctggacttatcagcacagcaacatttctcgatcacttactaaggtattaagcaccatgtgaagtgctctgatgcatcacttaatcttcgtaacaaccctcaaaatggatattattttatagatagggaagctgaggcatcgagcagttaagcgacttgcccagggttatgcagctggtagctgacagagctccagtgcagggcaggtccaggcagtgaagctcaagagcgagattctccccgggtaacctctcggtgtggctgaagggcctgagcaaaggtgtaggtgtatgcgtgcacagcacggggccctggaggcccaaggcctgcccctgcacacggctccactggtgaggtgtcagtctcagtcttggcttgctcgccacagctccctggcctcagaagagaggatggtggtgatcccacagatgacactccagagacaggatgagaggcctcccccatcccccactccatggaggagggccaggcctgaccagccaagatcttaccttaaagttctcagcaatgcgttctggtgtcacagacttggggatcaccaccaagttcctctgcatggggaaccggatcaggacctgtgagcccaaggagacagtgagtgtgtatacatgccaggcactcgcacccatcatctcagtctctcacacacacaacctgcagaaggacgtgctagaactccacaggtgatcagagaggggctccaagatgtcaggtcacagctagcaacaggtaggcgacgcattcaggtccagatctgactccagagtcctgcgctagccactgtgccacacgcttcagtgtctcaggcatatcatgagaccacatgaggccctccactggctagaaatgcacactaccactcaggagaaagaacattccctgcacggctaagagctcttacatttgtacagatgaggttccacatgaatgaacaagcgctggccctcgtggcagtcacccttgcagtagtgggggcaggcactattaatctaagagcccatgccagagtcttctaaaaccccgatctgtgccctttccactctgtacttgaggacccctaaccatacttcctgtgagggtgtaacaggctcagtcacttcctcctcttggctaacaggactgtcaggaatgcaggcagttgtggacggtcagcaacacctgaagtggctgtacctgggctgtagttttattgtgcttggctgcgatcgccttgatcctgggatcctccaggagagaagggtcctcgggcttggccctgaggatagaaagacagtccaggtcacaccatcatggccaccactcacagcagccagaaaccccaaccctaatcctcccatcgacctcagagggcagccaccagtctcctcctcagagctgggttaagaacccccaaccctttggaaaaagagta

SEQ ID NO: 39318 - DNA, 2300 bp, Homo sapien
cctgtgtacctcatttgtcttaccttggtcccagcccagccctatacctagtgtgtgtgtgtgtgtgtgtgtgtgtgtgtgtgtgtgtgtgtgtgtgtgttttccttttaaattatttccttaggaaaaattcccatgatgggagattactggttcagagcatgttaagattccaattactagagtgtttctcaggaggattccattgaaggtttttttccctttttcaaacaaaattttgatatgtatacttatcaaaagatgggagatcaaaaatcttgagatcaaaaattttggtatgtgtacattttacaaagattacagaggcaatgggggatgttagggggctatcacaatagcatgtcccaactagagtgctattgttgctatagaaattccactgatacaacttttcatgtctgcatggcccagccaaaatattctgggtttatttatttattttacagacagggtcttgctatgttgtccaggctggtctctaactcctgggctcaagcagtcatcccacctcagcctcctgagaagctgagactacaggtatcactccagctttagacacagttataacttcatgcaatcaagctgtatactcaattattatcaaaccaacaacaaagcctctgatattgagtccatgtccctaacagacgacccttctgtgtgtaccaacctggccactcaaggtgtatcattttcacaagagattagctctttggatttggacccaggaggttcaattggcagagcaacctccaagtcaagaggactctcatggaggaaggaacttgctgttttacacaaagcaagttcccagctttaggctcaagttcaaattctattacttggggacaaatgaatttgcccaatagcaacaatttttacaaaagttacatggaaaaatatctgggctagtctgttctgtataaatttttccaggagggagcacttttaaagaaagcaccaaatggaaaatcaccggcatggagtttagagagacctggtgcttgagtcactaccaggcagatggagttcccaatcttgcataattaggggaaagatcggagggtgatggagcagaaagagcagttggggtgaggtagagtatcatgaagagaggttgttggaaagaaaccaaaattgtcttcaaggatcttcaagtgacttttcttaggctatcttggaaaaatgtgtgtttctacctgccaattagggtgatcaatttactattttgtaccttctaatttgaaatactggaagctacaatattagagtcaactttttcttctgtggttttctgtctgttcacttttcttcctctagagagttttgataagttactgtactggaacttactgctttgatagagtctcactttccaaagactgatgaaatttgtcttactgattctgaatggacagccttactttccaaattcttctgagagttctggatcaagcccatcaaggctttctaacctcaagaacatcaaaggatgctggcttttggtggaaggcttgctgaaccacacctagtatgcacagacacagctaacacctagagtggggtgcaaagagagatctagaaggctacaaaaagtctgggcaaacccatattttgtgaaggtgctttgcaaaaggattgcaagccatttttctggcatgcacctttgtctaagaacaaagtgcggtaaactatatgtgtagtcagtatgattcacatagattaaggacaaggtattcgtcagattcccaaagagcatcaaactggggttggacaacaaaggcattcttctgggctcttaatgaaaccaaaacttatttctagtctatgtatttatgggatgcctgttattttcgctaaagcattcgctttcccaccagatacagcagctgaggaactcctttctgccacgcggggcgcgggcgagcgttgggggcggaaagaatccgctgccactaggaccaggcggaagaagcatccccgccgacccttggggaaggccgccgcggcacccccagcgcaaccaatcagaaggctccttcgcgcagcggcgcgccaaccgcaggcgccctttctgccgacctcacgggctatttaaaggtacgcgccgcggccaaggccgcaccgtactgggcgggggtctggggagcgcagcagccatggcaagccgtctcctgctcaacaacggcgccaagatgcccatcctggggttgggtacctggaaggtaggtgctcgtgggggcgcgggcccggggctcgcctcacactctccgcgcggc

SEQ ID NO: 39319 - DNA, 2300 bp, Homo sapien
agctaatcaatataccttcttaatctcaattatctaaaaaagatatcccttctcactgattcatagctaagtggttctggaaggaatgttattatgaacaatacacatttctttattctgtgcatcacatgaaaatggtcagaatcaaaatggagtcactaatgttaaaaaacaaacagaagactctgacaaatacagctgggaagaccatgaaaagagggttctaatggttgtacacctgaaaaccaaaagtaccatgaaagacggtgaaaaccacaaccttgagcaaaggccattgcaactgaacacaaaacatactctgcaaggacctctgaacaactgcgtgtccaacctcagactaacaccactttcatgattgatctttggagccaaggctaattatttcaaagcaattagataatcctcattttttccttgaaaagttttgtcttcctttatttccccaaatatacacatagtttactgtggcatgcatattcccattgcagtgctctattcccagagaaatatttttcttgtagggaccctctctctgttatttaggttgacagtcactaaggatttactatttcaacaatactagcactgcatgtcatccagtatacactgggaaaataaagtgccgcaagtgcatatccaggagactttgtggccaccagattatgaggaatgcatgtatttaattatttatttttgggacagagtctgtctctgtcgcccaggctatagtgcagtggcaccatcttggctcactgcattctccacctcccaggttcaagggattctcaggcctcccaagcagcggggactataggtacgtgccatcatgcctcgctaatttttggatttttagcagagacagggtttcaccatgttggccaggctggtctcaaacccctaagctcaagtgatctacctgcctcggcctcccaaagtgctgggattacaggtgtgagacaccatgcccggcccatgcattattattaatgttgaagtagataatttaacaaacatcaatgaagtataagatttttcactcatagttgcaaaatatcatgccaattgccttctatgagctgtcataagccacagcctagagattcaattccatttcaagattcaaccaaagccaactcatcaacaagaacatgtaaaagacagaaaaacccactaccggcaggctgaaacagatgctgtgacgtggccctggcctgtcatggcgtgtcacagcatggcacaggcctatatcatgttccctagattgctgactaccaactagttacagctgactccaatcaggtcgggatttgaccatctctgcactgaacctgcaattgcaacttttaaaattgaaacgctgcttctcacctctcctccctagactctatttcacagaggaaaccatcacagggaaagcaagcccttgttttttcttccttctttgctttgctttctttctctccttccttctttctttccttcctccctccctccctccctccctccttccttccttccttccttccttccttctttcctttcttccttcctgccttcccttctttctttcttttttttgagacagggtctcactgtctgtcgcccaggctggagtgcagtggcatgatctaggctcattgcaacctccgcctcccaggttcaagtgattctcctttctcagcctcccaagtagctgggattgcagatacgtgcccccacgcccggctaatttttgtatttttagtagaggcagggtttcactatgttggccagacttctttccctccctcctccaactcttcttttcttccttgctgtctccctccctaccttccaacttttggctgtgttgaatttgttgactcatcctgaacaagcagaaactccaatgatactgtcacctaagagagaactttgcacaaggttgccatgtttaataattcattcacagaatcctcaatctcacaaaagcctggaatggatttcctgtttggttatggcagggaagctactgtggccaggctccaactcctcccactgtagatagcagcagccttcttaagcagcctgtggccgggcacagtagctcacacctgtaatcccagcactttggaaggccgaggtgggcggatcacctgagctcaggagtttgagaccagcctgtctctactaacaatataaaaattagctgggagtcacggtgggcgcctgtaatcccagctactcgggaggctgaggcaggagaattgcttgaacccaggagacagaggttgtagtga

SEQ ID NO: 39320 - DNA, 2300 bp, Homo sapien
tggcctcatgctgccatctgtcaactagagtcaggaacagacagagtagacaaagaggaagggggagggtagaaatccaaacaggttgggttggagcctttccccaaagcctcagtaagcctccaggaagggggagggtagaaatctcacaggaggggttgggcctcctccccataatccctaagatggggaacgtttcaagtaagacaggaaaactaaagagtctagagagtgatgaatttccttctgatagccccttggggcttatgctaaagtattgaaaaaataataagagaaccaagtataaacaaaaacagcagatgatagaatattgttgttttatttaagttcgagaacccatccttaagccctcacttttctggccaaaatttaagtctaatgaagagcgaatttgtcagctgttaatcaaatatgttaacagtaagagccctgtgtcccaggaaaaatcgattacgccctctgctggcggcagggaccagttctcctttaccctttagactctggagggagaaaatcagaaaccaacctttctaaaaaggaaagagttcccatgcctagacaacccatacctaccaagacatgggatcctctaaatcaccttccttccttcagcgcccccaatcctgcccctttggttcccctctcaggtccctccggctgtggtttcaggttactccccagctgtttcaggccacgccccagcctgtgctgtcccttcagctgaggtttcaagttactccccagccgcttcaggccacaacccaccaagttaaaactatattaaatcaaaacgcaaggagggagattaccaactcaaaaattttaaaatatgaggctatctttctgggaaaaaggtgatttaatattaagtactaataattcactttattcagcaggctctttaacgggggatccaaacgtaaaacgagagagcacgcgtgtttaaatcgaattaattaccatacgaaagttcaaccagacttaggaaaaactcccttcaagacagggtggcacttattcatagatggaacctcccaggtgattaaaagaaagagacataataggtattcagtgattaatggaaagactgttaaaaaagtaaaatcaggaagggggtctaataattggtctgtccaagggtgtgaactgtttgcactcagccaagctttaggacatttacaaaaccaagaaaatctatctatactgactctaagtatccctctggggaggcacacacatttgggaaaatttggatggagagggctcttatcaatagtagaggccaagatttagttcatagagaactgatgctcgtgtcctcaacaatctccaattgccagaagagatagctattgtacatgtcccagggcaccaaaacgactcgcctttcacaagtccaggaaataatcttgcagatcaaattgtgataccctatcttgttttatcctgattgactctttcttagctgagagagtcaatagcttgggagactcaattgagagtcaatatcgagagagtcaatagctgagagagtcttagcttggtttcttcgcttgcagccccttgtccccctccttaaggacataactggtgcaagctgactccaagcacatccaagaatgcgcttattgataagatactgaggcaagctgtaccagcagctcctgggagcacacttggttggtggtatccaaagcccctgcttttatcactttgggatactttaagcccctgcacctggaactgtttattttcctgtaactgtttctgtaaccatttatcttttaattttttcctgttctgcttctgtaaaaaattgcttcagctagactccccctcccctctttaggccaaggtataaaaagaactctagcctcttcttccggaccgagagaatttcaagctctagctctttctcagtcgccagcaataaaggactcctgaattagtctcagagtgtggcattctctctatgacttgctcggttacgacatttggaagccccagagagattcgccaccgggtgaagacctgactcattccgggcttccccagacagacagctggcttacagggccacctgaagacgttccagggctccacaggccactgtcttctggaggggaacggatcgactgccggtgcgcccagccaaattcaactcctgagtcctcagtctctagtcccgggaaggtaagtcagatctgactctgtctctctgggagggaaacggccctgacgaaggtcctccctcagactctgtccatgctccaggacac

SEQ ID NO: 39321 - DNA, 2300 bp, Homo sapien
gtccagctggctacacctctcaccaccacacctacctaatttctgtatttttagtagagagggagtatcaccatgttggccaggcttctttcttaatcttttcttttctttctttccttccttcctttcttccttccttcctttctctttctttctttctttctttctttctttctttctttctttctttctttctttctttccttctttcttccttccttctttccttccttccttgctcccttccttcctttactctctttctgtctttttctgtctgttttctctattccttactcttccctcattccttccctccctcccccaactcttctttccttcctttctctctccctccctactttccaactttgggctgtgttgaatttgttgactcatcgtgaacaaacagaaactccaatgatactgttacccaagagaactttgcaaaaggttgtcatgtttaataattcattcacagaatcctcaatctcacaaaagcctggaatggattttctgtttggacagggcagggaagctactgtggccaggctccagctcttcccactgcagctagcacaagccttctaaagcaggatgtggccaggcacagctcatgcctgtaatcccagcactttggcaggccgaggtgggtggatcacctgaggtcaggagtttgaaaccagtctgtctctactaaaaatacaaaagttagatgggagtgatggtgggtgcctgtaatcgcagctattcaggatgctgaggcaggagaattgcttgaacctgggagacagaggttgcagtgagccaagatcacaccactgcactccagcctgggcatcagagcaagactccgtctcaaaaacaaacaaacaaaaagcagtgagaggtgaagccacctggacttcctgggttgagtggagacttggagaacttttctctttagctagcagattgtaaagtcaccaatcagtgctctgtgtctggctaaaggattgttaatgcaccaatcagcactctgtaaaaatgtaccaatctttcatcccatctcatcccatctttcagtcacttcacaaatggttcctagtagatacaaaacagttttttctccaatgggaaaacagaaaacagccactcagtttgctcccaacacccgtttctagccgcttaccacagctaccttggcaagtactctaggagtatgggaaaatgaaaacgacaaactcacacacctttttaacatacacaaccagttctgactacctagccaaggcagattcttcttctgtggaatgtcaacctatatctgcctcccgaccaactggacaggcacctgcaaccttagtcttcctatgtcccaacattaacattgccccaggaaatcagaccctatcagtgcccctcaaaactcaagtccgtcagcacagagccatacagctaatacccctgcttatagggttaggaatggctactgctatgggaaccggaatagccagtttatctacttcattatcctactatcacacactctcaaaggatttctcagacagtttgcaagaaataacaaaatctatccttactctacagttctaaatagactctttgacagcagtgactctccaaaaccactgaggcctaggcctcctcactgctgagaaaggagggctctgcatctttttaggggaagagtattgtttttacactaaccagtcagggataatacgagatgctgcccggcgtttacaggaaaaggcttctgaaatcaggcaatgcctttctaattcttacaccaacctctggagttgggcgacatggcttctcccctttctaggtcccatgaaagccatcttgctattactcacctttgggccctgtatttttaacctccttgtcaaatttgtttcctctaggatcgaggccatcaagctacagatggtcttacaaatggaaccccaagtgaactcaactaacaacttccaccaaggacccctggaccaacccgttggccctttgactggcctaaagagttcccttctgaaggacactacaagtgcagggccccttcttcgcccctatccagcagtaagtggctagagaggtcatcacccaattcccaacagcagttgtggtgtcctgtttagatgggggattgagaggtgaagccagctggacttcctgggtcaagtggggacttggagaacttttctgtctagctagaggattgtaaatgcaccaatcagtgctctgtgtctagctaaaggattgtaaatgcaccaatcagcactctgtaaaaacgcagc

SEQ ID NO: 39322 - DNA, 2300 bp, Homo sapien
aaaaaatacattgcttttggggtgaggaggagaaggcagcaggaagaggaagcatcttcccagaattatatgaattagcaaccttgggtcctagcccaggatttgtccccaaccaagtaattctgagcacatcacttaagcttcagtttctttatctgtacaacaaggagctagagtttaatttccaaagccctgtcaagtactaagtttgtacaagtctaatattctttggagttcatctttgccttaaatggatttatgatcatctttgtgaaccacgacctcgttatttaaaaattcataagagagacagctcatcgaatagaccaggacacagggttcaggatatgatactgtaacataattaagtatggagaacaatcttgccatagggcaaaagtaactcctgaaattctgttagcctctgtgcacatttgtcttacaaacatgcttgctcctgatgaaaatctgctttttaattccttctagacagaatcactgatataagcttccatcttatatcaaaatgactcattcataagccacatactcttgcgaatgattctaaaaggcaagtgatgtttgatattaaggttttatgtgacaagctagcattccatgggtgtccataacaacagtaaacttaaatccaatgagtaggcgcccttaagtccagactaagtagccctaaatgccaaatgccacaagactgtcacttggtaatgactgtcattagcctccggagtatggatggtgggcactctgaataggagctttattacactgtagaagaaaagctttctccttactttgtcctcaactgatattgagaaaaaagcaagagggcaaatgtataagatttggaagctgccccttccagctgttctggcctgaactctagttaatcttgtgcaagttaaattctaactatcactaggtgagacctatcacctgctgggacctgtcaagcctcggattagtgccgtcccggaagtaaagttctgttgatatcccaggaggaactgtcatgctctaacatggataaatgagatacagaactggctacgattaggtcttaatgagttcaataaagagtgtgtcacagaatttcaaatgtggaaagattatcttttcaactgtatgtataatttattctgaggacttgcttgcgtgtcacaaacctaatgcatttgttaggaggatgaaacaggaaaaactcacaggaggacacgaaacactacttaggatagcttctaagaagggaatctcccataacattccttatctttcccgcccacccaagagttctgacacatatgcttcaaaacctcgtgtggtagttcaagcctgcttagaagcttttaaggcctcgtgccaggtttccggtgttttcatagatttctcttgttcagttattgtcgcctccaaatttgtcattctctcattccactctagcctcccttcctctgtgcaataagcttttagggcattccattaatcacttttcttccccacctaaaatactgtcagcaaactgcctaggggaatccctataaaagcggtaagagaaagtaaggttgcgttactgcctataaattgggcactttaaaggcatttgttttaatcacgacttaagactttcaaccacgagtaatttgtgcgaaaggagcttcttctgggaggatacctcggcttcgtcttcaggtttcaatccctaaatttcccataagtaaaagaaacatcacctcctctcttccaagagtccgctgacacctgtcttcacccgcaggtgtttcttttaagacgttaaacgctttctagaacctcaaacagctaagatgctccccgcacccgaggttttgcaccagcgacgctctagggtgtgtttttctacttccctaggcccaagcctgcccgctggcgtcgaagccaactccttactggttcaggtatgtgctcgtctctagagtaaaccaatcagagccccacttcttactcctgggatttggtaaacggaagagacctctcctgttccgggagtaggccgggaccgtggatgagtgacagttcgactttccaataggcagagccctaggacctgcccacgtctggttcaggggctagaaaagagcgtcgatgccggcggcagtgatgagtcctaggaggcgctggctctttggcggctcggaggagcggctgctgctgctgctgctgctgctggtggcccctttgcaggtgagtggctttgttttagaaaatgttgcgaacgtttacattttttagtgatgtgatgttttatt

SEQ ID NO: 39323 - DNA, 2300 bp, Homo sapien
ttgtgtggtcactcatctactataccctatatatgagatatccagaatttatctatggaaacatactattttttttatcaaaagacataacccaaaaatatttagccatttatcttctaaaaaccaggcaaaatgcaggtccctgccgtgtttcctgttgataatattttccccatttgtagcacaacttttctttcctctggaaagctggtatttattttattcatagattgcaaaattataccctgatgctgttccaccaaagggcattatttatacaagcagggagagtgtggtttaggatataagcagcagcggtaatggaaaatagcactttcaaacaggcctcactgagttatggagaataccacctggagatcatgcacccggaacgtctctggacacaggtcatatctttgcacagacatcaccaattgcagctgttttctgaactcctgatgtctgccctacaatatgttcaagcccagcagtttaccagactatgtagtattattctatctttccttcctgtcagatatgggatgtccccatcagcaaaactggccgtgttccgaaaatttatttctaaatcatttatctgggatcagaagacattttcccacaggaacaattttataaacagtggtgttccacaaatgcctgcttgtgccacagtgtacctgaaatgcaacattgactgtatgattcccaccaaccattatttattcttttctctgggaaagtgcattcctcttgggatgcctgaggctcatctctccctctgcctgggagcctcagctatagttttttgggctgtgcagcagtagcagtcaggaagaggggagggaagcaaccttcccaaaaaagagatgagtgtagagagttgatatggatgcctctgggtaacttgttaatgctggaaggctgaagaaggaaaccaacagtgcgaactggctacttcccaactgttctaaaagaggcacaaagggcagggacattttcgtaaacagagatcatttctaagtcacatcttcataaacagggaaaggcatatagtaaaacctcccatttttaaagaccagtatctggacttgtaattagccaggaaaaatattgtgaaacttcttggtcagtgatgaaacagtctcaaacatataacaatgagacatagatcttgcacctatccccaggcctgacaaatagtaagtgctccaaaaaaaggggatttcaattttaattaagtactaattgagtgaattctgtattgaaaaggacaagactatgtgtgggccagttaccttaattctcattagcatctactaattctgaccctcttatagcacacatcctaaccatgaagagttggtcggagcactttcaagacgtcacctgaacattatgtcacctctgcgggatatatgcatctgtctaccccagcccaaagcaggtggtgggtctcttcataccctctctgatgtgcatcaatttctaggaatttctagtactatctccacatcaccaaatctgaggaaacaaaagagataaggagaggaaagtgaagccagtgaggatatccaagcctgtaggaccttaggtttattctggccagtattacctgctaaaaaagacctacgcttttggtttccctttggtcacttatttttataacacatgcagacgtattttggggaggtgtgcctctttcaggctagaatttagtctgctcagcagacccgggtcctgtctccttcaggttttagaattgcataacaatttaaactcattttgtatgtgcaagtactttgaaaagaaatatactattaagactccctctggtaagaagccttccccacccccacgcccaataaactgatctgttaactttttgtttcagagactgtgctttctttttattgctgcatttgtgttctacaagacagcctctttctccaagattaacatttcttatgattgttcctgacaatggattcacttccagaggccctgctaaggataaccaaaaaagggcatggagcaggctggttttggcagcgtgcacgcagtttcagagctttttaggtcttgggttttctgatgagtgatttcctgagcatgcctagggaatgacaggcatctccacaggcaggctgcatccaccttggctggggtgtcgtcattggctgcctattagaaaaacgacaggacaatgcataccaccgcctcccgactgtaaacataggggatatgtgttcacttagcatggacttctgggaggggccaaggaagggcggtctggagtt

SEQ ID NO: 39324 - DNA, 2300 bp, Homo sapien
agcaagcaaatacccaaatctctccaagtcttccagcttaaaaatctgactttggtctagctgcgattccgaattctttttggatcagtgaatttttatttttctttccagccacatttaaaaatatactctgagccacatttgtctctattgcttttaaaccagtgagaaaatgctctcaagaaaactgccttggtgcagaggacctactcatacaccagccgcgatattggcttatttccatataacctaatatggttaagaaaatgtttgactggaacagagtgaggattgccaaacttaacaactttttagtaagaaaagtgccacagagtcctctgtttagacatagtgtgatttcagttcacatgcagtgcttatctgttcacatcaacgaaaccaaagttgtatttctatgcagtaacaaaagccagacacctgccccctttgcccagtcacaggcaagatgaataaatacaagctgctcagaaaggctcttggtgatagtctattgaatatgttgcccttgttgggttataaaaactaagtgacctggggatatccaattcagattctgtagacggtcctgagtttgtgttaaatccggtagctttaaacagaagaatgaatgaaaaaagtcatctctatctgaacctcagtccatcgtggaccctccatcaccttccccaaataacacctttgactgacatttctgtttattctgactctcagcactctgataaatttggaatatcatgtgatgtgatatggtcctcactctttcctgtgcctgggccattgccgttgtcatctggccaagtccagaaaggcttttaaagtcaggcagatctgggtttgaattctggattgtgccactttcttactggatgactttggcaaattgtttatttgctccattgaaaagtggagaatgcctaccttgcatggttgttgtgagagggaaatggggtaacgtgtataacagtatagaacctggtatggagaaaaagctcagcaaatggcaaaaaatgcccattttctgtttttactctcttcctaatcttactacattctggaaaatagtgctggattcattttcccaactaagaatgtagcaaatgaatacccattggctcctgacattgtcctggtccactgagatagggagatctgcctaagatttcagcctgggccaagttaaagaaaaactaatgtcaaaacttctattgcttcttagagttactaagggcataagcccagggtagataactattgtattttgtttacataaatatcctgaccttgctttgtggttgtaaaagttgaatggccctgtccactccaaaatcacatgggagagaattaaggcaaagagctaaagagttaatttttttctcaaattaaaatatttaattttgagctgtgatccagtgtgggctgcattttaatgcccttctatcaccataaaccattcatcaaagtctgttaaatgcagcagctttgtgggaatgaagaaaaaaagaacttttccatgctcagagttaagcaggtagaggttggactgaggaggtaaatgggtgactggaatttggagcaggaggtgacaaaaatataaggcatcccaccaccttatctctttcttggggattctcagaaatattgagatggaggccccaattattttatttggatctgaaatgaaagaataatccaggaacaatttgggcatatccaggtttcatacttaggaacaatgaaccaacaatacaaaaccaatattatcagtaaaatgtctgttatcatgatagtttagggaattcaggcaacagtgttcgtggtaaaagacctcaattttaagtcatggtgacactactaacttgctttgtgacctcaggcaagtcacaaactctgcaaattgggtctcctaaactgtaaaaagttgaagaatggactagaaaagctccggtgtgtgttgattaggtgggctggagtacttaggagatgcttcaggaagatgattggcacttaaagagttaagatttggataactagaaaggaggtgtgagaatatttcaaacatgacgaaggagcaacatcagcagaacagaaatacatcagttgtggtcatgggcagctgtgctcgtgggtgagtacattcaaaagcctgcctgggagggtgggagaaagcaggaatgttgaccgggtccttggatatcagttttgtactttattctttggagcagacaatagaataataaaattatccttatatagagaatttaaaaatgctagttttgttc

SEQ ID NO: 39325 - DNA, 2300 bp, Homo sapien
ggaccccctctccatcttcaaagccatcaccagtctgtctgcccaccctgacagataagctcctctaaccacagctggaaaggggtctctgattttaaagagccatgtgattcattccagcacacctggataatccaggatgctctccccatctctatgcctttaatttcatcatatcgacaaggtcccttttgccacgcaaattaacatgttctcaggttctggagatttgcgggaaacgttattccacctaccatagaaaaccaccgacttttgtaagtaattgaagggaaaaaattaattgggcaaaattcggtagaaagagaagcagcagaatgcctcgatacatgtttctgtctcagttctagagcgagaaactcaggacaagtcagtgtatatttaagtcctcttgtgtgaaggcagatgtatctctacttttatgggtgtcttatgtgctactttcatcaatatatgttcggtgatcatatgtgtaatcagagatatttaaatgcatatatacataatgatatatagagataattaactttaagtttattaaactgtatttactctataaactatgacttcattttttgttttgttttgttttttgttttttgagatggagtctcactctgtcgctcaggttggagtgcagtggcgccatctcagctcactgcaacctccgcctcctgggttcaagcaattctcctgccgcagcctcccaagtagctgggactacaggcacctgccaccaagcccgggtaatttttgtatttttagtagagacggggtttcaccatgttggccaggctggtctcaaactcctgaccttgatccacctgcctcagcctccccgagtgctgggattacaggcatgagccacctcgcctggcctataaactacgactctgatgaccgcatagtatttaagcaagaaaacaaccaaaatgttctagctaaagtggagaccacttaacctaacccaattaaactttaagttgaacacaagagtagtagatgcagttcagctccatgacattgggtgagttgtctaaatgctctgtgctttggtgtccttgtctgcgtgtgacatgaagccgcagatctcaaagatctctttcattccgtgaaagcgctctcaatgtgtgaagttgactgcttctcctgctgtttaccaagagaataatcttaactctacattgtggagatcggatttgttctcacttgacagaaagccagtcccacgagcagcttggtacccaaataccagtctgtttagtgctcattagagatgaagaaccatattcataagtcaagctgagacggagtgtcatctccagacagaatcaacaccaccccctcctcaggaactgggatttggctgctttccaagccgctgctgaccaggttccattgcccagcttggctgatgagatcactggcagagtaccatgggtgcagacggggcctgctgtttcaacatgttctcaggagggctcttgcccacatttcttggagaggtgtgagcaccaaacatgctgaaccatccagcccatcactgagcagggccatctctcttcatcccttttcatttggtttgcatttttatgtcatgctccttccctggataaaagggataagaggagtttctcagatttgatttctcagtgggaactgtttgctttggaagccacctacaccaatgctaattgagaacagagctcagaatgggagcctgagaactgcacccggatgaactttttggtgggctgatttctgttgatcttgtcagaattaggttgtatatgcatgtaataccatgatcaactattttccaaaaggctgagcaaatgcatcagtgtctttttcctttgaccagttacttaccttggaaaaattatttgtagttaagcatataaagtcttcatcaggaaaactactggagatcctggccctgactacccagcaataacatttctggaactcccgaagcaatcagtgctctctgatcgctaaacatgatgggcttctattagagagattacagtaaaaaataacaatcagctctctgatgatcctgtgaggagggaacgggttgggaggagtagatttggctgaggacaagcccagactttcgtcacagggacagaccaacgtgttaacacaaagggagaacacgggagcatcctgcaccgtgcatttcagccacagatcacatggcccctccgcgggcccagcccacgccctgaccgcccggcctggccaggtctccgtatctctctgccccgccgcccctt

SEQ ID NO: 39326 - DNA, 2300 bp, Homo sapien
ctaaggtagaagagcagaaacgtaacaagcagctagaagagaaaaaacatgccatgcaagagacaaagataaaaggggaaaaggtagaacagaaaatagaagggaaatgggtaaatgaaaagaaagcacaagaagataaacttcagacagctgtcctaaagaaacaggtacagtaaacattttgcaccaaatgtgtgatgcctgtgacttgtgagaaatgtaatgcacatctgatttgggactgaggccacatgcatatagctcacatgcttgatcatttggcaagctgttcattttttcaggccatagcgatacacaagcatgcagcaattgattgatggctgaatattcaatcaaccaaatttactgggacagccagtaaatttggctgtccagaagacagagagaaattaattgctctgtgcttgattgttatgaatacccaaaaaaagaattaatccaaagatgataaatgtggtggtggtgtgttggcttctgattctgtgcttgcatctaaactcgttcttttaattatctttcctctatccataggtctgcatgaggcaagaggcccataactccttacctcactcatgggtttgacgttgaattaaaaaaatgataaaagctggggtgggaaagagacatgaagaataatggtcagacatttcatcttaagaaggcaaaaacaggctgggtacagtggctcacacctgtaatcccagcactttgggaggctgaggtgggtggatcacaaggtcaggagatcgagaccatcctggccaacatggtgaaaccccatctctactaaaaatacaaaattagctgggtgtaccggcacatgtctgtaatcccagctactcaggaggctgaggcaggagaatcacttgaacctgggaggcagaggttgcaatgagctgagattgtgccactgcactccactgggcaacagggagagactccatctcaacaacaaaaacaacaacaacaacaaaaaggcaaaaacaaacccctggaaattaactggtaataaagagggggaaaggaactggttggaaactttccttaaaaaaaaaagtcaaaaccctgatttgccaacatgtagacctcagcttaatgtagacttgcagaaagccattaatttagggtagtattgatttatatttgactggtaattaagagcatacatgctgcttctttattatctgggtgacacaaattcatgtggcctgaggaagggtggaaatagtaggggggaaatgtttgtaagctttgagaaagattttttttctgtctgcaagactgcattgaaagcactgtacctaatcaccaccacaccaccaccaccactcctaaaaaaagaaaaaaagagatgctttcacattcacctttccagagcaaattctctgtcactaagcctgcattgcactgaaggtatctttaactcctgcttctgtacaagaggctcatgaacacagctaaaattgagaccatgagcaaagtgcaccaaaccacacacgaggtttgtaaacacacgaggagtgccacatcatgctagatttcagtgagcgcaatggcaggcacacgagaagatgttggggtgggaagaaaatatcccaccttgctgtttagaaccactgtgctgtgagcgctgagacggcagaagagaagccatcccacgcagcacttgcaaggcgatccgagcaccctgtcactcttgtaaactagaaagggcttcttttacttgtgtgaccttaccattcttgaaaataaaaagggagaagagaagggaactaaagtgcaagctaaaagagaaaagctccaagaagacaagcctaccttcaaaaaagaagaggtaaatatgattgaaaagtaatgatcgtaaagcaacagaaaaagcagtcagtgttccaagatatctcaggtctgatgatctcaaaattgtaacctcatatccagtgtatttcaagccatgactcacagtccactgaatagtgagatcagcttagagtgtctcaaaattaattaaatgtatcagtcagcattttttaaaaaatgaaatggatagaagccatcagagggcattgtaggtagtaagtattgcattgtcaggtaaattgtctttttttctgtgggacgtcatcaaaaaggcttgaaaaacactgctggaatcaatttatcctgttttctattcttctgaatgctaattttttttccttgagccattctactttcatttcaatcatgaaatatttccaactggccttgattaatgctttaacttttcaaaggaaaaacac

SEQ ID NO: 39327 - DNA, 2300 bp, Homo sapien
tcctacagttcatccctctgctcaaatgccccctagccagagaggccttccctggccattccatctaaaagagtaacctagcaaggccccccactcccagcatcccctattcttttttttcccccctacttgatttctctccatagcggttattgtctgagtgatatcatttttattatcatcattggtttgtttgattactcccaccagaacataacctccacaataaatgtctggtttttttccttgcaatagtgaactgtccctagtaggcagcagccatccagtgaatttgttataccaaggcatgaggatctcttgggaccagtagtttgagtctgcagtgagctatgattgtgcctctacaccccaacctgggtgacagagctgtctttaaaaagaaaaaagttgttaataaaataatgaatgaatatcattttcaaagttttgccaagttcctaagtttttggccaggcacggtgactcacacctgtaatcccagtactttgggaggctgaggtagacggatcacttgacaccaggagtttgagaccacactggccaacatggtgacaccacgtctctactaaaaaatacaaaaattagtggtggcacgtgcctgtagtcccagctagtcaggatgcatgagaatcacctgaaccccaaaggcagaggttgcagtgagctgagattgcaccacagcactccagcctgggcgacagagcaagtgagattctgtctcaaaaaaaaaaaaaaaatcctaagtttttaaaattatgcattaagatcatttttcttcccatggactacttggtatgtgataatataactatttggactaaaaatcacgagacttaagtctctcagccctgccattaatttcttatataacctggttagaccatttctcagttttaccttgtacagctgacatcctatggcttgcagccatgactaaaatccaacagaaaaacagattacataaataaagatttctctgtgcatgtcacctttagtgatttatgtatggcataaaacaagcttcaactataagagctacttttcaagaggttgatctaagatatactctattaatattctctggccaaggtctaatctggaaggttcatacttttaaactgctgacctcaaaaacacctattttcagatacttacaaaatacaaagagattatgttaacccatttccatgcttaagccatagtgctttgccctttattctactttcaaacttgctaccatttattatctccatttctacaatatcacgaatctcatgacatataacgctttgtgaaaagtgtttatttacattcttatatcatcaaaatctagactttttttcagctgtacttggaaaacttttccaaatagattaccttaccctgtagagctaaagatgagggaaaaaatcaatatgggatgttcatgaataacgtctgttaactaaatgagactacatatagtgatttgcagtcatcaggaaaacagtgttaaatatgctagctgacgattgctataaagaatctctgagctgataattttgagaattcaccctagttcatctatgactctccatttagtatttaaggagaaaagcctcattttccagaatcgaataagcgaattaatcgcacaattgtgtagaatggaactcagtctgtaaaaaatcaagaccaacgtactttttaatattctaacatctccaagtagtagttacaagtattgtacccatgaagtccaggtaattaatttgttcaatgtcacactgttaaaagtcaggtgggctccaaagcacagtcctaaccagcatgctctactgcctcctctgaggcaacagccgaagtgcagaccactgggaataaatagctgcccggtcttccccactcctaaattctcccgacagaccccaaagcctctctgagagcctctctgaccgccctgcggcccaccccgagttcccggcatcctctgggatccctcttcctggagccaaaacctacgcaggctcctttcctccgagctggttgctaggtgatctccgaaggctgtccgaagtctcgcgagggcggacccgttgcctgatgacgagagttgggagtgtggctggggctgcggatctccagcagtggcgttacttctagcggctggataccgggttctccgcgagatcgcgagatcccgagatattctccccgcacggaagcgacgactggcctggccagaggactcgcgtgggagcgaggtgccggccccgacaggacggtgaggtatgcagaag

SEQ ID NO: 39328 - DNA, 2300 bp, Homo sapien
aaatactttgttgctaaataatgctaacaatcatctgaacctttgccttcacaacataaggcctaacatttggcttatctttgctttcacaatgccttcctcactaagcttaatcatttctagtttccaattttaaatgaaagacatgtgacacttcctttcacttaaacacttacaggccattgtagggacattaattggcctaatttcagtattattgtgtctcaggaatagggagacctaacgtgagagagaaatggaggaacgtccagttggtggagtggtcagaacacacggtcagaacaccaacacagagttggtggagcggtcagaactgaattatcaattaagttcaccgtcatatgggtgcggttcatggcaccccaaaacaatcacaatagtaacatcaaagatcaccataaccaacataataataatgaaaaagcttgaaatgttgcaaaagttaccaaaatgtgacacagagacatgaagtgagcaaaggctattgaaaaaatggtgccaatagacttgctcgatgcaaaaatgccacaaatcctcaatttgtaaaagatgcaggatccacaaagagagatgcacaataaaataaagtatacctgtgcatattccaatattgtaaacactgaatattgatttaaacaaaactataaccaatttggatagaggaggaagagaggaagcatacttctggaacatgcagtggggaagaagaaagctaaatcttcaccttttatggttgggagtcagtagattatgcctgaaactgaaaaatcaagaagtaccaatccaagcatgttatttagagaactgaggtaaatgcctaaagaatgagcacaggtgaaagtgcttgcctctgaagaggaagaaagggagagtgtgggactgccgattttcgtaagttttgaaaaactgactctttgaaaactaggtacatgataaccttgaataaatttcataaatataaatatgtttctatctcttctatatcacttcactcaccagtattgagttttcagagtaactactgtatattagtatctaaaagttaattttctgtcttaaaggcattaatatggatgctagactaaatatacagaaattccacttttcataataatagctaccattactatggtcccagtattgtactaagcacttatattatctccagtccccagagcaaccatgcaaagtaggtactgtttccattttacagataagaaattgatgctcaaagagattaaataatttgctagtatgtagcagaactctctgatctcaaagcctctgttcttccttcctcctggatcccatcacctctttctagagtttgcgtttaaaagaactaggggcagggggagggcaatgtagcagttcaaataactcctcctttggaggaagggcaaggaagcagaagagaaccgctgaaggattcagcaatagcactaggtagcagtctcatgtaaccaagtttaacccacagttgaaatttccagttggtcatgtgagcaacggaagcaatttttaaactctggccaggagccccaatgcttacaaaaataaaagctttgttcggctcttattttgaaataaaatagatgttccagctgctccaacatgggcctaaacactgcagtgagaatgctcaggacacaaagttttgtgtccagagaagcccagtcatcattacaaaattgatctctaaaaggggttgggggacagacggcatagctgcttcccaaggaaatgagtaggaggtgacctgggtcctgactgccacactggctgggagcttggaccagatgatcctgatgggtttcttctgaataaaattccgggttgtgtttatcttgcagtttaaatcactgggagcttcgagagttctttggctccttccctttctggaattattgtgtgatataatcaagacatttacctggctctttaaatcagttggtttgccggctacagtgtaggtaaagagtatgtcataatggacaataaaaagttgtttacatacctcatttctgaaaagtcatgggccactggcaagttaggaaacgaaagtgaaatcagctgatagtgacatcagtcagaacaaatgtaccaaagttcagagagctgtttactaggcacgactgcgaaggcaagggggcaccagctcaggactgcatctgcctgccatttcccttccactcctcctttctggagtctgacattagaaagccagcgagaaggaagattcaaacaaccaaccctgatttcctgcttctccttttcat

SEQ ID NO: 39329 - DNA, 2300 bp, Homo sapien
gaagagatatttgttttgagtcctgaaagggttcttcattaactaatactgaagcaattgatcagctaactagaaaagagaaacaaaactattttaggtcctcatctcactccacatacccaaataaatttcacatggatccaagagtgaaaggtaaaaccagataaaaaaatcaatgatctggaaaaaaggatatatttgatttatgagtgaaaaataaaatttggaacttaagagcaaatggaaactacaaataaagaattgcacaggtttaactattctaaaataaagatttctattcaccaaaaacaacataaatataattaaaagtcaatgagcatggaaaatatctaccacaactatgaaatgattaatgtacttaatgtttaaaatgtttacgcaaactgtcaaaaaacattacacctcattaaaaatggacaaatatgaagagataattcacaaagaatgcaaagtagttaactaacatgaaaaaaaattctgtaacttttctaatgtaattaaagatacgccaagtaaaaaaccagagtttccctatcaacactgtaggtaaaaacacttgatgataccaaaaatatggttaaactggcattctcacacaatgatggtggatgtgaacatttgtacaaactttcagggaggcagattggcaataaacattaaaaaccctaaaaatagtcatatctctttggcccacttttataaatctatcctaagacagcaatcagaaatccagtcaataatttatacataggaatgttcagcacagcattacttttggcacaaaatgggaagcagcttgaaagtccaatatcagaagtaaactatgatgtatcaaggataaaatactatgcatcttttagaaaaagcaggtataaaatcactctacatagtgtgactacatccatataaagaggcataggagaaagagactaaagaagtatttgaaaatgttaatgttagctgtggtagctctgggtggtgacattacaggcaattgttctctatttgcagtaaaatatttttagaattatgtgctacatttatgaaaaaaaaagaaatttataaaacaggcattcaaaacagccttagtaattagataaagcagggactaagctggaaagaaagttgagaaaggggaatatgtgcaagattgaaaaaatatctcatggactgagtctcagacctgagattttggggaatggggtatggtaagtggatactgaaaaatgctcttcagttatcatgagggaagaaggaaatatgtgtcttttccctctttcaaaggagcctttgattttataggcgaagaagcatagtggaagttattagtgaaactaagcccacattaaaaaaaatctcttaaaatatgcatcaagagaactaaaataccaccatggatttccactggggcatgaggagcaatctggtctaatgactaacataagatctaaacatctcttaggtcccattctttgaggcaagaacacaagtttttctgttgatattaatcttcagtgtgtattttaaagttttatgatgtgttcgtaactaccattgaatagtggtttagttagtgttggtcggtgacctgcttttgtttacctatttctgatgaacagtgtattgcacaagccacagccatgtccttgtacacactgcgtgcaagactctgctgtgtgcagtcagccctgcatcgtttctaaccagttatactggccttactttcatcatctttgaggccagagctacacatgttgatgccgaagagtggaaggaaggagagcagagagtaaagggggtagattatgtagattatacagacatgagcgagggagggtcacagatactgaacaaccagtgagttcccctatgtggattgccagaacatgaaatatctgagaagaaaacaaaattgtcttacaaggtagtagacgtctgggtaagctgtgatgcttgcaggatcggtacttacagaaaggaggtgcagagaccacaggaacactcatgaaaaggagaagcaggaaatcagggttggttgtttgaatcttccttctcgctggctttctaatgtcagactccagaaaggaggagtggaagggaaatggcaggcagatgcagtcctgagctggtgcccccttgccttcgcagtcgtgcctagtaaacagctctctgaactttggtacatttgttctgactgatgtcactatcagctgatttcactttcgtttcctaacttgccagtggcccatgacttttcagaaatgaggtatgtaaacaac

SEQ ID NO: 39330 - DNA, 2300 bp, Homo sapien
ggtctggagtctgcaggacctggctgcgaatccaaccagctgatttcaaacttttctgtgatcttctgcaagttaactaagtctcagttcctcgtttgcgaaatgtacttaataggcaccccagggtgaactaaatttgtccgcacagactgcagcattgcgcttgggaggcgccttagggggtaggagtcactaatatcactgagttttgacagaaatgaaggtgcattggcaaaggtgtgccccatggccgggcaggttaggaggagggcctggtaatattttttcttaaattgtaaacagccatctggatgagcaatgcattatcaaattatgattcagagaggactatcgctgactactcttttttttgggcaaacctccgcttcaggagcttctggcttgattcctaagtggaaggtagagacctaggccctctgagtcacaactccatctctctgggtgaggactgagctccaggactgctgagtggaggcagaacaattgggatagggaaaagagaggccaaactagatcagaggctggcgtgggcttcagaatctacagactggcacagttaatgcctccgggcccctattgctgcttcaagtttgaccaatcagaagtatctttagcttaagggcggcgtgttggccaatgagactttattgtgaaataaaatgccctcagtttcatttaactgagccaccatagaagagtagagaaatcgagttggccagatgagggagaggccattaagaggtattttagggattgaatgggctgggcacccagaggacagtggcatttggggtggtaatgagaaggaacattaggggcctccgcctccttccgttcctcctgtgctgagtcagtcagcacagaggctgcaggaggtatctctggttggctttggctgcctgtagggggcaccagctttggggaggtcagagggctctctcctgagctgctgtcctgcccacaatcacacctgcctgatgcctgtgaatggccgtctgagtctcttgggccttggtcacttctggcctgccctgcaccgaccagtaactgtgcctgatgactggaggtatgggaattcaccggactttattgttctttgtaggaatcaaagatcaactcccactgaggacaaatggacctgtaattccgggtgtgacgagagaacgagatttaccttcctgaattaaaaaacaggtcattaagcttgggccctgactcttctttgtgagaaggtacagagatggaaaccttacaatccgagactaaaacgagggtccttccctcatggctgacagcccaggtggctacaaagaatgtggcaccaatgaaggcccccaagaggatgagaatggcagcagtgccagtggcagcagcaaggtgcgacagctctggtcagaagactcctgcgaatctggcaagtggagcaggggcctccatgacctgggccaggtcttccagcctaggcagaacagcaagatgggcgggtgtttcagtctgatcatctcttgagcttttagaaggtggaggggctgtgggcgggaggcaaagcgggttaaccctcgaggacaggcacccacttctgcctctgcactggtgagtgccctgccctcagcacacacagagtgggttctccatgtcagccagtctctgatgccagttgtccagaatgccagtctcttcctttacaacaaacatggtaacatcagatgggcaagatcagtggaagggtctgttctgagtggtgcctgcccctgtggacagacctttagggatggacagatgagcagcagctgcagggccagcaagagctaaggagctggggagtgagttagttgaatgacggtaattgccgggggggggcggggggggggtggtgagtctccaggctgcactgtgaagtgggcggggccccagcactcggtgtttccctctctggctcctcctcctctaaggtttcctgactgacagccttcccttgtgactgctgccgtctttccctaagtctggtcctgctttcaggttcctctcagtacagcctcagcccgaggttcccttcctcttgcatccatgtgtgtgtttcagaggcggccatccttccctacttccagatccttgtagggcagttggtggagggtgggaggcaccccggtgttgcctccatgaagccctgtgccagtcactgggctgcaaggctgaggaaattgtgtccgtgtcagaaagctcctcagctcagaggtgctggtacctcctgcgtggtaggaaggcagggggaagaggcc

SEQ ID NO: 39331 - DNA, 2300 bp, Homo sapien
aaccttgtaagtttgagatttcaattatcctttgctattaataagaacttgtttagtctaaactcttagaattggtacagatggcctctttttctcttttctggtcgttccttggctctgccagccgcttatgctgctgttctcttaactactgtggtgggggaaagggggtctaaaaccagctgtaactgtctatgtacagaaaccggtctgggtgctttggcttacaggttaccttgtgccatacctttgaaacaagggacctgtccaggcttccttctggtggccaacctacctctaatgctagccagtctatttcacacaaagttctaagttttcctggtgtcatactaacaccgtaatctcctttaaattctctcttgaaaaaaaatttttttaacataggtcccagtggggtgggcttactttgcacctgacccatgtttttttttttttttttccagacaaaataccacgctcacaccacacataccacaagacaaagaacaggtaaagagggcacacacacttttaccgtttataccaaaccaaaatcacgaaattcaaaatccgagtaccaaaaaattcaagccaagtcaaaaccaaaaccaaagtatccagcaattcaagtcaagtcaaaaccagaacaagagtgcccatgcaggcatgctgtgggtgatcaggccacgtttccactcagatggagtggggcaagttccaaagactagtcttaccaagtcaagccaagtcaaaaccagaacaaaagtgccaatacaggcacaccgtgggtgatcaggccacgcttccactcacgtggagtggggcaagttccaaagactagtcttaccaagtcaagccaagtcaaaaccagaacaaagatgtcaatacaggcacaccgtgggtgatcaggccatgcttccactcacatggagtggggcaagttccaaaaactagtcttgacaagcttcagatgtctggacttcaagtgccagttccttcccggtgttcagccagtgttaatccttctcgggagcctgctatgcgctgctctggcaaggcattccaccggggccatttcctacccgggagcgctctttggattgcgtcagtcaggctggccggagtcctctgcagggacgctccacagggcttgtcagtcacctcgcttcctggtcagggaaccaaggactgtagcaggacaagccacagacaaaacctctcagacacggagctgtagaagaaagggctttattcagctgggagcattggcaagctactgccttaaaatccgagctccccgagtgcacaatttctgtcgcttttaagagctcacaacactaaaatttcacatgaaagggtcgtgattgatttgagcaagcaaggggtacgtgacaggggctgcatgcaccgatggtcagggagaaacagaacagggcagggagtttcacaatgttcttctatagaatgtctggaatctatgaataacatcggtttctaagtcatgagttgatttttaactactaggtttaggccaggcaggcccaggtccagttttgggcctggcgctgggctgcctgtctttgatttcacttccttttttttttaaaaaaaaaaaaaaaaacaggtactgagtataaaacaatatgagagggtctctctcttccctcgctttaactttcggagggctgaaattctttctagccttggttaatacagcaattcattccattctagctattgttatttctcttactataattttactattagtacttacgctattctattattttcttaattttccacttaattaggataacaaaccgaggccgggctcccatcctcctcaagcacacgaggggggcctggcccagcagggagcttcgcctggtttctgagggaattcccggcgggcctttccaaaacatgcccgttcccttccgctaacttcaggggccaagaattgaactttcaccctcctcaagccggtggcgctgcctcgctggcgttcccagcgcgcagccaaccggatgccagccggcggcattaccactgccagcatggggcgcccgcggacctccgactgaggcagctgccgggagccggaagtgtcccgggcgccgggactgcgagggggccgggagttccccaagaccggaagtgtcccgaggccgggagcccgcgggaccccggagcgcgcggggccggaagaggcgggcggccagtggaggtccgcagagtttgggcgccaggcgagacggcagggcttaaagttccgggtgaggcgtgggtcccacaac

SEQ ID NO: 39332 - DNA, 2300 bp, Homo sapien
aggtgacacaagtaaggtaatagctagaacagaagaaagaggggtccccaaaaatgtaaccttaaaatttgatgcttgtgccgctattaatagtaaacagcatgggatagaatgcggttctctagattgagaaaaaagttacacagcagaaaataagtacatctgtcaaaaatcatatttatgtgagatgtgtcagtactggtcttgtgtcatttaggctacttggaaagaagataaaaaaaatatcctgtttggctccaaaaaggaaaggcagcccctcctgcacgagtgggagctgtgatcctttagaattgataatcacaaacccctcagactcaaagtggaataaaggaaaatatgtaacattaggcattgacagaagaagactgacctcctaaactggaaacagcttacaccctcctacacggagaagccccaggccctcatagacttcaggcagtccatctttctgactcataaccctacctggcctgattgtcagtagctacttttaatattgttcaatacagaaaagcgcaggagaattactcaggcagccttacagtggttagaaagcaatgcgcctgaaggcacaaatgatgttaagcggtaggcacagaagaggttcccagaagcagatccaaattgggatccaaaccaggcaggagaattgcaaaacctgcataggtatcgggaggcaccccttaatggaataaaggccagaaggaaaaaggcagcgaatttgggagaggtctcagaggtatgccaaaaggttgattagagtcccagtgaattttatgaaacactctgtgaagcataccggctttatacatcgtttgatctggaggatgtagggaatcaatgcatggttaacgtggcatttatgggccaggcacaaggtgacattagacagaagcttcagaagttggaaggttttgaggctatgtatattacccagctcattcaagtagctactaaggtgtttgttaatccagaggaggaagccaagaaagaggcaaagcacaaagccaaggaaaaggctgatttgttggctgctgctctggttgagagactggttttgtgagaggacgcggacttggtcgtggtcacagtagaggacaagctaggccagggtttgaaggccagcctaggcttgagagggatcagtgtgcaagaatgcaaacagaaagggcattggaaggttgaatgtccagaaagagaaaaggaagaaagtagcagccagggacctgatgcccgcccaaggcctgcagccactagccgttgttctaaagctggatgccgatctggtcagcttagcaggagttgaggaatataaggactgagacagactgggctccatctctctaggcctccaggagcccctggtctctatgaaagtgggaggccaaaagatggactttattgtgcccctgttagggagagacttgcttcagaaactacaagcacaaatttctttcaggccagaaggaaacatgactctggatctaagctgaccaaaagctatgatgttaactcttaccctccacgagactgaggaatggaggctatatgtaaaagaggtgtacaggctgtctgaatttatggacagaatatttgacaaactagtcactgaaatacctgaggtgtgggcagaagacagtcctccaggattggtcataaaccgggcaccagtggtagtcaagttagttccaggtgcaactccagtgcgtattccccagtaccaggtgtctacagaggcagtgcgaggaatgaccaagcacataaatcggctattagaacatgggatcataaagaaatgcaagtcaccctggaatactctactcttaaccagtgcaaaaaccgtctggtgggttcaggcctgtgcaagacctatgggacataaataaagttactgttaccttacatgcggtgttgccaaacccgtatacaatgacgagccacattcctgctcatgctgcctggttttcctgtttggacttaaaaggtgcctttttctgcctcaggctagctccaatgagtcagcctatttttgcattccaatggggaggaacacaattcacctggaccaggctcccacaagggttcaaaaactcccccactatctttgaagaggcactagcatcagacctcaaggcttttgtcccaccaaatgacaagtgtgtattgttacaatacattggtgatcttttgtttgcggcacctaccgaggaagattgcttccagggcaccaaagatctcctttgccttctatggaaggcaggttacaagatgtctaagga

SEQ ID NO: 39333 - DNA, 2300 bp, Homo sapien
gtgtctggttcatccattctacctttcctgagctctgtgggtggtagactatgtgcaatttccactttatctttagcagctgcgacagctgctgaactacttcagccatgaatgctgggccattatctgatcctaaagttagaggcagtccaaacctaggaataatgtcttttagcaacactctggttacttcttgggctttctctatcctggtagggaatgccttgacccaccctgagaaagtgcaaacaaacactagcatgtactgataaccccgtgctcggggcagttcggtaaagtccacaagcaagttttcacagggtgtagctccggtctcttgaatccctgggggctgagttggcacttgccatggattgttctgggcgcaggttaaacattgctcacaaacggctcgagtgatggcagtaaggcatggcacatagaaatgccatcctacaagagtttctaatgcagtctttcccatgtgtgttccctgatgaaactgcttcataaattggggggctattgcttccggaatagctagcctcccatctgagaacttccacctgcctccttgtatgtaacttccgctctcttgttcaaaccaagctttttcattgggagagtagcttggggtttcaggtaaggaaggttctagtagaagcagcagggttggggttttctttttagtacttgagttggacatagctgcttgtctggcttctctgtctgccttcctatttccttttgcttctatgccgcctcttgtctgatgtcctttacagtgaataacggccaccttgtctggggcccacacagcttctaagagttgtaagatttcttctttaatttctttccctccagcagttaagagtcccctttctttgtaaatggctccatgggcatgtaatgtagcaaaagcatactttgaatcagtatagatattaactgtccttcctttggctactagtagtgctctatttagagctattctgctttttgtgctgaggtcctggtagggagggcctgtgccttggctactgaatttagagtcaccctgcgtacccggctctgcagaccccttctgatacaaacctgcttccctctgtgaaatattcagcgtctgggtccttaaagggttggtctcttaagtctttccggcttgagaacacctcatctactacgtctacgcaatagcgttggggaaactggtcttgcaacttcgacatttctacaggcaacagggtagccgggttgagggtattcgcggtttttaaagttacgtatggatttccacataagagcccctgatatcttaacattcttggattagatagccagtgatatatcctctttgctccattaaggtgatcactgtgtgtggcacccgtattattagcttttgtcctggtgtcagcttccagcattttctgccagcatggcagtggcagctaatgcttttaagcaggggggccaccccagggccacaaggtctaaccgctttgataaataggctactggtcaataccatgatcctactgtttgaactgaaactcctgtagtcattccttttctttcatggacatagaaaaagaaaggcttagtcaggtctggcaatcccagggctcgagcttggcttaaggcctttttgatctcattaaaggccttcttctgctcattaccccagaggaggggctctttttctcccccactttgtggcttcatacaatggctttgccgtgagtgaaaggtttggcattgaagtacagcaaaagcctgctgcccctaaaaactcccttacttgtcgccgggtgacaggagtggggagcgcacatatggcttccttctgcccactgccgagttcacgctgcccttgggctactaggaaacctagatatcttactctttttgcacagacctgagctttttccttagacatcttgtaacctgccttccatagaaggcaaaggagatctttggtgccctggaagcaatcttcctcggtaggtgccgcaaacaaaagatcaccaatgtattgtaacaatacacacttgtcatttggtgggacaaaagccttgaggtctgatgctagtgcctcttcaaagatagtgggggagtttttgaacccttgtgggagcctggtccaggtgaattgtgttcctccccattggaatgcaaaaataggctgactcattggagctagcctgaggcagaaaaaggcaccttttaagtccaaacaggaaaaccaggcagcatgagcaggaatgtggctcgtcattgtatacgggtttggcaacacc

SEQ ID NO: 39334 - DNA, 2300 bp, Homo sapien
gacctcacctacatagctgagccaacaccattttaaccacctgcccccaacccaccacgcccccccgcccagggctgaccactcctggcatgcttatcatggcctgggcagatgggaagagacttcacagccagcttcttttcctctagggcaccaagggaaaggacccgacgtccggagccaaggatgggaagagcctcctcagcgggctggccactggggagtccggttggtcacagcaccggcagcggcgcctgcaggaccatggcaaggagaggaaggagcttttctccacaaccacttcccaggtatggggttgtcctgaacacccctggggacactcatgcagctactgaggaacactgtggggggtcttctcttctctctcttctgagttctgcagctgtgcagagtgtgcttttgcttaattggtttcaatggcttgtattttggttatttgggttcatcatttgcctggcttttctgtggtccatttctcccatgcagcatttccctaagtaggggccagaaaatgcaggcctctagaagtgctctcagaagatgacttctgtgattaagctggcttgggaacctttgcatactcatccttcccttaggttaattgtgctaagcagcctgtggtgggctcctggagacctggttccctcggtttcacccagtcacccagacttgcttggtcacaggattcctttctcctgtgctgcctgaggcccagctgcctgtattgctgcactgagggccatgtgcccacacagtgggaggctgtggcccaggcccttctgtactgagccctgggctctggggactcccctcactggccagtgtgggccacagcctgctctttgtggcattacagctgcttctgtttctgccagatactcccgactgatggcaaagtctaaggtatttactggttctcttgcccaagtcactgtcttcaccatttatctcataattggggctatttgcctgttttaaaggtatttcctcattaacagcctggtactgtggtgacaacagacccctaaggctcagatcataagttctggcatttcaggattcaagatgcacttgggggccacccagagccccataatgtctgaagttcctctgttatttttttttattgttgaactcctcctcctgcctctctgaggaagcacttgcaggagcatccggaccccagggctggtagagagtgccctggccgatgcccccagcctggattgtgtctaggtgagcaccagatggtagccaacacctgctgtcccagggacgtagagatggggcagccttggacccccagtggcccttgggtctctgtctttcttcctggccagttgtgtctgtttcttagtttctcagtgcccacctcccaggagggctggtgggcctaggggtgcactggaaaggggccgggcttacctcttacccacccagcttcacatccaatttctcccccttgccagccatatgactttgggcaagggatttggcttctctttcagtcttttagtttccacagctgtaaaatggggaagataatagcatctcattgtttgaggaggactaaatgagagaaatctgtaaaatactcagcgcggtgtgtggcctgcaccacgcatcctccgcctggcctgttgtcaaggcagatgtgtgtcctgggtcccatcagctgtgtcacagagaggccacagccccctctccttcagcagggcctgtgtggagcaaagtctccaggaaggggctgtcaggagggcaggccctgcactctcccagggtgagctgagcactaccctcgcaggtcagagctctcctctccactctgtaattaccgagaaccccgcaaaatgctgcagcctaggcctagaccccctgcggtgtacaccctggtgtgggggaccctttcctggctgacttgtccccaccctgcttgtgacagtgtgcagagaagaaaccagaagccagtggcccagaggctgagccctgcccagagctccacacggagccagtggagccactgactcgggcatcctcggcaggccctgagggtggaggagtccgccccgagcagccctttattgtgctgggacaggaggagtacggggaacaccactcatccatcatgcactgcaggtgggttgggcctggggccaaggaaaccctgggaagctcagattttcaggcagtacacgtggaggtgtggccagcaggagatggcggagaatgggggcttggacgagggccacagtcatggcagtagagtcatgggagtcggt

SEQ ID NO: 39335 - DNA, 2300 bp, Homo sapien
cctctgggccactggcttctggtttcttctctgcacactgtcacaagcagggtggggacaagtcagccaggaaagggtcccccacaccagggtgtacaccgcagggggtctaggcctaggctgcagcattttgcggggttctcggtaattacagagtggagaggagagctctgacctgcgagggtagtgctcagctcaccctgggagagtgcagggcctgccctcctgacagccccttcctggagactttgctccacacaggccctgctgaaggagagggggctgtggcctctctgtgacacagctgatgggacccaggacacacatctgccttgacaacaggccaggcggaggatgcgtggtgcaggccacacaccgcgctgagtattttacagatttctctcatttagtcctcctcaaacaatgagatgctattatcttccccattttacagctgtggaaactaaaagactgaaagagaagccaaatcccttgcccaaagtcatatggctggcaagggggagaaattggatgtgaagctgggtgggtaagaggtaagcccggcccctttccagtgcacccctaggcccaccagccctcctgggaggtgggcactgagaaactaagaaacagacacaactggccaggaagaaagacagagacccaagggccactgggggtccaaggctgccccatctctacgtccctgggacagcaggtgttggctaccatctggtgctcacctagacacaatccaggctgggggcatcggccagggcactctctaccagccctggggtccggatgctcctgcaagtgcttcctcagagaggcaggaggaggagttcaacaataaaaaaaaataacagaggaacttcagacattatggggctctgggtggcccccaagtgcatcttgaatcctgaaatgccagaacttatgatctgagccttaggggtctgttgtcaccacagtaccaggctgttaatgaggaaatacctttaaaacaggcaaatagccccaattatgagataaatggtgaagacagtgacttgggcaagagaaccagtaaataccttagactttgccatcagtcgggagtatctggcagaaacagaagcagctgtaatgccacaaagagcaggctgtggcccacactggccagtgaggggagtccccagagcccagggctcagtacagaagggcctgggccacagcctcccactgtgtgggcacatggccctcagtgcagcaatacaggcagctgggcctcaggcagcacaggagaaaggaatcctgtgaccaagcaagtctgggtgactgggtgaaaccgagggaaccaggtctccaggagcccaccacaggctgcttagcacaattaacctaagggaaggatgagtatgcaaaggttcccaagccagcttaatcacagaagtcatcttctgagagcacttctagaggcctgcattttctggcccctacttagggaaatgctgcatgggagaaatggaccacagaaaagccaggcaaatgatgaacccaaataaccaaaatacaagccattgaaaccaattaagcaaaagcacactctgcacagctgcagaactcagaagagagagaagagaagaccccccacagtgttcctcagtagctgcatgagtgtccccaggggtgttcaggacaaccccatacctgggaagtggttgtggagaaaagctccttcctctccttgccatggtcctgcaggcgccgctgccggtgctgtgaccaaccggactccccagtggccagcccgctgaggaggctcttcccatccttggctccggacgtcgggtcctttcccttggtgccctagaggaaaagaagctggctgtgaagtctcttcccatctgcccaggccatgataagcatgccaggagtggtcagccctgggcgggggggcgtggtgggttgggggcaggtggttaaaatggtgttggctcagctatgtaggtgaggtcatagtcagcccctgctatgacctcctcctttctgtcctctacccgttaagaggacaggtcacctgcaatcctcatcctgcggtatctctcatctggaggaagatgtcatcttgatctaatcggaacaatttagtctagttgaggggaaggagccagcacttactaagtgatgactaaggcaggccggggcctacgcttggtgttatacacatttacaagcaacaatatgtttgggcaatctaaaaattatttatgcaacaagcaatcacctctggagggaaaaggaaaaggaacacagta

SEQ ID NO: 39336 - DNA, 2300 bp, Homo sapien
gcaattttgcttctgcagttgtggaagacctcatggcacattagagaaacccaaacttcccctgctctaaaatgattttccattgcgaggttcttggaatgtatatgtgtgtgatttgtatgtttgtgtgtactgacttcaatgagaggcagtgagctaacagcaagagcactggaggggagttaggagatctggtttcctgcctggccaaagttagtggctacttagtggcaaaagcaaatcatttcacccctctgggcttcagtggcctgatctataaactaggggcattggattggtattgatatccaaacccttttccagattctgtactctgctgtaattgctcctcacaagaaggtgacttccttggctgacactctgagcagctaccacggcttcgtggaactttgatgacttgaaggagtcagtccatgcacctcctcatgatccttgggatctgggaattgtggagattgtctcatagctcttcttcaccccacccccttttttaaaaatgtgaggtaactgaaactacagttaagcaacactgccatttttttttcttttttgacagaaagtctcactctgtcgcttaggctggagtgcagtggcacgatctcagctcactgcaacctctgccttctgggttcaagcgattctcctgcctcagcctcccgagtagctgggattacaggcgcgtgccaccacgtccagctaatttttgtatttttagtagagtcggggtttcaccatgttggcaaggctggtctcgaactcctgacctcaggtgatccatccacctcagcctcccaaaatgctgggattacaggcgtgagccacggtgcctggcctgatgacactgccaaattgatcaagtaagtcagaggcagatccaagatctggagccagatctcttaggttctgggccagagcccttttacacctgaaatttccgtgcttgctagagggtcaaaccacttctctaacatcagaaaattactgaaaaaccgttgcattagtatgttttgaaaattttatagattgctaacttacaaatttttttttacacccagaagccatgacaagaggaaaaagctttattccatggaggggagaattcccttctgtcccttaccaccttctccatccatgtttctcgccaggtggataagattgtggaccagctgcagcagttaatgcaggtgtatgacttggctgcccttcgggattattggagctacttggagcgtcggctcttcagccgcttggaggatatatacagacccacaatccacaagctgaaaaccagcctgtttcgattttatcttgtctacacaatccaggtgcctgttgattcaggggttctgcttcccttggtggaaggagctctttgatcccaaaatagattttcttccagttcctagggaggaatctgtatgtgactatgggaaagagtgcagcagttacagtgcaattatttttgactgtttttcttcttttttttccttgtcgtcatctgtagatcatctgacttgtcttccccattcctatttccttttttatgttaagcatgtaagcttaaaacaaaggtggtattttaaagaatataagtagctgggttaaagtttgagtaataaagatgatagctgacctggaggaatgagtcacttagttatttgaacatcagctagggattaatttttaggatgggatttatcattagaacttcagcttaaaccagctttgaaatgacaagttccttgagaaaagagtgatgatttcctttatattatggaattttattttgccacttacctggcaggctgatagtcaaaggttgtctgctgtgcaatgatgaagagtcttacctctggatttctgtctctcctccctccttgctacctccttgtgtcttggcagacaaacagaaatgacaaggctcaggagttctttgcaaagcaggccacggaactccagaaccaggctgagtggaaggattggtttgtcctgcccttcctgccatccccggacaccaaccccacctttgctacctacttttctcgacagtgggctgacaccttcattgtgtccctgcacaacttcctgagcgtcctgtttcagtgcatgcatatcctttcagttgcctggggctgaaggcccagcctgaggcacccagacctcaggatcagtagcccgctggtctccatacaggcatttcttctacaaaaatgcccagggaccatttttatgggtcacatgagggggctggacaaattgtggttgtttttgtcagtaag

SEQ ID NO: 39337 - DNA, 2300 bp, Homo sapien
gcgttttacatacactgtcttattaaatcttcattactactgtgcaaggtgggtgttattgtcaccatttttttttttttgagacggagtctcgctctgtcgaccaggctggagtgaagtggcgcgatctcggctcactgcaagctccgcctcccgggcttacgccattctcctgcctcagcccccccgagtagctgggactacaggcgcccgccaccacgcccggctaattttttgtatttttagtagagacgggatttcaccgtgttagccaggatggtctcgatctcctgaccttgtgatccgcctgcctccgcctcccaaagtgctgggattacaggcgtgagccaccgcgcccggcctattgtcaccattctgcagaagcaagtctcaaagatattggctattttcctacttacaaaaatacgtgcaccttgtaaaaacttcaacaataaaaagaaagtaaaaaacaagaagtccttcatagtctcacctctcagataaaaccactccaattgtcacttggtatctgcagggggttggttttaggaccctccctagaagaccaaaatccatggatgccctgatgtaaaaaggcctagtatttgcatctaacctatacacttcctcctgtatactttaaataatctctacattgcttataatactgaatacattgtacatgttatgtaaattgttgttatgctatatttaatttgtgtttttaaaaattgtattcttttttaaactgagacggtgtcctgctctgtcacccaggctggagtgcagtggtacaatcacagctcactgcagcctcgacctcctgggctcaagtgatcctcctgcctcagcctcccaagtagctgggaccacaggcagcaccaccacgcccggctaatttttttttttttttttttttgagacagagtttcgctcttgttgcccaggctggtatgcaatggcgcgatttcggctcactgcaacctccaccttctgggttcaagcgattctcctgcttcagcctcccgagtagctgggattacaggcatgcgccacaacgcccggctaatcttgtatttttagtagagacggggtttctccatgttggtcaggctggtctcaaactcccgacctcaggtgatccgcccacctcggcctcccaaagtgctgggattgcaggcgtgagccactgcgctccgcattttttttttttttttttttttgtggagatgtggtttcgtcatgttgtccaggctggtctccaactcctggggccaagagatccgcctaccctggcctcccaaaatgttaggattacaagtgtgagccactgcgcccggctattttttatttttaaaactttggaaaaaatattttcaatcctcgttggttgaatccgtgaatgcggaacccgaggatgcagagacccgactgcataggaacttggtgtataatcttcctgaatttaaaaaatgtacacacatacatacctaatttttttttcacaagaaaccaggactatagcgtacatacactgctatgaaatttgcctatcctagcagtgcatcttggttatcttgctgtgtagccaattcgtcttactaatgaaagcagagatttgggggagttagcgctctctgaggacacgcgtgttgtggcttcacgcaggtcactctgctcttagggctccagcttcctccgtgtaggaggagggcaggggaccgggagctctgcgatgtaacgccaaccaacagggcgccgcaccccctgcccgcctcgggactacctgggatgttcttaagatccagtcttgtttgacgtgggtggcagccgccactttcagtaattcagacaaagccgccgccggcgccgccaggacctcccctcgccactcctcgggaggggtaagggtgactcgagcggccaggcgggctggggctggctcaggggcggggcctcgggcggggagccggccgaggggcggggcctcaggctggtcgcccagtgcgtgcgggctggtaggcctgtcgcggcgtgacgtgctcggcgcccgcgtccggccccgccccatttctcccaggccccgcccctccgtccctcaccgcaccacccctaaagacgctagcgctgcgatggcggaggccgtggagcgcactgacgagctggtccgggagtacctgctcttccgcgggttcacgcacacactgcggcagctggacgccgagatcaaggcggacaaggagaaggggttccgggtgagaggccggcgggagcggcgcgggcagaggcggcccgaggga

SEQ ID NO: 39338 - DNA, 2300 bp, Homo sapien
tttggaacaggtgaaaaagaaacctaatggatcagtctctcagacatgaagcaaacaagcctcatttctcacccccatttgactgcccatgtggcggccaagactgccccagcaggctcttggagttgctaaggagctgcctcatcatcggaccatgcagtttccatgttcctgatcctacgtccttgaactattaaaccctctggttccaaggattcgttcctactccacacacaaccccacccaagaaactaaactctcccttccatcccaaagtagcccaacattgggatggcccaatattctcatataatcaaaaaagaagtgaatcttatcacatctgcaaatcccctgtccttctgaaaaataactaaactgagtggtataaaaactgtaaaggtcattccctaaaaggaaacaaaataaattctaacatgaattagagaaaaatataatgaaacagatgacgatagtgcactgaaatacctattgacttagtatctctagcttaaagtgccatctaaattgagcccgtttgaggatctacaatcaattttatccacaaaagaaacaatctttcacagcaatagtttgcccattttgatggtgaaacattaagaggcccatgtattttctcagtgaatctcaagcacaataggttaggtctattaactgagtgaatgaaagcaggctttaatctttatagtgaaataaattgtgactccctatagcagaagttccctgtcaaaccactgagaagctaacacaaagaatgtacttttattcacaagtttcaaccttctttatcagtatttctacagctctttctacattttgaagcactttcacttatacattaaacccttaaaatagaaactccaaaagcagtcccttggaagttgctgctgagttgtgatgacagtatgagtctttgggaattttcactatggaggtctggggagggtggggactctcaccctgggacatgtcttgatggggtcatacatctgccctcctatagcaggaagtgcccagccatactgacccagcaatgctccccataaaggagtttactgtatctgcagggtcccttggaagccaatgtctagccccatgcaaaggacacggtgagcaaaagcctatctaggattgtgtctcaggctcatcttggcagaagtgctgggagcccctgactgcagtcagagagtgcatccctccattgtgtctctgcctttttcattctttcctgggagccaccatctgcagacctcagctcaaagctgagggttttttgttctaaaagttacaaaatcttgcatatatctctctgtcctaaggtagttgatatttaagggaccaaatgccccccaagggggcatggagtgcagaggaccagagagaagatcttgagcaagtccctggccctctctgagcctggggagaagactcttcacagagttgtccctgaggatgctgagcacagtaaagtctcagtataggatccatcactctcattttaattgggggataaaaagataatacagcctgaagtcccggccttttatttcatgaaatggatggacactaacaaggagaataaattcagagggttattccttctaccagaaagttaggccaaggggcgcaaaaaggggtggccatcccgagttggtatgaatgcagggatcttggaaggcttcctgggtgttgagctggatctgcaaggagggcatgttctccaactgggagagaaggagaatatttcccggcaggatctctgctggggtggagtatttcaagacaggatctatgccactgtgctggaggaatttcagggcagaatctatgttgctggaggaatatttcagagaaggatctatgttattgtagggggagggcatttctggacaggatctatgttcctgtggtggggagggagtgtattttagggcaaaagttttgctactgggaggaaggggtcaaggtcagagggtggtggtgtgtgtgggtgttaccagggataactcttcatatccagagctagtgagaggccaccaggaggcccccagtgttcatggcagagccttctgccttgcagctatggggaagattgatgtggacaagatcctctttttcaatcaagaaatcaggctgtggcaggtaaataagcttcttagtaactttccccccaggactacattttttctgggtgcacatctgcttgtgtgtgtggcagtggttggggcgggaggtggggtgactacatgaaaggttgaggcaggtcagaggtcagtttccaa

SEQ ID NO: 39339 - DNA, 2300 bp, Homo sapien
actttgctaggtagggagttctttagggtaaaattgttagaaattttttatcttggttaagccaaaatcttttaccaattgaacttcttaggtgcattttgttaaacacatgaagaccacttgtctgttaacttctggatgtagatcaaacatcctcacttctttgaaccattccacacttaacatgattttgagttctctctcagtttaattctctttacacatattttgacttgacgttgcctttcttaaaatatgaagctcacacttgaatataataatccacatatgatcagataatagatgtcttttattaaaacttgttactaatatttgtattttcccttatgtttatagagttcttttataaaaatatcttgtagggtagttatctccattttataaatgagaagcagagtggttatcattcgtgatttgcctaaggtcacacaattgctaatttagacattgcacatctatttatatggtcttaatgttacttttttaggcgttccattacccagttgccagaccaagtatcataagcctatttaagtaaaaccactagaccttttcccatacacgctaatggttagatcttttccattctaccctttccaaatgcatttttaaaaatctaatgtatatctgttaaattgtatgtgtttggatttggtattgttagaatgtatcctgtttgtatatccccatcttagaagtttgtcttatgaaagaactatgtgattataaagtgatagatgcatgttattaataacactattaataacatttgtcaaagaatgttaagagttttaatttaagaatagttgtagtttccactattctgtcatctgtagaattggctttccgtttgcatatttaaatgaactttgtggcttttgttaagtataataaaaagcatggagtcaaatataagccaagagtattacagagacttttaggctgactcagtatctcaagttctgtgtagattcatctaaacactgctgttatccatgctatactttaccatgttatcccaaaagggaatcatcagcaaattttaccagaaactgctgaattcaagatatattcaatatatattatacttctgacatcctaggaagcctatccaaagaatacattactttgatagaatttgttctttatgaaaattcattttgactctcattgataactttattccattttgggggaggactgaggagtcagtgggatgggaacagagctaactacaaagtctttgagtttagatgggcagcagaaggggaaaggaagtaggccgtgggatatataaggacttttccaatggaaaacaattgtcagtggaacctctatgactacttgttcaatttcagaattaaacttcctgtatattttaggtggaatcaagctgagttctagtcaaaatgctacgcattatttcccatgaaaaatacccccaaacacaagcagacagaacagtggttgataaacccatcatattcatttctgaagaaatcatcaagccccaaatctgttttagaaatttctcaagaactaattctagactgggcatggtggctcaggcctgtaatcccagtgctttgggaggcaaggcaggcagatcatccgaggtcaggagttcgagaccagcctggtcaacaaggtgaaaccccgtctctactaaaaatacaaaaaaaaaattagctgggcttggtggcacttgcctgtaatcccagctactcaggaggctgaggcgggagaattgcttgaacctgggaggtggaggttgcagtgagccgagatcgagcattgcactccagcctaggtgacagagcaagacttggtttcaaaaaataaaaataaaaaaataataattctaagcatgttgcttccagagtctgccatttcttccatttttggtatttttctaacagtggttttgtgctctcacctgtgaggattaagagcctgggataaaactcattttcagtctaaagatttaaactcatttgaattgagtagatgcttttgtgatgtctgcatctctcctgacttaatagttcccttcttcacattacttaatctgtccttttggttagaagatcatgctcttacctaaagatagaaggaagcaaaatgaacatggaactacattgccctgccttttctcctgtcaaatatggcatcaggctgagcagtggcttttcctgatattccccttattcaaaacatagctttgtcttgctttcagcatttttcactttcctcagatcattatggattctgactttaat

SEQ ID NO: 39340 - DNA, 2300 bp, Homo sapien
taacattaatatcactggagagcttattaggcaaactcttcagccctgcctcagatctgctggatctgaatctgcattttaactagatcattgaagaatttctttacatattgaggctctaaagtactattttatcctatgtaataaagaagtaagatacttgcacctatttgtaaaatcatggactgtgacaactacaaatgcagattgttactggtgtatgaattggcaactcaggtaccatgaaacatcaataatgtgatttttctcagataactcttagtaaaattttaaacaaagctgggaaaatactttgtaattacgtataatatgaaatttgtttctggctcaataaacagcttcaggcatgtcttgcagggcattcagaaattgtgcgggacaattctttgttgtacggggctagcctgagccttgaaagacatctctggtccccatccactgaacaccagtagactctcccagtcactttaacagtctctcccaataaaagtttccacaaatttccagactgccccttgagtgcttccctcattgagaactactgccttaaacctatgatgctgatgcaggacaacctgtgaccggcctgactgaaccctttggagcaggtatcttagctatgacgctggttgctgagttggtatgcatccagctggaatattgaatgcagttccaaactccactagccagaaagctttttcaaactctgctcttctctctttatcaaccctgagactttgctacggatgacttaagggtcattgtgttagccactgttactatcatatccctcaggggttttgggtggaaaagagattgaaactcagtgtaattacctcaccttctaatccattagaattggctacagcaaacataacagttaccttatacttacaagcacctaaaataaaatataagattaattactttctattaattaggtagaagactaagaattaatgatacacccgccgtagatttattcatgaagctttgattctatcaaatgcagaacataatagctaaattataagtctgtaagaatattatcaaatatgaatgggaagaaatactttacacacacttgaatagttacatgcagaaagctttcatttgcagagagcttgctatttggagagattgtaggaacagtaggtctaaagatacattctaggaaaacagaattttgaggtagttgcaaattatgtgagatgtctttttatcaagttacataccggtcaaattagccaaggttaagtttgtaagagaagctgaaagaatgcatatagtgttcacaaagtaaaggagatgaggtacgtaggtaccaccaagaagtaaccaggtaataaagaaagaaacgtgtaaatttgtttccgaaatgttacgtaccaggaaaagtaggggaaaaagcctcatgagacagatgagaaatggtaaaactgattgacataggaaactgtatgcacaatgataaatcataaagcatagagggttgagtgggcactctgttacttgaaatttgtgatttataaacagtgttatatgcaatagatttatgagtaaagactgtctttatgtctgttctttcaattctgtctttacctttaatacataattttggtcattgtttttgaagaattgctttcgtgtaaggatcatctcttaatggcaatgtagttaagatctttgatctgttttgtgtttaagaatactgtacaggtaagatcccatagactattggagcagttattagaacatagtagataataccaaatttagtgagtctcagtttctattcagtgggtcaagaaaaaaaatagcttttaaactcttttgatttcctataggttagctacacaaactgcaattaggaggtagtgacatttattagaaaactttaaaaattatctttttccttttgctgaagagggatgatgaatgtctccattataaggataaagttgtttaaaatggggacagtttataccttatttcttcttcttttataggttttaaaacgaccagaatattttgggaagtttggtaaaatacataaagttgtcatcaataatagcacatcatatgcaggctcacaggtaactaattttagggatttttgcttttcctccctatggtctgggcttgacctgggctgttccaaaggaaactttgctctctctgattagaaagcttgagggacaaggacttaagcaatgtagtgacctctgttggtggggtgggggattttttgctgcttatttgacccttctaggacttaa

SEQ ID NO: 39341 - DNA, 2300 bp, Homo sapien
ttattataaaatattttcttcatatcatttatattataaatagcacatcattttgatttcagatgaaatcatgtatataggtagtttatatacctatgaatttcattttaggctaacaaagagcatattataaaaacatttattaaaaaaaggaatgttgggtaagataaggttgccactggattaggtgatgcttaagatcccttccagtttttactgtgatgattctaatctttcataatgggaaggcttctttttattttgttcttttcattactttgtttatatactactatagaatcagtaatatatacaagaacaataaacacatttttaaataaaaatgtcaaccatattgaatgtttaggcatttaattacctaaagggaaatccaaataatttcccaagtttccttgctaggtaatcatttcatgattctataatttcaaactttgggtaaaatgtgacttcactacatattttaatttttacccaagtaactgttgtctctaggtttatagtgaggaaactgaaacacagaaaaccaatgtaccaaaagaatgaggccgggtgccctggctcacgtctgtaatcccagtactttgggaggccgaggcaggcagattacctgaggtcaggagttcgagaccaggctgaccaacatggtgaaaccctgtctctactaaaaatataaaaattagcctggcgtggtggcacgtgcctgtaatcccagctactcgggaggctgaggcaggagaatcacttgaatccggcaggcggaggtcgcagtgagccgagatcgcgccactgcactccagcctgggtgacagagctagactccgtctcaaaaaaaaaaaaaaagaaaaaacaatgaattgagggcttattatgaaattaagttcgtaaatttaaaactgcaacctctttccctactccccttccctgctttaagtttttaaaatcggttatgacatactatgcattttaatcacgtatttttaaaataatgcctcttctctcctcttcctcatcccaacacatcactagaatagggacagggaattttttctattttgctcaccattgtattctcaatatatagaagagtacccggcagctaggaggagctcattgagtatttgctgtatgagtgggtgaagaatacatgcaataagcaaaagttactgcttcgagcgccacttccaccagagttctgggatgcaaacggggcgaccagtacattgactgacttttgtgactgatgattcctcagtgctcgtagggattgtggctgcatttattgttcttggggatgtgccgatgtgtgtagtttgtaaacttgcacacagctgtgctggctggacaccgaactaacactaatttgcaccgaggtccgcaaattctcaaattcacaccaacagaagcacgttattgtaagtgcacgggtgttccgttctcttgggtaatctgcacagaacaatttagtgtatgtcttcactggtgattttacagtgaagaagggatcaagggtggtggccccaaatgcgcaaggacagggaaatgaattaaacaggcgcctgtttcctccttgttcgcaaacagacgccaagtctgtatcaaattctcaccctggatcaaatcccgcgctcttcgtacccacaacctgcctccacctccaccccgccccctttagatatccctggtgggcggggcagagaataaacattccgggctccccgaaaaactgtttagcctcgccccagtcttggggtagcacatttccgcaaacaccgaggacacggaatcactagtgaaaaccgccgaccaaatgacattgaagcagcacacgcgtgcagagaaggaagcaaaacacgaagaaaggcatcagtccagcagccacgtgaggtgggcgatcccctccgccctctgagagaggacttcaactcccggcgtgcccctgggaggttaccctccgaggacttcaactcccagggtgctgcgggagcggccaccgcaacctcccactcagccgcccgccgctcctcccgcccctcccccgcccctcctggccggatcagcgtgcgcctgcgcacgggaggccggaggagtcttaccctaatgtaagatggtggcccgtctggctgtggaacccaccgaaagctgagagtctctctctcagccgtaaaggtcggactcgctgaagcaatcaggcccggttctgaagagttttttccccgacgctcgttcggtggtttcttgtgaggacgcggcagcccgtggagtcggctgagggaaaagcg

SEQ ID NO: 39342 - DNA, 2300 bp, Homo sapien
ttagtctcccaagtagctgggattacaggagtcctgtcaccacgcccagctaattttgtatttttagtagagacaaggtttcaccatgttggccaggctggtctcgaactcttgacctcaggtgattctcccacctcagcgtcccatagtgctaggattaccggcgtgcgccactgcacccggcctataactatcataattcagaaaagtgcccatggaatttgatgactgataactggtaaacataccaagcgcagttttagaggggcttatgatggcaatatcccaattgctacgaattgaagaagcctgtgagagaatgcttgtaaagtgtaatgacaggtgaagaggagttgctggaatttaaagagttactttatagaaagcaaagttatctactgagagggaagcgtgtgggcttaaaaagtgcatgtggagagggaaaggcttgtaatagctgtgctgagagagaaatctttgaatgccgcttcctgtcaagttcctgctcagtattcttctcagtttcatgataaacttcttgaaaaattcctttgcgtttactttctctcttccccacttcactccttaaaaccactttaatcgtagtttggcatttgtctctatatatcaatgacttttagaaaaaatcaccagtgatttttgtgtttcaaacctaatgtacattgtgtcacttgatattatttgttcaaaagaataaatgttctgttctggatattctttttttttttaaatggagtctcactcactctgttgcctaggctggagtgcagtggtatgatctcagctcactgcaacctccacctcccgggttcaagggattctcctgcctcagccttccgaacagctggggttacaggtgcgtgccgccatgcctggctaatttttgtatttttagtagagacggggtttcaccttcctggccaggctggtctcaaacacttgaccttaagtgatcgcctgccttggcctcccaaagtgctgggattacaggcataagccactgcgccctgccagttctggatattcttaacatactctatgcttttgtctaaattatttgattctgatttccaacagtgaaatgggaatgatggagagttaatacaatgagattgtaaggcacatggagcgtctctgacataaatagttataatcatatcattttcccaatagaatggtttgcagggattaaatgagataatggctataaaatttttcttaatacatagctgtaaatagcaatgattatttacattttagtttgaaaatcagcaaactaaaatttaacagctgaagaaagagttcagctactttgggtgctcaggtagaaaaatacttggtgattatgaaacgatatgtctggaatctgtttcaaactaatcgggggcggggggtggggaggggagggtgttggggtggtaagggtgggttggggctgccgtggtgggaaattggccacgttattgatgctgagtgtttgctattctaattttgtatccgtttgaaaattttataattaaaaattatgatttgtttcgctctacgcaactatgttgacagaatatatttggtaaactgaaatgtcacggaaacttagtttgtaaccggtcagtggctttttgaggtgtagacacttcataccttacttcactccccactgtaaggaagatttaacttgaagcggagataatgatttgaatttacggcttttataatgtcataaatgggcgtcattttaataactactctcagaatatctttttctattccactttactttttcctctccacttaaccaactcatcattagaaactacaagtcccaggatgcactacacgatgaacgtcggatcgaggacctcgtgtctctgaagtggttgccctcgccttatttgaatgggaataatcccaatgaaaattgatgtttgtgacccagagcagattctggagccttttgtacgcctgggacggcccagcgtggaggggacagtgtggtgcctttttgttcaggcttcgctcaggtcagcctcaccctttcccggggcctccatgcggcagaagggctctgttagtgcgcctctaagatggcgacgcctttggcggtaaattcgggtaagtgtggccagacagaaagacgattgagctgagcgataaccaggtcttcatggagagacgagaccgtgaggtttctcggagtctaggaccccacttatgtgcggtgcctgcttttccctaattctgggcctagagtcccacccctccccagtttgaatggcgcg

SEQ ID NO: 39343 - DNA, 2300 bp, Homo sapien
tatctaatggcaaaaggtttttcactctattttcataagtgtcttatttttagttctgggattttgtttaagaagcttttagaaaccctctttacacctaattaaaaataaaaattaacatcttacctattatggtatgtgttttataaaacttcatttagctttgcctgaaattattattagtattgttatatggttaattttatgtttatactgtcacagtttagggtttcaatgtcaagcatattaaaatagtattggattaaaaaaatcttattgtaggaccaggcacagtggctcgcgcctataatcccagtgcttaggtaggctgagacaggaggaacactgaggcaaggagttcaagtacagcctgggcaatagagtgagaccctgtctctacaataaaaaataaataaataaaaataaaaactattgtataagtgattctcagccttaattaaatgttaaaccacatcattaattgaggtattataaaatcatgcaatttaagtttaatttttcttatgtatttgttttgtgaaatcaaaaccaaactatgatagttttttgagttatgtatttgaaaattactttaaaatattgttttatatatcagtgtcaaaatacgatagattcaggatctttgtgaaattaaaatcagtaatgaaaacttgattctcttttactcttcatttactttagcccatctttcgtaaatttatactagcttatttttttctttcttggtatcttttttttcctcttgtaattttacagagtgagaaattattatgttgctgagtttcataaattattgactttgttacatgggaaaatatctgttgagttacagaatttaagtctgttttgatactgtgttattactctgggaaacaaaatttacatgtttaaattctagaatatgaaatatctatgctgaaccagatgtcatggcttatgaaaactgcctcaatagagctaagggtaacctctctgaatcgtcagcggtcacatacccagaggctcctacacctcttactggatgacatgccagtgaaaccatactcaggtgagtattagtatttgttttattgtgctggtgactagttgtcgtgaagacaagcacaaatctgaagcttgtgcttagtatgtgactatagaccaaaactatcttctcacttttagaatttttttttcttaaaacacaaaaattttaactcatcttatgattgtcatttattattattttaagcatccatattacactataatcataccggtattatatacaaaattgtcagtggagtttgtcatactgagccagcatgacctaagctatttcagtatgtattattcatgcaaattaagcataaacttttaaaatcatctcattggcatgattgggtcttgccatttttgagaatctgattattctctttacaattgtgcagtggattccatagggacagaaataattagattaatgttggtagtaaatcctcatcaatctttacattttaattatccatttgcacagggctctttgatgtagaaacaatgacctagaaataagataccttgtgtttgttatttccaaataaatagttttaagagtatgttcttctttttctgattcaatattattgatattccaacagatggtgaaggaggaatagaagatgaaaacaggtctgtttctgggttccttcactttgacactgctacaaaaggtaatgccctttgaatttgtaataaatttattttatagacatatattaaaaaaaaaaaaacttcaagggattattatgcctgtgcctccaaactctgaactggtatagaaaagttatataaaggattaattgccacctgaaaattttttttataataggattatacaaaaggaaagaaaatatttttgttaatggatgtatcagaaataaaatcaaatttagattccaatacagttttcagtttcttgactattttatgctctttctgaaaatagcactgtctttgaaaatcaactgaatatgatggcttgcctttcttttcaatgtcccaagtaaaatcaaattactttttattatttctagtacgtcgaaaaattctaaatattcttgactcgattgacttcagtcaggagatccctgagcctttgcagttggatttttttgatcgggcccagattgaacaagttattgctaactgtgaacacaagaatttacggggacagacagtctgcaatgtcaaggtgaggattgctttaaagtacatatctgcagtgtcaagtggctcagact

SEQ ID NO: 39344 - DNA, 2300 bp, Homo sapien
tactgttctaccagtgtctgaaatgtcttatttttctttcttttcctaattatccagcttcttcatagggttcttgtagctgaagtaaatgcccttcagggtatggcagccataggacagagacctctactaatggaggtaagctctattgagtatgtgttcgtttcaaacttctaactacttaggttgctggtgaaaagactaaaatagtatattgacatgtagtttgctaattagtaagctgcctaaaaattaaacatttagggagtctttcacttttgattttataacttttataaactgaactatctggtatgccaaaataaataacaccttttctgctaggctagttaaggatttgcaacctgaccatatttcgtattagacttcacttggtccccatcagtgagagaggagggtcatttgtcatcacaagtggaaagttacagataagaggtcaggtgggaagaaccacatgaatggagatacagccggccaggccaaagcaagaggcaaagaaataaaagagatgtcagagaaacatgccattgaacttggagtttagataattctagtgctctagagtaagcaagtataagtagacaggtacaaggagaaagaagatggtgtcaaaaaatacatatttatctatgccacttctgtcccctacctttcatgcacatacacacacatacacaccttatatgttaatattttttatagccctggctactgaaataatatgaaaagatacctgcttcctggcatgcatgtagtaggtttccaaataaatattttctgagtaactgacagataactgatcttatttgcctgtttaaccttgtgattcaattcctgtggctttaggaaatcagcactgtacttcagtatgtggtaggaagaaataaattgctgcagtgtcttcatgcaaaacgtcatgctctggagtcgtggaggcaactagtagaaattatactgacagcttgtccccaggacctcattcaggcagaggatcgacaactgattattcgtgatattttacaagatgtgcatgataaggtgacgtacttcctaaaatactttatactgctgaacgaatgtatcatttaaacaaatatattttggcatcctaattgttttccattttcgattgggagtaaaatagaattgtgcaataccaacgttaagactttccttgagaaagggattaattctgtacagtagtggctctcaaccagagtgtgtgtctgagttatctcgggagctttgtaaaaattcacatggacagagcccaccccagacctactgaatgtagtggtgagaccatttatgtgaatttcaaaaagaaaacctccctagggaattctgataggaatcccttctggttaagaacacccattacctagcatcatgtttaaatttctctgtatatattagattcctttctttctttctttctttcttgactaatttctgtattccattcttatattgttaccatagttgacaagctaaatgtatataaaacttgttaatgggctgtgtgcagtgattcatgcctgcaatcccagaactttgagaggccaaggtgggaggatcactggagcccaggagtttgagaccaacctgggcaacatagtgagattccatctctacgagcatgatggtgtgcacctgtagtcacagttgcgggaggctgaggtgggaagacctcctgagcccaggaggtcaaggctgaagtgagctgagattatgctactgcactccagcctcggtgacagagcgagaccctgtcttcaaaaaaaaaaagctatgaaatttgttaatgattatagctgaaagcaggattctcactctaatttgcccttgtcctttaagatactggatgatgaagctgcgcaagagttaatgcctgtggtcgccggggcagtgttcacactgactgctcacctaagccaggccgtcctcactgaacagaaggaaacatcagtcttgggaccagcagaggcccattacgcttttatgcttgatagttgcttcacctcacctcctcctgaagagaacccattagtgggttttgcttctattggagattcttcactttacatcatattgaagaaactgttagacttcattttgaagacaggtttttttcatttaaattgtctataaattctatcttttgtatttgttttaactttaattgagaaaagattttcatttgacatcttcctaatctccctaggtggtggattccaacgagtgaggactcacttgtatggctctctgctttattactt

SEQ ID NO: 39345 - DNA, 2300 bp, Homo sapien
ttttcttttttctttttattgagacagagtcttgctctgttgcccagactagagtgcagtggcatgatctcggctcactgcaacctctgcctcccaggttcaagcaattctcctgcctcagcctcccgagtagctgggattacaggcatgcaccaccatgctggggtaatttttatttttatttttattttttttgagacagagtctcgctttgtcacccaggctggagtgcagtggcacgatctcggctcactgcaacctctgcctcccaggttcaagtgattctttgcctcagccttccgagtagctcagattacaggtgcccaccaccacgcccagctaattttttttgtatttgtagtagagatggagtttcaccatcctggccaggttggtcttgaactcctgacctcgtgatccacccgccttggcctcccaaaatgctgggattacaggcgtgagccaccgctcccggcctaatttttttaatggccaggcttgtctcggattcctgacaagtgctccacctgcctctgcctccctaagtgttgggatacaggggtgagccactgtgcccaacctagttattatttttctgtgttttctgtaatgagcattataaaacttcacagtgagaaaaaacagctgttaaaaaaatttcttttctctaacaagcaatgttagagtctactaaaatacatctaatgccactagtttaacgtgttaggttttgttttggaaatacatctttacctgagagctttcctttattgataaattgaggttctggagccatagtttttaacttctcaaaaaaaaataaaaaggaaattttgttgcaagtaacattctctttatgaaaaacattcttcatatttcatatctgatgtcagataaattcagttactgttgttgattttggtagcatctacatgttttggactttaatttattcttccttcagatgctggccctggctctacttgatagaattgtctccgtggataaacagcagcagtggcttttgtatctttctaacagtggctacttgaaggtcctcgtagacagcttggtagaagatgaccgtactttgcagagcttactcaccccacagcctccccttttaaaagcactttatacttatgaatctaaaatggtaaggctttctagacatttgatgttagatcaagaagtcgttttctcttggctatagatgtattaaagaaaattaatgtggcatacattctgaatatttctatcataagctggaatccttttttaaggagttttaaactttggaatcttcctagtgtgcaaaagatgagtgaaatgatcctcaaagggatagctggataatgggactgctgcttccctcactcactcaggttgctcatgatggcaatatgacagccagtgctccgtgaggacagagcaaaattgtcctctcacaatacaatttagactatagtagttgcctattgaaaatttccatgtagatatgctagttctattctaaacacagcattttcaatatagtatataattcattgtttctttgcctgcaaatctgttttaatttctttttcctcctagttaaaaggatcacaaatgttacgataatagaagcactgaaattttagattcttcatttactcctttttcctccttcatttatttaacaggtatttattaaatacctgcaaaacggcaggcatggcactaggtactagagacacagctgttagcaaaacagacaaaattccttgccctccatgggcccacatgataataacaggacccacactgtaaacgaatacttgaatcatgcaagctactgtctgtgggcgctttagatatgttgaacactgagtcctcatgaaaatcctaggaagaaagcggtataatgtaacctgtcactagcccagatttctcttcagtgataactaaggatgagaaatttgccatcaaagtgttgcacttttctctgaggcccttggacatgatttcagcactgatgatttttctcttgtaactcctcaggcatttctcacaagagtggcaaagatacagcagggtgcattagagctgctaagatcaggggtgattgtgagactagctcaatgccaagtctatgacatgcgcccagaaacggacccgcagaggtaagtgtctgtatagattaatttggttaaactcccagtaaaggattattaagggaagaaaaaattccaaacataattttgccgcttagcaattctctttcatcttggtgtgggtttttttggtcatactgtgcccct

SEQ ID NO: 39346 - DNA, 2300 bp, Homo sapien
aacaagagattgaaatttgttcttctataaaagaaagcagttattgtgataggagtaagctggcttctaaagtgtaatttaaccaggtatctattgagagagggctatgctaggccttgcaggctgggcatggtggctcacgcctgtaatcccagcacttcgggagactgacagatgataatactgcatttatatatgatagagaatgaaataatttaaatgagtgattttgctgtcaaaatttttttaaataccagaaattagttttattttgattacttttcagtgaaacactaacattccaacacacatttttttaaaaattaatattatatgtaatttagcctttcactgattgattaggcttatcatgaatctacaaccttgtattgctttattgtattttggaactgtgtcctaaaacactttgatttctggtaattttttctgctttctctaccatcaggccttaggccatctcaccaaggtagatgctgctgttctaaagtggcaccttattttatatcatagcaatctgggttgacgtcctacttcttttaggcctatgtggtcttcaagttagtactttttaaaactcagagactttgcctttcttcccctagattgagattaagattttttagtagaagtgggacattatgatataagacactggttccctaacaccaatcttgtattgactgaagcagaatcacctgaggagcctcttagagaagcacagatgactgagttctgtgaccagacattataagcttaggctaggaatctttattaaaaaacaaaaatgatcacaattctgagtgattcacatccttggcttgttttggcatatagtctgcctttaaaatgtttgtaagctagttgagatattcctaagtgaaaatactgaaagaggactccatgagtgtacattataaaatgccaaagtggaagggtagagctgggaggtcaggatttatatctcctttttttaaccgcatcaaaaggagagttatggccaggtgtggtggcccatgcctgtaatcccagcactttgggaagccaaggtgggaggatcactttagccaggagtttgagcccagcctgggcaacatagtgagaccctatctctctctctctctctctctctctctctctctctctctctgtctctctctctgtctctctttttttttttttttgagacagagtctcacttcgtcacccaggctggagtgcagtggcacgattccagctcactgcaacctccacctcccaggttcaagtgattcttgtgcctcagcctcctgagcagctggaattacaggtgtgcaccactgcatctgactaatttttgtatttttagtagagatggcatttcaccatgttggccaggctggtctcaaactcctgacctcaggtgatacccgcctcagcctcccaaagtgctgggattacaggcgtgagccaccatgcctggttcctatctctattataataaaaatgaatttttttaaaaaaagaattagacaaaagcttttatgtgatttccccatgtcatgctagttactgtttcatagaacagcttcttgaattcactagtcatttttatacccatttatattacattcttactctagttcatttggccaaacaataaagaaaataggggtcagataatagttttcatacagtagttctgagttatattcttctacagtagtctccaaatgtattaacttataagctttaaaataatcctttagtcttgtgaattttaaatgtttacttcctgaagagataaatatgtgagtgcagaaaacaattgcttatctgttactcatcctcacttattgtgaggctgagtattgtattactgagtattatggtaaagttgaaggttacttccttcaacattatttataaaatgaattatgcatttatatataattttctacttctacctgttttttctattcctcttccttttcaatggcttaggtattgcagtttcttatttcacattctgataccatacaagcaattctgcgctgtcaggatgttagtgctgggtctttgcaggaattggctctgctgacaggaattataagtaaagcagcacttcctggtgagttgattatgttgaaaggatttttaataattctttaaagactgacataaattaatagaatgagtttttttgttactttgcagctatatatgacttatttgaaattggtactgctaacagagcctttatttatgtaataagtttatgtttataaaatgatacatgcttg

SEQ ID NO: 39347 - DNA, 2300 bp, Homo sapien
attcttactgggttggtgaagattccacatacagattttttgaggttatcctcattgatccattctatgaagttatcagaagaaatcctgacacccagtcgatcaccaaaccagtccacaagcagagggagatgtgtgggctgacatctgcaggccaaaggagctgtggccttggaaagtgccataagttccaccacactattgatggttcttgctgggcagcttggagaaggcgtgatactctccagctccaccgttaccactaatataagtaaagtttgggccaggcgtggtggctcacgcctgtaatcccagcactttgggaggccgaggcgggcggatcacaaggtcaggagatcgagaccatcctggctaacacgttgaaacctcgtctctactaaaaatacagaaaattagccgggcgtggtggcgggcgcctgtagtcccagctactcgggaggctgaggcaggagaatggcgtgaacccgggaggcggagcttgcagtgagccgagactgcgccactgcactccagcctgggtgacagagcgagactccgtctcaaaaaaaaaaaaaagtttgtaaaattcgtacctaataatttaggacagtcatgtctgcttacaggtgttatttgtctgttaaaactagtctgcagattgtttcatgaatgctttgtcaaattatgaaaattaaagtgcaataatttttgaagacaataagggatggtgtatcttgtttctaataagatgaactttttttgtctttgctttatcttattagggagttatatatcttattagggagttagtgtttaaaacatactgtgtggtataataggcttaaaataaattctttaaaagagaaagagagaaaaaaacacacacatacacagaccggaagactgacagaacagactctttgtggcgatgatacaaattgtcaacaggacctatggccatcccaggcaagaaacccagctaggccagtgaaactgagagccaacctgatgaggcctgccaaatgcaacttctctcacttgtttttagtcacctgcttttagtggattaaaaaacccacatagctaaagtcacagagctaaacaatatatatctaagctcccactatcttccttatggataacatctctgacatctgggttgcttgataaaggtttcttgtttttcaggaagttggggtcagttcttgtacagtttaaaccaccaacctctcaactgggcctgcatgaaagcccgatgggtgtccttctgacattagagggccaaaacctccacactcagatcatgctaaggatgtcattttgtgaccatgtatcctataaagagccatgaagcttgactacctcgcgcagataacccattgccaaacttttccttaccttcaaccgcctttccccacacctcagaccaccctgctcctctatcccataaatatccctaaaacccatctttggggaggcagatttgagatctgttctcccgtctcctcggctggctgcctggtgaataaaccttttctctgctacaaaactcatcatctcagtgactggcgtgcggcacacggcagcatgggccccatacggtacccagcctctaccttgattacacaacacctgattacacaacgctgattacacagcacacctgcggagctttgagagctacaagcctcctttcctccccgcaaagtccagctgggcccaagtagaggatgctgcaaaagcccccacgattcagctgcgaacctagggatgggacccgctgctcatgccgtccttctaggttagagagccctaaactgggctgtgtatcagaatagtccgcgtgctgagaataatatagattcctgggcctcggcccaggtttacagaggcgggatgctcaaggatgcccagccaggctcgggacttgctcttcgcaagtcctgtcgcgcgctcgctgccccgccggttcaggcggtgaggccaacgcgctccgccagggggaacctgggcgctgcgacactgcaagtcgtttccgggcgcgggctgagtgggaggagcggggcggggcgtggcgtgacccggaagtcgacgaggggttccgccccccccgcgcatggggaggtaggctcggaccggcccgcggagctgctgcagtccttcgcgccctcctcgccctccccaccgacatcatgctccagttcctggtgagtggagctgccgaagagcggggcccgctgcctggggcgtgcctcggaccccatttcccccttgaggattgccgaccccgccgacccggc

SEQ ID NO: 39348 - DNA, 2300 bp, Homo sapien
ctcccaaaatgctaggattacaggcgtgagccaccgtgcctggcccaggatctaaaaactttctaagtttcctccatcgttggcatcctcacagctatctccaatgtcactcaagagacatcaacagacatttaactgctgcagacttcattgctctgtcacctcaccttgaatctaacaaatcaaagtatttctgcaggtccaatggtctaaaatcaaatgcttgttaaatgactttttacaacaccccttactttcctaatccatttcaatcttattttttttattgtggtaaaaaacacatcaggtaaaatgtaccatcttaaccatttttaagcatatggtacagcagtgttaactccatgcatgttgtgaaacagacccccggaactttctcatcttgtaattctgaagttctatacccaccgaacaactcctcttttccccttccccctgcctgccccagctcttggcaccattattctgctttctgtttttgagagtctgactacttaagatacctcatacaagcgggatctggcttacatttcttgagcattgtattctggaaaagtgtttccttcctctgaaaaatgggtagagttctgaaggagaactactggtcttattgtacacttgctgtacctatttttatttaacaaatattcatctatggtataataaagatgtcatgattgagttgctcactggaatctttgttatctcagagtatctcaccgaggaatttggaatggttcatgggtttaacagtggatgttgacttccacagctgcttataattattcgctgtctttaatgtttgcgaccaaaacatcacacacgtggtattgttcattctgagtttcaaaatcataaccaaaaaaaaatgaggccagaatgtagtaaatacagtagccagtctttaacatgcatttaaagagttgagtcatcctagcccatcctacgatggcaagataatttcaaaggggacctcagctgtccacagttgcacctgccttaaaagtcaagaagaatttgttttttgggtcacttccctggtcactttagcctggggatcatttccaagtagtatagttgcagatcttcgaacgccattcctgtgttctgtgaattcaagacaacatgggttttataaccctttgactctgctcagcatctcccagatcaaggtaaggtaatgttgccaagaaccactacttacagaatgtttgggcttttgcttttgcttttcttccttgccccaaatccacatgtccgttctgagaaaagaagctaacaacttcttccaatctgtaaacaggagaaattccagagttcaactgcagctaagaccttgtccctgaacttgtcaacttcttccctgccctcccacctcctcctttcgtaccagccaaagaaggtcttcggtttcctttttggagagccccagagagaagcatttgagcacctactttagccagagagaccactgacatctgggcatgagactggcatctagactttgccagggaggcagctatacttcccaaaagatctggggtctttctcacgagctcataccctctgctggcctagaccctttatattcccccctcggtgctgaggcaaacgatctttgccagcagggaggtctgaaaggcttaactttgtacactctgaggcaaattctccagaagtaatgttgcattttctccctgccaccaggcacattcccttcccaaggtctagatcagcaggtggccctcccagcgaaagctctgtgtcctatgatccgaaacaataaagctgtgcttgggtacgtgagattatgtttacgatgatggtcatcactccagccctaggaagtttgagaaactgaaaaataagcttagcaggctgcctaggttctgcggaatcagcaggcccccgctgtgaccaatcaagagcggccgcggggagagaaattgactcattcttttcaatttgctgattggctttgagaagtgggcggagctactgtctctgtcccggcttcccattggtggatgaaagttaaaggtgggcctccagcaagttttgtcctttgataaaaaggaatgtcttggggacttttcttttctgctttgcaggcccaggctcaaggcaaattataagtagggaaccaatttgagggaaagacatgtgaacagagttaaggtaccacgtcctgggagcgaccagcagccccacctgaagtccgcatgcaactctgacaagctcaggtgcttgttttaaggaaaggggctactagagtcttacca

SEQ ID NO: 39349 - DNA, 2300 bp, Homo sapien
gtacttgaaacagggctggtgtgacttgagaagtgctataagtgtgaaatacacattagatttcaaagacctcatgtaaatattatatatatatatataaaatatcttgctaatactatatcacttacttgtagaaatgataatatcttggatatattgaattaaatgaaagatattattactattcattgcacttgtttctttttactttttctattttttatttttttgagatggagtttcactcgtgttgcccaggctagagtgcagtggcaccatctcgcctcaccacaaccttcacctcgcaggctcaagagactctcctgcctcagcctctcgagtagctgggattacaggtgtgcaccaccatgcccggctaatttttgtatttttaggagagacgaggttttgccatgttggccaggctggtcacgaactcctgacctcaggtgatccgcctgcctcggcctcccaaagtgctaggattacaggcgtgagccactgcacccagcctctttttacttttttttagtatgagttgtagaaaatgttaagtgacgtttgtgattcacgttacatttctgttggagagtgctgctggctagtgccctaacctcctagttcggtggatgcattaaatcagttaatgcaaggagggcacctagcacgctgtctgaagcaaattaagcacctaatagctattattaatattagtgagcgtactggttttcaaatgttgtagtctagtattttttcccccaaaaaaactggttgttttttttttaatttttttaagaggaaagttcttactctgtcacccaggctggagtagagtgttgtgatcatagctcactgcagccttgaactcctgggcctaaacaatccttctgcctcagccacctgagtgactaggactacaggcacatgccaccacgcccagctaattttttaattttttgtagagacagggtctattttctctaggttggtcttgaacttctggcctcaagcaattcccccacttcggcctcccaaagtgttgggattacaggcgtgaaccaccatgcccggctcccaaacaacttcttatagcagataaaagaggagcttttgcagtagagtagagctttgaggagccctcttggggagcccattcaccctgggcaccacctccacaaactggaaaacccacaggatgacataatctttaagtgtccttcaagctttagcattccctatcatttcagagaagttgaggaagtgattgggaaagaattaaggtgtctatggcagtatattacaacgactatggaaaaacactcccattttgcttgggaaaatcaaagtggcttggccccaggtctaggcacagcccagaaatgggagcatcaccaatgtgagttgtggggcttggccccaggtctaggcacagcccagaaatgggagcatcaccaatgtgagttgggggtccccgtgggctcctggatcattacctacgcacgttcacacagacaataccgatgcaccatgtcacctctccacttcggctcggtcacaacctgccaactccccacccacccagaacctgggcagaccagacacaggctctaggcgccaatgtcctagtctagctccagggccaggcaacagtgacactcagcccaggcaccacaatgattttgctgtcctgaaggcaacttaggctcaaccagccctggtgtctgccaggcaggctcccaactctgcctccagccctcgcccctggctctggtatcgtatgtgtggacggggagagcagccaactcttcgccgggctctctaacaagttccgcgggtctgtttgttaaagaaaaattccagtgggtgcatccaacacatggaactcaagtacagaaattatatttatccgccccactgccaaggagatcacatgccccgtgagtcactccagatgtgctcaaaaacagagtctctctgtggaaggccagttccccaatcccagagagcgtcaaatgaagagaggtaccgactcctgtcccacccaggacgcagccttcagcctccagccttctgaggcagagtaggcatttctgcacgtctgcaaaaggaagggagggaagcactccatcatctcactgggaagaacggcacgggcatacctgcagctactggggttccactgggcttgagggtcgatttttcaccttttgaaggacaagatgcattggaagatgttgctgcttctgctgttgtattacaatgctgaggcttctatgtgccacaggtggagcaggggtgag

SEQ ID NO: 39350 - DNA, 2300 bp, Homo sapien
gaggctatcatagcacatagcatcatagcagtgtagacagagatgacagtgacagggatgggggatatgtgagggtgcagggagtagtaatagtgaagatggcaagaaatgaacaaatttaagacatattttgaaatatttactgatggattgaataagagaaaagttgagaatgggaagagtgattatgactcccatgtttctggttttagtgatagggtggttggcagcgccatttacagagatatgtgggggacaactaggtttaacatctacaggagaccagatcctattctggacatgttaagtttgagaaatccaaatgagtaagaagttaaatataagaatagatcacataggaaaagtctagttaaagattttttttttagatgatcttgctctgtcacccaggctggaatgcagtggtgccatcatagcttactgtggcctcaaactccagggctcaagtaatcctcctgcctcagcttcccaagtagctgggaaggcagaagtccgccactgtacccaactaatttttttaatctttgtgttttgtagagatggtgtctcattttgttgccctggctggtctccaactcctggcttcaagcgatcttccagccttgtcctcccaaggtgctaggattacaggcatgagccactgcacccggccaaagatataaatcaagagctctcagcatgatgtaactcagaaatcacacaggtgggagtgtgttggagaagagatggagattctaggacttgcctaacaaattcccccttgagatttgtttccagaaatcgtatcactattgggtatgtggatttgtatttctaattatcagggagtaaaattaacaaatgacaatctaggtagatgttaatatttggagggatttcttctgatttgaaacccatttgctattctactctaaatgatagcaaaaaaaaaaaaaatacatttccaaacactattgacatccccattttacacaagtggaaaactgaagcagaagggggttcagtaacttgcccaagaagacacaaaattagcaagaagtgggacctgtatcgcaaactaaacaatttggctccagagtctgtttggaacccctacactgtacggcaatggtggtaaagtagcttagttaatgtgtttagtgggttacaaataatagattatatatatgagttttatatatagtaatagttatatatgtatatatattatacgtatatttctagctccaataagagcttttattggatctatgttcatgtgcgcatgcctggatcattagggttgtgaggaacaattcaagtggtagctatgcactatggcattacaactaaaccctaggaagaacagaactgacttcaccagaacagtcctgaagtttcaaaccattaaaaacaaacagtaaatttaaaaaacgcaaattgtactagacagtttggtttgctccactttacggcatcaaactgaatgcctggacgtcatttgctggtcaggaagatgagttaattttttttttcctgccacacacttaagttttttgctccagggaacattatacatagtgttaacacactcaatttacattgtagttttagtgttgaagatttcctggagggcaggaatagcgttattccatcgtttttagcccagtcagactggatgacggagagagggaggggtgaaaaggagggagggaaggggaaaaggcaaggaagaaggaattcaaattaaacactcttcctatacatttttagaagctgagcaagatgccctccaagattatgttttttaaaaagtaaagtttttcccattaatggtggtgcagaagcgtcctaatcccatcgaaagtactctcactcttcctccattcgctgtcttgacctcccccgggcctccttcattctgcctcccagtcccgcccacttgtcgccggctcctaccctccactctagccttcccggcagcctgtacattgcgcatgcgcactagtggcgttcgcgccgcggacccagagagaggcgttccgcggaggagaagaggaagaggaagttgggggagggtcctagcggggagtgaaccggaagtgtaaaggttcctgcctctcctcggccaggcggaacctctctgctgggcccggtggccgcaaaagaactttctttctcccgcccgaacggtcgccgcggccaactgcctcgcccgcctggcagcctaaccctccttctcttcttctcctctccggcttcgcgcggccctgcctccctctcgcccggcggcatccgct

SEQ ID NO: 39351 - DNA, 2300 bp, Homo sapien
tgggtagagtttccattttgcaagatgaaaagagtttaagagattggctgcactatttataatagcaaagacatggaatcaacccaaatgcccatcaatgatagacaggataaagaaaatgtggtacatatacaccatggaatactagcagccataaaaaggaatgagatcatgttctttgcaggcatatggatgaagctggaagccatcgtcctcagcaaactaacacaggaacagaaaagcaaacagcgtatgtctcactcataagtgggagttgaacaatgataacacatggacacagggaggggaacaacacctgttgggggttgggggcaaggggagggaacctagatgacgggtcaataggtgtagcaaaccaccaaggcacacgtatacctatgtaacaaacctgcacgttctgcacatgtattccagaacttaaagtaaaacaaaaattaaaaatacattttaaaaagaaagactggctacacagcaatgtaaatttacctcatactactgaattatacacccaaaaaatggttaagatggtaaattttatgttatgtgtattttaccacatttgaaaataaaatttaaagaaagttctcttccataggcttccagcaacagcatgagttttaaactctgtagcatgacatacaaagcttttatggtctcactacttcctatggaagagaagtaagcataaccaaaagcattcagttatgtttgagttccagaaaaagaaaaaaacagcagagtcaagaatcattttattttcaaatatattctgcagtggggaaatagaatggctcttgtcataagaaaatcacaaattgaagtttttgtaatgttggaatacaatgcttctttaagaaacagtaaaattactgtttacatcaactgatgcaatttttgaatcattaattttcacagtaaccattgttttatgacttatgttatttattcaaacgatgtttcacaagcatttggaactagggaatcttgtaaatcatactaatatgtgtaacaacaatgtaaactaaaaagtttatacacaaagacgattcttatcttttccccctgcatgtcaaaagcttgacagaagttctcaatctagttggcacacactttactgattcaaagctaatttccatttttaaagtgcaaagccatatttctgatcttatgttttcttctaaagaggagcatagatgctttgtttccagtttctcatgaccagccatacaacctaaactgtgggtcttgtattccagaataccaaaggagttgtccctcttttgtgttctcaaagggacccatacatgcttgtaaaatgtccctgattgatttttattcaaattgttgctggtttgtgtagcttctctgaaagaatataagcaaggagcaggcagaaactgtcctcttgatgcctgtatctgcagaattagcacagaacttgttacttgggagatattcaataatgttaatttagcataattgaagtggtaaactgagtaataaattgggtattcagaaagctatgttttaggagcattaatctggccaaaatgtgtaggatgaatcagagggcttatattagtttgctagagccactgcaatgaattcccacaaactgagtagctttaaaaaacattaattctcttaatgttttagagatcggaaatcccagatccattacactgggctgaaactaacatgtcagcaaggccaggctccctccagaggttctaagggagaattgtttcctttccttttcccgagcagcatttgtagtattgctgggctcatggcctccttcctccatcttcaaaactctctctcttgctggcttctctccttctctttctcttcttccactctctctctcttgctcttccttcctctttctctcagtctatcacattgccttctctcttttgtgtgtggttaaatctccctctgcctccctcttgtaagtaccctgtgtttaggtttagagcctataaggataatccagaaccatctccctcttgcaagatctttaactcatcacatctgcatagtccctattaccttagacagtaccattcacaggttccagggattaggacctggttatccttggggatcattagtcagcctaccacaggtgtgtagggtagaaacagatcagttaggaaactactacactactaacaattaactgctgaacatgatttcatagcagaagaaaagtaaagcaaaggatatgagatctgctatgaaacaagtgatagactatggtgaataattagacg

SEQ ID NO: 39352 - DNA, 2300 bp, Homo sapien
tttttgctttgatgggtgtgtgtctgtgtgtgtgttccaaaagactcaagcagcttcatgggtttatggaggctcagtagacagaaataatggagtaaaaaaggaaaatgtgaattcattctgaaaagagtgtctaagagaggagagatgacaaaatcagatatttaatgtagtggaacaaatgctgggagaggctgagaacaagacttagcagggctgttttgattttctcacaggtatcttataatcacccagtgatggtgggatgtaagtatggaggttgaaggcagagacacagtattgtaatgctgcattttaggatgacttcaatcaagcaaaatcaactttgtgtcaagtcctgcttggtgatagctatgagttaacaaaaagggcagaaactttcagctacagcatttccatttatcaataaatttacattgctataaaattaatcattggattgtcaactgttacatagatgtttcaaatgaagtgtcttttcttgtcaataggaatagaagcttataaaaacacagggacagtggtttttgctcttgtggatggcctttaatacctagcaaaaccctggacgtcaagaactgaactgaatttaattgactatattatattatatcaatgtatctttaacttgctctttgtctatccctgtgacccaaaaagtgatgtgtccaattctgggctattcaatttaaggtttccacttcttgctctttatttgattgaagttggatgagagaaaataaagcctatgtaatatataatatattgatgttatattcacatacacatatgcttttacaaaagcaagttttggcctaagctacactttagaatcctatcattgtacttttatcaaatgaggttagtatctaaaaataatagatacaattattggcagaaatttctcattaaaataaagaaataaacatcaaaggcaggtctgaacacagaaagtttgcatcctaaatcttttttcatggagatcacaaattccctgaagcatcaaacatatatatattctggagatatatatatatatatatatttttttttttgagagagatatatatatatatatttttgagatatatatatatattttctggatatatatatattttctggatatatatatattctggacatatatatattctggatatatatatcctggacatatatatatatattctggatatatatatcctggacatatatatatatatatattctggatatatatatatatattctggatatatatatcctggacatatatatatatatatatatatatatatatatattctggatatatatatcctggacatatatatatatatatattctggatatatatatattctggatatatatatatattctggatatatatatatatattctggatatatatatatatattctggatatatatatctatatattctggatatatatatcctggacatatatatatatattctagatatatatattctggatatacacatattctgaatatagatatagatacagatatagatatagatatattctgtagtctactgcccattagctgaagaaaacatggtcactggctcatatttaaagtaagagaaaaaaattacttctccttcggatacatttgtcaaagctccaaagaaataaacaatctgtgaatagttcagcacaattatatatttacaaagcatagtggatttagtctaacattttcccacctggaaaaactgggcttaagtatctccgacaaacaaaaagcaatactgcgttcttcccaatatgccatgtcacctttgtagcactcacacacttgcagggaagggactcggggttgggggtggttctgatgtagaaattgcagatggagagctgggctctggggatggaaatggagagaagcgaaaaagagcctggagaaacggctgtcatatttgctcagaagaaccgccaaatcagagagcacagaagatttcattggaggagcgccttcaacagcaactaatcctgtcatactgaaagaaaattgtaaatgttctctccagaaattgtccgcccattgcagctaatcgaacacacacgcacgaatacagacacgctctcctgctgtactaaaggcgccagggcgcaaagacctagggagcgcgcgcgggcacacacacacacacacacacacacacagacacacacacactcacacactccaggctgcgggttggccagagcctggaaatcgcagatttcaccaggaaatcgcc

SEQ ID NO: 39353 - DNA, 2300 bp, Homo sapien
tacattgctataaaattaatcattggattgtcaactgttacatagatgtttcaaatgaagtgtcttttcttgtcaataggaatagaagcttataaaaacacagggacagtggtttttgctcttgtggatggcctttaatacctagcaaaaccctggacgtcaagaactgaactgaatttaattgactatattatattatatcaatgtatctttaacttgctctttgtctatccctgtgacccaaaaagtgatgtgtccaattctgggctattcaatttaaggtttccacttcttgctctttatttgattgaagttggatgagagaaaataaagcctatgtaatatataatatattgatgttatattcacatacacatatgcttttacaaaagcaagttttggcctaagctacactttagaatcctatcattgtacttttatcaaatgaggttagtatctaaaaataatagatacaattattggcagaaatttctcattaaaataaagaaataaacatcaaaggcaggtctgaacacagaaagtttgcatcctaaatcttttttcatggagatcacaaattccctgaagcatcaaacatatatatattctggagatatatatatatatatatatttttttttttgagagagatatatatatatatatttttgagatatatatatatattttctggatatatatatattttctggatatatatatattctggacatatatatattctggatatatatatcctggacatatatatatatattctggatatatatatcctggacatatatatatatatatattctggatatatatatatatattctggatatatatatcctggacatatatatatatatatatatatatatatatatattctggatatatatatcctggacatatatatatatatatattctggatatatatatattctggatatatatatatattctggatatatatatatatattctggatatatatatatatattctggatatatatatctatatattctggatatatatatcctggacatatatatatatattctagatatatatattctggatatacacatattctgaatatagatatagatacagatatagatatagatatattctgtagtctactgcccattagctgaagaaaacatggtcactggctcatatttaaagtaagagaaaaaaattacttctccttcggatacatttgtcaaagctccaaagaaataaacaatctgtgaatagttcagcacaattatatatttacaaagcatagtggatttagtctaacattttcccacctggaaaaactgggcttaagtatctccgacaaacaaaaagcaatactgcgttcttcccaatatgccatgtcacctttgtagcactcacacacttgcagggaagggactcggggttgggggtggttctgatgtagaaattgcagatggagagctgggctctggggatggaaatggagagaagcgaaaaagagcctggagaaacggctgtcatatttgctcagaagaaccgccaaatcagagagcacagaagatttcattggaggagcgccttcaacagcaactaatcctgtcatactgaaagaaaattgtaaatgttctctccagaaattgtccgcccattgcagctaatcgaacacacacgcacgaatacagacacgctctcctgctgtactaaaggcgccagggcgcaaagacctagggagcgcgcgcgggcacacacacacacacacacacacacacagacacacacacactcacacactccaggctgcgggttggccagagcctggaaatcgcagatttcaccaggaaatcgccgaggtacccgaataggtgttgcctcccaaaactaattcctacttccccaagcactttggtgaagaaatgaatccagcccagctcgccgaggcatccaggtctccattctattttggtctccaggctcttcgtgaaagccaggtttgaaagtcttgtttgcttctcctttagtggtttggcgtggagggcgggggcagcgtcaatttaactccagtctaaaccacgaacaggtcacagactagccaagtggctgagacgagtgtggggtgcgtgactctgcctgcgcgcgcgccagccccgcagctctcgccagagccttggggtcggttctctcccgcctctcccgcctctcccgccccacccctacagtgtctcggcatcaactaatcttttccttttcttttgcaagatcaagggagaaagagaaccggca

SEQ ID NO: 39354 - DNA, 2300 bp, Homo sapien
aaaggaagagcacctgcgatatccacagtttacctgtctgataggatttctttagctccattgctcatttttgttcttatttggaatgtcaccctttagaatgaaaacaacagaaaaccttcaaagtatttattgtcctgcaacacattctcttctcccaaatcttattctggcattccgtacatttctttctcccacaaacccttcctgggctcttcctctttaagtctccccacctcatattcataaagaagtagaaggaaaaacaaaaatgcaaaaactaacctacatcctgttttctctcaaggccttcattttttcttaatagaccaaatgtcattgtttgcttaggagtaggaaacagccattttgggcctataatggagatctaaaatctcttttgccaacagctttttctagttatgtgacgttaatatagttttattttccccgctgatttctgagcttacattttgactggacttgaatgttctacagctgctttgcttctttggaaaaaacacaaccagttttctagctttattcccaggttgtatgggtatccagtcctatcctgtctctcggactgctactcctctaggtgttcagtcataggggccacaccataacattccattttggaagggacagagggaaattatctgtttctcttaacgtaaccatttaatttattgttttggggggatatttgtgaagagggtgacttggctgctgatatctctctctgtaaaaaacatatttctagcatttgagagcactctgcatttgcatgcaaaacaagagaagctcacctctttgtacagccaagtgggattgctacagacttaggatgctgctgcttaaaacggatttttacctaagccgtatcatatcttgtttttccacttcttcctttgactgctgaatccattccacattcagtgtacagattgacttggtaataaagatagataatcaatcactaagctggcagaaagacaaggaaggcatcccggcagagccatctgatccctgaggagagaaggatgtatggaagttggtggctggccagaaggaaacattcccttgagcatgaaacagggacatttttctctttgtacagttcatattatcagtttacatttgaatccttgaagtattacaagagttcctgagcagtaatttaccttccagatgttttggttatttttttttcaatcttggtttaatttctaggtttattttctaagttatcaaagcttattgcatgataatgtctgcattttgcaatttatcaaagctttttttattttttgagcaaaagaggtgtgattttttttgtatgatcagtctttgccaacataccaaggactcgtaaataaatgttccttaattttcattacttaatatgactaaaggagatgggtagtgtgaagaggaactggataattttaagccgtggctaacacaaaaaccatagccaaattgaatgattctgtaggtgcactaaccagtttacagaataatgtaactaaaacagcataaacctggggaagacatcctacagcccttttagtttctcaattctctttgtttctctagtaaattttctgttaattcatctcgggtttgcgaatacacagttttactgcattcaaatggtattgagtttgctttgttgtttcctgacactatagcagtagtgcaagtaaaatcagattttgttgttttgaacatagctagattttatatttttaacattttctttttcttttcttttctttctttttccatcatccaaagtctttaataagaggataggatctatagtttttgtagcctcggctggccagtcggcctctggtgcgctcgaacttccggcccttggagcggatgtatggtttggtgtggctgtacggggttcccggtgccttgccaaaatgccggtacacctctcagcccttgcgaggaccagagagcaggacggtgccacagcctttcggggcatcaggggccagctggtcaaaagtgaggatcttgcccccggccccgaggatgccgctgcgggcctggctggtcatgcgcagtgcacacaccttcagtttgggcacctcctgaacccgtacgtcatccgttatggtccccacagccacagcctttctgttttcccggtcaggaagctttatgttctggatcatccaggagagggacagaggtggtcggttggtgcgactcataaacaacctcttcagcacaacctggttgaatgtggagttgttccgtctgaccagaaacctgta

SEQ ID NO: 39355 - DNA, 2300 bp, Homo sapien
tgtctcttttgatctttgttggtttaaagtctgttttatcagagactcgttttgcaactcctgcctttttttgttttccatttgcttggtagatcttcctccatccttttattttgagcctatatgtgtctctgcacatgagatgggtttcctgaatacagcacaccgatgggtcttgactctttatccaatttgccagtctgtgtcttttaattggagcatttagtccatttacatttaaagttaatattgttgtgtgtgaatttgatcctgtcattatgatgttaactggttattttgcttgttagttgatgcggtttcttcctagtctcgatggtctttacattttggcatgattttgcagtggctggtactggttgttcctttccatgtttagtgcttcctttaggagctcttttagggcaggcctggtggtgacaaaatctctcagcatttgcttgtctgtaaagtattttatttctccttcgcttatgaagcttagtttggctggatgtgaaattctggtttgaaaattcttgtctttaagaatgttgaatattggcccccactctcttctggcttgtagggtttctgccaagagatccgctgttattctgatgggcttccctttgagggtaacccgacctttctctctggctgcccttaacattttttccttcatttcaactttggtgaatctgacagttatgtgtcttggagttgctcttctcgaggagtatctttgtggcgttctctgtatttcctgaatctgaacgttggcctgccttgctagattggggaagttctcctggataatatcctgctgagtgctttccatcttggttctattctccccatcactttcaggtacaccagtcagatgtagatttggtcttttcacatagtcccatatttcttggaggctttgctcatttctttttattcttttttctctaaacttcccttctcgcttcatttcattcatttcatcttccatcgctgataccctttcttccagttgatcgcatcggctcctgaggcttctgcattcttcacgtagttctcgagccttggttttcagctccatcagctcctttaagcacttctctgtattggttattctagttatacattcttctaattttttttcaagttttcaacttctttgcctttggtttgaatgtcctcccgtagctcagagtaatttgatcgtctgaagccttcttctctcagctcgtcaaagtcattctccatccagctttgttccgttgctggtgaggaactgcgttcctttggaggaggagaggcgctctgctgtttagagtttccagtttttctgttctgctttttccccatctttgtggtttcatctacttttggtctttgatgatggtaatgtacagatgggtttttggtgtggatgtcctttctgtttgttagttttccttctaacagacaggaccctcagctgcaggtctgttggaataccctgccttgtgaggtgtcactgtgcccctgctggggggtgcctcccagttaggctgctcaggggtcaggggtcagggacccacttgaggaggcagtctgcccgttctcagatctccagctgtgtgctgggagaaccactgctctcttcaaagctgtcagacagggacatttaagtctgcagaggttactgctgtctttttgtttgtctgtgccctgcccccagaggtggagcctacacaggcaggcaggcctccttgagctgtggtgggctccgcccagttggagcttccaggttgctttgtttacctaatcaagcctgggcaatggcgggcgcccctcccccagcctcgctgccgccttgcagtttgatctcagactgctgtgctagcaatcagcgagactctgtgggtgtaggaccctccgagccaggtgcggcatataatctcgtggtgcgccgttttttaagcctgtcggaaaagcgcagtattcgggtgggagcgaccggattttccaggtgccgtccatcacccctttctttgactcggaaagggaactccctgaccccttgcgcttcccaaatgaggcaatgtctcaccctgcttcggctcgtgcacggtgcgcgcacccactgacctgcgcccactgtctggcactccctagtgagatgaacccggtacctcagatggaaatgcagaaatcacccgtcttctgcgttgctcacgctgggagctgtggaccagagctgttcctattcggccatcttggctcctcccccggtaatttttaaaattagtattatttttaattgacaa

SEQ ID NO: 39356 - DNA, 2300 bp, Homo sapien
gtcaagtggtgtaatggaagagaactttataaaggcaggccaaggtcacctttcattaataacaggggcctcatgcctttcaaacaggagggggcagattttgaaaatgacccatgccagatagcagaggatcgagccgtcccaaaagagagtggagattactttcctttctgcagaaaatggccaggcaattcagcaagagcataagcaggagaggaaagccctcctggggagcattgggttgcagactgggctgccagagcattacctttccagcaaattagccggctgccgggtttggtgagcatcataaatctctaagaacagggctgcactcatgaggtaacccaggtgtttgaccgtctaggatgtggaaatacgcaaggcagtggcgcctgtgccaaatgggtcacagccacccctcggtgctggagtttcccaggccccttagtggaactgctcacaattaactgctttgtctgtccccaagcccggcctctccattggaggtggggttctctcaggttggtggtctctctctttctctcccctactctctcatttccacaaatgcatgcaatcttaatcagaaattacatcagtcacctagagtgtttctgaggctgtgtttgtgaatctgtcactccatatgtcaggcttgatgaaaatcggcctgggtgagtcagggagagcaggggctggccattcagatggaggctctgcttcctctgctcctgggagttgcctccagccatggagagctttcttcattccacctttgggtaccctcggtgcagaaatcagaatatgatttttaggtttttttcctatgtggttagtgaaagttaaatttgaatatcaagaattttataaatgcccaaccacctccaaaatcataatgacttctttaaattttctaactaactgagaagtgggtgtatgtgggtaaagagtgtgggaggaatcctagagatcccccatgtggcaacccctatacttcacatctcctgaccacacacatgcgagtgccatctttgggaaattctatagactttggaactttactgagttccttttcatcccagaaactgtaaaatgttctcatcctacagcatttgttgtatttattttgatcgtgtgtttattttctttctgtctctgaattgtatagggccttctggaaagaatcctgtacttaaatgataattatatgtggggcattcaatacttaaacaatactgcattgtagagaactctggttttctttttcagggggtgggggaaggcgtcgtccctctctcaaatattatagtttatagtctttgcaggaagatgcgtcaactgaggcatgagtgaccaaagacaggtgagcgaggttcaggatgagtaagtaccctgggagttcaaggagtgggtggccaggtaggcaacagggctgaaagaaaattttctagacaagatagacttgaccctttctttacaagagtaatcatggccaggcactgtggttgacgcctacaatctcagcactttgggaggccaaggtgggtggatcacttgaagccaggagtttgagaccagcctgaccaatatagtgaaacctcatctctactgaaaataaaaaaaatcagccaggcatggcggcacatgcctgtaatcccagctacttgggaggctgaggcaggagaattgcttgaacctaggtggcagaggttgcagtgtgctgagatcatgccactgcactccagaccgggcaacagtgtgagactcgtcttaataatagataaataaaagagtaatctagtggctgagagcacattgaagaaaaggctgtgaatgaaccaggtatttcaacacttcatctctctcttgctggccctaattgtaactccagcgattccagagacttcagagcagaaaaaccaggtagaatcctacagattctttcatacagcattttatcatctgtggctccacattaagtattaacttttttatatatttgtgctcatcgtatataattttaagaaaataaatggtaggctctaagtttcatttaactttctatttccaggactttgaaagatgagacaagtaaatgtgtatgctgcgaattaatacgtgaatgaacaaatgactacaggcattatccgaatgatatgatcttccttccccatctttctgggtgtcggccttcattcaccatgaagttgtaaacacaacattgattttggagtcagacaacctaagttcaaatctagcctttgctaattactggctgaaatcattgagaaatctac

SEQ ID NO: 39357 - DNA, 2300 bp, Homo sapien
gtctaaaaaggggaagaaccctcagttccgggagctgccaacccctttccaggaaaattcatgaataacctaccccttgtttagcatacaatcaggaaatgaccaaacagatggacagccagaagccactggggctgctttgcctatggagtagctagctattctttattcctttacctctctaattaacttgctttcactttactctatgaacttgccctgaattctttcttgcaactgagatccaagaaccctctcttggggtctggaccgggaccgctttctggtaacaaaggctgtcctatgcattgtatgatgttttacagcatccccggcttctacccactagatccagagcaaccccttccaccaagttgcgacaaccaagactacctccagacattattcccttttcctggagggcaaaactgctcccaattgataatcactgatgtatacaattttagtatatacccatctgaataaagggtgatatttttggtgtaacatatgtaattgagtagaaatcatgggaatctcatgcttactttatcagccctatagagaacacctcaatcaagccagcattgttcacctaactggtagctagctgtatgttacatttgtatatgttaacataaagctgaagaacagaaagaaaatggatagctctttgttcaatgccttagaaactttgcccctatggagtgttaatagaatgctgagatatcttttttggtaaagggactgggaaaaatgccaaaaaaaaatgctaatgtgcgtttctccacactttatacaggtgaaatctgattaaaacaagcactgcttgcttcacacagaagtggaatcacaaaaggaaaacaggtaacctgaagcctgtgtgtaggagaaaggaacacagcttccttatttagttatttcatttgagaattgtatgtggtatgtatatgaagagtttgggaagggggataaattgtaggtgtgtaagtgcatctctgatgcctttccttttgaaaagcttgattgactgcttgattgagtttgtagagccacgtctggctccagtcaacttctccaagggacatttctacaggtagctgtcaatagaagagccccaagtccctaaaaactacttgccacaagacaatgcttctaatttggggatttaaggatagttctaagtaaacaaattgcttaataaatatttgtcaaattgaaatgaagggatgtaacctcagaattatgaaaaatgtggtctattttacaaccaatttgggaaggacgccatcaaatgataagctgaccagtaaaggtaaaagtaggtaaaaggagctagccacggagcaggaaaagctgataagtggcagaaaatctcgaaatttacatttcgaaaatgtttgggtgaatttgtataatacatcttaatccttttacacaatacttttatctcatctttatcataaatatttacctatgcattgccttagcgtctttcctgtattgaatgaaatgacaattccagagacgcaaagcccagcctccaagttttacaaacctcagagtttgagctactttgacgaatcctctaaattcttgggtgtcaaaggcatgttactaaataggttgctaaaggcaccaaggaaaccaaaaaaggaaagagctctccctaaaggtaagtagcacttaattgggaactttgagacgtctgtcactctttgtgacaattgagaaaaagtactttgtacattttgtgctttgcaggtgagatgtgactgacaccttactgtctctgtgtttagagagggctttcgtgggtggaagaagaggctggtttgaagagagtgcttttccattctgaatatcattaaaggattgtggggggccaaaaatgtaacctaaaatgccatcaattgtccatttaaaatatcctatttggcaaagtggctttgcactcatctgaagaatagatcatgggtggagtttggaaaagaaatgttgtgtttcgtctctgctaaaaacaaaacaaggtaccatctcatggcctcttggttcaaatccgttttcttgctccgcagggagagactgcccctggagtattctgcttttaataagcttcccaatcagctctcgagtgcaaagcgctctccctccctcgcccagccttcgtcctcctggcccgctcctctcatccctcccattctccatttcccttccgttccctccctgtcagggcgtaattgagtcaaaggcaggatcaggttccccgccttccagtccaaaaatcccgccaagagagc

SEQ ID NO: 39358 - DNA, 2300 bp, Homo sapien
ctctcttgtccttagacacattagagtcaggaggaagcagacaatgtttagattctgttcccaccctctcctgagaagggtggggtgggaggagatgttgtcagaaagctgctggggtatgttacagttatcttcagaggtgccaaaccagcttccaaccccgcctagttttgtctcccattttctaaaactgggatcagaagtccttatttggatttcctaaaaataagtagctgtggctgagcccttactcaattaccacagggagatattgcatatccgggatcacgagataagtgaggtgccttgcttataagccccacgtgctaagactaaacgtggctctcatgtgacttgccttcacaatccagagctccctcatgtttcaacttatgcttaaaaagaaaaaaaagaagtccacatttacaaaatccagatggattatgtctcaacagaagctgttggccggggttcccagagtcactaggataaagctggcagcttggcttttcctaaagggtccttcctcctggctctccgggtatgtctccgttgtctggattttagaataatgtgccttttctatttcttcacccttttttttagaaagtgggctggcaactatattgcagagactgatttctaaaggcaagccacccatcctttattgcttcacaactgtgctgggtttaattatttcttttttcattttgtctacagaatgctaaaatgtgatggctacatcgtcaggataaataagcttgtgaagtattattttctccaacttcatctctttattttatctatttcttttctgtgtccactgtcgcccattcttcctcaatctctcacatttcaaactgctttgccctcattttgttgcagttcttaaaagttaacagtaggtggcagtaaaattttatactcgaaagacattcaggcgactcagcaaactgaggagggtatacagaaagtatggaattgtaaatgctaaaggtaaaacagcgtttttttaaaattagtttttagactttttaattgactaattgcatatatttattgtgtacaacatgattttttgaagtacgtatacattgttgaatggctaaacctggctgatcaatgaatgcattacatcacacagttatttttgtggtgaggacacttaatatgcactctctgtgcattttttaagaatatattatatcatcattaaccaaagtcaccatgttgtacaatggatctcttgaacttagtctgctgaactgtaattatacgtcctttgaccaatatctccccaacctgaacagtgctattttctaaaagccaaatatatctaaatataggaatctatttaaaaaaaaaaaaaacaagatatttcaagcccagctcacatgggggtcatcaaggcatatatttgggtaggtgagtcttaaagactgggaaattatgataataaagggaattggtagaaatttgtatcaaatgaggaactcaccaagcagcctttattatttacatgctggaaatgatttccttccctccacacaaatgctcatctctgtcttcttcctttcattttgctctttctgcaccccttccctctgttggtcatgaatgttacctttgaggctgcttggcattccctgaatgggtttgtgaccacttgaatagagaatgtgtttgtctttctctcatttcaatgccactctgtgtgtttgctgtaactttcatctctcactctcattctcgcctgctctcttttactgtatgtgctttgttcactgttttaagagaaatattcacaattagaaggaccaaaagcaaacaaagagaggattatgtagtcgatggagatttgcagtgctgtgggatttctggtcctattttacctaattagagatgctttggggctagagtgataatggtgaagatgtcacacagatccatggtctcattctttctcccttgggtcctccaaatgatgtcataggcctggcaaactagttctccaggataggcaatgcacccttgagagatgctcaagggaagaaagctattgcacagagatgataatctgcagccatgctttcacagcacagtaaatcatacctttgctcacttgatttgaatgaagattcttgtctaccaacagttttaggaaatagatggaatttgtgtagcatcaccacttcacggtaaaacagaagaaaaagatgaggtttctgcagttgtgatgcagaccgttgaaatgtgcctggagagaatgcccaactgggaaatcggttttcattcgggac

SEQ ID NO: 39359 - DNA, 2300 bp, Homo sapien
aagtttagtacaatggtgcaatgggagctatgggaggtacgtccatcacagtctagaaagggatcatcaacggaggcttctagtggggagaaacatggggagagacatgtaaactaaaatccgatggaggtgtagagtagttggcttggcaaatcttaggaaaaggagaagcaaagaagaggagacagcagactcacacgtgcaaaaatgggaatggagagagcagagagcgtgtggggtttgcacaaagaacagttcagaacctcactgtcatgacagtatgaagggaaagcgggcagtactccaccacccaccaatgtagccctcaaaatcagctgagttgtttgaactttaccctaacggcaatatgacataatcaaaagatttttaagtggaggcgtgaaaaatcagaagtattttggggctcacacttgagattggattggggaagatacggctaaaagtaagtgggagtaatgagggggctgtcccagtaattgggttcagatgacatttgcttgattttagggatgtacgagatattcgtggatcttgtgttgaagcacctaatacacgatgtcccttctgaagacgggtgcattaaactggggtgaagcacaaaggccactgagcagcctggcttgactcctggctttgccagtttgcatttgcacgtgtccaagcccttgagaggtgctgtgaaaacatagaggtggatgagggaagtgcttatacagcacataccgtataaaaagagggcttcatacttgctagttgttttaatttttattattacttttcctcgctgcacatggaaatgtctttacctttgtcttattataaggtacatacgaggagagttacagaacatgggtgttagaagagatttgacatatctgttcattttcctaattttagtgatgagaaaataaagggaaagaaagcaatttagatttttgccagtattacaattctttgttcacgggcacaccacgccagcctgaaactgttcattggtctggttctcttaccacctcgtatatgtaggtttatagtttggttacgaacaccaccttgtcttaaccatagatagttcctgtgtttgccgacagcagcgatttcttgtgtggaaacccctaatttgggaaacaatctgttttaaacactttgtagcacatcactcaaaccgcacagttttcgataatcttagaaacaaaaactggggttgaggcggacagttaaattctgcagacaccacaagcttggattcgtttcagcagtcggtcctaagtggtttgaagccccttccgggatgcctcttcttatacgaacaacgcagcggcgccaggcgccagggtcctcacttctgcctcctggatttcctccgcctttctgcttcaccgagggccctgtgatccgattccatcgaattaaccgctgtttaccgagggtctgctgcgcctaaggaaggcaccgggcgacgagcaaggcggggacgcagtttggggacgcaggggtccgggccccagtccagagacaggaggtcggcgcttcgacttggcacccgccgacgaattcactccaaggttcccactggcggagctcctgctacctcccccctcccctaaatgcagctcccgctaccttcccgcgcccaggggctgctgcctgagcccagctctgctcactggagggcggcggtggagagggtgctggcccagcgtcggcagctgggctcaggaccaaggtgggcgcccgccggtcctggtccccccagcctcacggtgcaggacccagggcgcggccactcgagttccccggacgctctccttcctgatgctcgctgtccctgccctggcgtccccagcccggggtcgcagcctgtcctcctctctctccccctccgccgcagcccgtcgcctccgggcagagttcatgttcagcttgggctttcgctcgggatttaggaagaggccggcggggctggagggtgcgggccggcgcgggagggcgcgggaggcggggagcggcggcctctgattggccggggcgggggagtgagcggagtttcccacaatgccccggtgcggtgcagccgcggatggatgctgcgggaaggggctgccatttgctgcccctgccagcggcgcgcggacctgcccgcgctcctgcagccgccgccgccgccgccgccagcccgcccggcccctgcagcggcgccgcctgcgctccctccgcggccgccggagcgggcgccatgaaccccagctcctcggcgggagaggagaaaggggcgacgg

SEQ ID NO: 39360 - DNA, 2300 bp, Homo sapien
tgcaaaaacacttgaaggcaatctttgttcttttgaaaagtctgtaatatcaggcgggctgttagaaaaagatgaattaaatacagttttgtcttagccctggaagttagttctttagctaacaaaccaagatatttttaagatgggcatgaggccccagacccagaaatgaacttcatgtggatctggggaaaggagtggctggtggttcctggctgtttctcaaagctactattgaaagtttagtgcttctatcacctgacttaagtactggtaatgcagcattaagtatagttggctctccatatctgggggttcagcgtcctcagattcaaccaaccatgggtctaaaatattcagaaaaaaacttcaataggctgggtgtgatggctcactcttataatccccgtgctttgggaggccaaggtgagaggattgcttgagctcaggagttcaagaccagcctgggcaacatagccagaccccctaaaaaataaaaaaaaattagccaggcatggtggtgcacatctgtggtcccagctactcaggaggctgagaggggagaatcacttgagcccaggaagttgaggctgcagtgagctgtgattgtgccactgcactatagccttgatgatagagtgagactctgtctcaaaaaaccaaagccaaaaccaaacaactcaataaaaaaaaactacaacaataaaaaataatacaactataaatacaagataacacatatttacatagtatttacattgtgtttggtattataaataacctagagatgattaacatatactggaggatatgtaaaggttatatacaaatactacaccattttttaatcagggactcgagcatctggagattttggtatctgtggggagttctggaactaatcccccctgaataccgtgggaagactgtagtcccatgctgtcccaccattttctatgggcatccagggtcaagatgttcctatgaaagtctctttactgtctcttttgggcatgcgtgccccagcaccaggattcctagtcctgggctctcgtcctgccctttgcttaagtctcttcacttcttatcagtcctggtaagagtgtagctgggagtatccagattactgtagtatagagggagaagtatgatgggcattgagaacactagggaggaggtgagaggaaagaggttgtaacaccctaaaagagggtcatattttgtactgtcactattcatctttcattattcaggcactcatcactcagctccctcttttttttttttttttttggagacagagtctcgctctgtggcccaggctggagtgctgtggcatgatcttggctcactgcaacctctgcctcccaggttcaagtgactcttctgtctcagcctcccaagtagctcggattacaggcacacaccaccatgctcagctaatttttgcatttttagtagagatggggtttcaccatgttggccaggctattcttgagctcctgacctcaagtgatctgcctgcctcagcctcccaaattactgggattatagacatgagccactacgcccggccccagctccttctatttttcttttttttttttttttttgagacagatcttgctctgtcacaaggctggggtgcagtggcgatcttggctcactgcaacatctgactcctgggttcaagcgattctcctgcctcagcctcccgagtagctgggattacaggcacgtgccaccacgcccagctaatttttgtatttttagtagagacagggtttcaccatgtcggccaggatggtctctatctcctgaccttgtgatccgcctgcttcggcctcccaaagtgctgggattacaggcgtgagccaccgtgcccggcctatttttttttttttcttaagtctcttcatccttctttcaatactttcccacacttccatggggtggcagatccccccaaccctccttttcctcatccccacctacctccaccctagctcctagcttagtgtttgctctatggataataattttcttctttctccctcctttgtagagtggagtcttgttcaactgagaacttggagcttcggaagaaggtagaggttctagagaacactaataggtaagtgtcactggactgagagctgattgcgctaccaatggaagatggggaaggaagaggatagaatccagaaccagggatggcagaaaagtggaggaggtcacagtgaaagtgcagttgtgctgagatgctcagcatggccaaactccacccacccactcctgct

SEQ ID NO: 39361 - DNA, 2300 bp, Homo sapien
acttaggtgtccaagtgaatcccaagaattgtattgcttaccccaagcctcattatttgccatcgttctcttattgctgtgtctgctttcttaacttcctttctatactagaagtgtccctaaagtttaatcagtaaggatgacacccattggtctgtgattcagagaatgttaagaaggcagaaatctctaatagctagtgccaaagtgggctttaaaatttcattttattggccgggcacagtggctcacgcctgtaatcccagcactttgggaggccaagacgggcggatcacgaggtcaggagattgagaccatcctggctaacatggtgaaaccctgtctctactacaaatacaaaacaaaaattagccagacgtggtggcgggtgcctgtagtcccagctactcaggaggctgagacaggagaatggcgggaacctgggaggcggagcttgcagtggagatcgcgccattgcactccagcctgggcgacagagcaagactccgtctcaaaaaaaaaattattttaattaattaattaatttatttatttattttgagatggagtcttgcactgttgcccgggctggagtgcagtggctcgatcttggctcactgcaagctctgcctcctaggttcaagcgattctcctgcctcagcctcccgagtagctgggattacaggtgcctgccaccacacccagctaatttttttttttttgtatatttagtaaagacagggtttcactatgttggccaggctggtctcaaactcctgaccttgtgatccgcccaccttggcctcccaaagtcctgggattacaagcatgagccaccgtgcctggccctattttatattattattattatttctaatatagtcaatagcagtgattctaaaccaggggtgactttttcacctacagacatttgggcagtgtctggaaatatttttggtttcacaactgggggagtgctaccggcatctagtgggtggaggccgggaatgctgctaaatatcctacaatgcacaaaacaatgccccacccctgcccttcacaacgaattatccagtccaaaatgttattagtgccaggttgagaaaccctgctctgaagatcctcataccatgaatatagacctatcaaggagggagagtggatggggctgcagctcctttagagtggtacagtgtcacaggggatatgggaatcccggggaatttatatgggctagtcctatattatgtccaaagcatggtgggggctggaaagttcatggtattagagatgaaggatgggagcatattaaggaaaaaccagagaggaacaaagtctagcccatggggagactagagagaagccacctctaatgtttttgagcatggcaccttagtgtaaactgcacctttgtgctatagaaacagaggattgcttatttaaacatattatcagtgcaaaatgtggtaggtcatgatagcaaggacccccagtgaatcatgccccccgcactgtccacactcgtctgcattgtgactctgccattcctctcatcaagcagtggagtctgttttcccgccccatgggtgtgagctggtcttgtcccttgccttgaccaaaagaatgtggagggtgtaatgatgcgtgatgtctggggccactcagctttggtttttctccctcatggaagatttctgccatcatgggaggaagcccggcctgatctttccttttgagaaagaggcccaagtgtccaggggtcccagcccagcacactcccagccagccttcccactaatgtgctgtgtcagggaacacagatgaaatcagctcacccacccagcccaacccacggaggagggagaagtaatatattaatattatggttaccttcagccactaaacattggggtggtttgctacacagcacgagctaactggacattgtgtgtgtagaagggacttcatatcgagcagtggatgaggtatttggtatgtgcgtagggtatctgtcacattatggttaagagaaactgagttcttcctcctttgtttcttgtagcacttctcagaacttctggatgagttttcccagaacgtcttgggtcagctcctgaatgatcctttcctctcagagaagagtgtgtcaatggaggtggaaccttccccgacgtccccggcgcctctcatccaggctgagcacagctactccctgtgcgaggagcctcgggcccagtcgcccttcacccacattaccaccagtgacagcttcaatgacggtaaactcagaggaggaggaa

SEQ ID NO: 39362 - DNA, 2300 bp, Homo sapien
aaatttagggctgactgactccaaagctacattgccacaatgccatactgtgaccattaggattgcaatgaaggtgttgtgtttataagaataaagggagacaaaactttatgggatagttgcaggatgtttaattcagaatcttaagataatggggagataaaacttgacacaaatttttaagggaagttgccatgtgtattctctgaactgggtgaagaacatttatgttgtgaggcaggggttcaatcctattaggaggtttcttccaactgagagattctgtgatgttgcttgaatcctttggcagaaacatgcattaaggccgaataagtatctccatccttattgctgatgtatcacagcaagtgataccaggagcctctccttctaacaaactcttggcatgtttctacaggtttagtgcaggagaccatgtgttcatagcggatgaccgtctgtgagcctatctttatctagctttagaggctgacacaaatgagggagcatgctgtagaaagtgcctgtgatttggaactggctgaacatgggctagaatatcagtttcacctttcatcagctgtgcatctcagggcaaaatagctaattatcctgagccccagttttctgatctgtaaatggggacatgttttcattttctgaaaatcgagtatgtcaagtacttagtccatcacacaagtctagcacctaatcctgacaacatcattatccatgatcatcaccatcatggttttacacttgttagaacctctccatacagttgtattgtgaggcttaaatatctctttcctaggagaaacaataaggaaaaaaaattcagtcaatttgacatgagtaccctagctcaaggtctctcagtaggggacagagatcttggacaatggactaaaagccaatttacaggattgtcgtgagtattgagtgagaaaaaggttatgaaattattttgtaaactcataaagtttgattcaaatattagaatgctaaaatgttattatgccattgcctttgaaggaattaaactaaaatcccataacccttgggttcacatgagcagtacttcgctaaagcgtttgcagtatccagaaaggcttcctcctcgaggctcactttgctcctttctctggtttttggccttcaggaccataaggcccctttccaactggctggcattaaagatgggcccactctggcccgatcctggcaccagcaatgggatgttgacctgtctgctgagtcttggagcccaccactgccaaggacacccagctggagctaatttgctgggctgagtcatagcatctggttggaaccggtttcttttccatcacaaggatctccctgaacctactgagagctcaccaccttgctaaattcttgggtgtgggtgggtgtttaggcacagttagacttctgaggaggatccttttccagaggggaggttatgataataaacttgataacaactgtgaatgcttcaaaactgtctatcgttagtgctgaatggtttgtaacatgagaattactgcataatccaaagtagggggagttcagggaaagttagcagagttagagaacgtttattattggttatccaggggatgttcatgaaaacattcattagtgctgctcagaagaaagaaaacagagtgtcagcagagtgcgccaacctgggcaacttccataggaaagcctggccaatcaaagagagcgttgcctcgggatagaatgggattccagagctttagtggccagcacagcagatcgggacttgaccttgtagttcagggaacaaaactgtggcttggaaatgcagggactgtgggtttacctcttgcatttgcgtgttacattctgttatttatttctctttttgttaacttagttttgtcttcaaaggatctctgtcaaacagttgtagaatagtcaccatcaggcaaccaggaaatttgtccttggggagctacttaagcaatcagatgctgacttagattgttgtataatcaggaagtctggttctaatcttagccttgccactgttctgctccttgctgcccagagtgtggtctgtggagtcacagcgttacctgggagctgatgaaaaatgcagaatctcgggcctgcttagacctgtgagtcagaagcgacggcttaggagccccaggtaatttatctgcacataaaactttgagcactgacctaagtggtaaactctggcagggcatgggcattttctagtttcttatttattattttgtatccccagcgtctgtctgaag

SEQ ID NO: 39363 - DNA, 2300 bp, Homo sapien
tagcctgtcagtagaaactcctggagcacccattcatcaaaagatatttgaggaacaacatactccaagttctttactgaggacaggaagcacatctggtaccccaacctccgtgctgcccacatagtgtccccatgacaagctcagcaagcaaagcccagaagatcacactgaacatctggcttttgccccagcatgaactaccactccctctcagccctgcactctgcattttttttaaacaagccactctcagccaccacaaatacttcggtgggaatcagcagggaggccctcattccttgtctcaaaataacgtcagccagagtcaaaggccaaagaggtggagcctgcaggccattttgcgaaagtttcaaatatcttggtactgaccccattaaaaaagcgtgaaggggaagcagccaagcctccagtggttttctcattagtgtcccccctcaccccagccccacccccattacaaacgtctgcatggataagaatcaaacaaagagatcttgcataaagtcctatgatcagtgctggctattgaaaacaaaatttcattttgcaaacttaataccaaaaacttgacattaaaaactttaaaagaaatgtgcgtgctctgggacagcttaatcccccaagagatctctgaggcattagtataagactgaacaagcaactggtgagctgtcccaccttccccagagcctttcttaaatatgcaactgtctcagattttccatactcctctgctggtttttcctccgaagagggaggaaggagacttcttggtcgtacagtttaagaaagcaaataaagccgcctttctccctaacgtagaggagccctttcaacacacacacacacacacacacacacacacacacacacacacacgtgtactttttaaaatataaatatgaaagaagaggaagggagggagagagggagagagaatacgagacagatgaaaaggaaatgctacttaatcttgtccagtttttgaaaacctcaaaaaaaaatcaatagcaaactaggcggaggcatgttattctcaaaacacacactccctctcccgcattacagtactgttaacaacagcaaatgatattacagatggaaaaagcctcagggaaaaaagcatgaattgttaaaggaatacaaagtggcattactctcatgagaaatgtaaaggggccagctgcccgccttcatctgctcagacattaaagtacacctcgcccaggacctcttgattctgaccatgccctgccccaaaccctgccttcccgggtcccaggactccagctgctcctcgcgtgacaacacttgcccgctttgaaagccctcctgccccgcccgccgggtcctcaccgtgtggtacatgagggcctcgccgtccccgggctctgacagctcgctcagcttgcggtcccactgcagcacgccctgctccccgctctccagcacctccatggcggtgcgggccgcgctgggccgaggatgctaagcgcaggaggggacgcgcagagctgcctcggaccggcaaggttcctctctctccgcgtgtgcttgcgtgtgtgcgcgcgcgtgtctgtagttttgcacttggaaagcaaacgtctgctcctctgccggagagaggatggccaagcgctcccgtccggtgtcctcggagatccgagaatccccagggacacgagccggaccaaaggctgccggggctaaagcgggatgtgcatccaaaatgaaggcagaagacccgctctcatcccaggaaaatcccttagccgcaagcccacttgccgctacggctccagacacaaactttgagggaccccagggctcctcggctctgctccaggacccagctgcggccccacctccctccaaggcttgaccaattggatatccgccttgcctagcagacccaatcagaagtctcattctcggctttgtcccgcccccaaaggcagaggccgcgggaagtctccgcccacgccttggaatgtagccggggagtgtctgtgacgtcaccgaggaactcctcctgcttgagcgcggcccgctgtctgctgtcgcctacagctgaccaatagagggcttgggtccggaagtgatggactggaggcttgactaatgtgaaaggggcgtctgaaaggtacagccaatgaaatagcgacaagaatacattttgtaaaagagggagggtgagttcagtcctcttgctgagaatcctcagaaatttaccagcgcgccgacagggggcgcgagagttgttgcgcggggggctt

SEQ ID NO: 39364 - DNA, 2300 bp, Homo sapien
gaagctgtactttgagttttgaattttgatcttttcccgggctagcaatacgcaatatggtattctctcctggtgcaagggagccatagctcccagtcagccacacaatcatgacagtaaataactagtactgtgttgccagatgatttggtccaactgtaggctaatataagtgttctgagcacatcttagggtaggctaggctaagctataatgtttgataggttaggtatagtagatgcatttttgacttacgatattttcaatttatgatgggtttatgtggatgtaatcccattgtacattgagtgacagattaaaaaaataagaaaggtctttaaaaatggaaagagcaatctatggaaagaatgtgatgaaggggataccaggctggaaaagaaaaaccaagaacctaagagaaaaatgagaaaactattatataaggaaggtgtgtgcccataaactagagcttctatttaagcattaaaataatctcaaaagctgggcgtggtggctcatgccttaaatctcagcactttgagagactcaggagagaggattgcttgagcccaggagtttgaggccagcccaggcaacaaagtgagatcttgcctctacaaaaaatttaaaaattagccgggtgtggtggtgcacatctgtggtccaagctacacaggaggctgaggcaggagaactgtttgagcccaggaggtggaggctgcagtgaactgagatcgtgccactgcactctagcctgggtaactgagtgagactgtctcaaaaaaaaaaaaaaaaaaaaaaaaatctcaaaagaccccagaagataggaccagacaaatgcaatagtttatatgataaactgctgctttaaagacaacatagagttcaaagacatttgtctccacccgccaaaaaatacttgccaaggaaacaacacaatagctaatacctgaatgtgccattgtaagaaacttctagagctaactggcaaagacctgcttttatatttaagataggtaaactatatttttggaattaaaaaggaggaagaagaatcacagtgttcgggggaattcctttagaacaggccatctcttccctattctaggaggcaggcctggtgctctggccctggctcacctttctggcctttcccacccctccctgccaagcacctctgctgcagccacactggcctccccagcaatcacgtgaataccagcttcccccgaaatctcatttcctttaggaagaacttccctgatcagcacgtaaaatagcatcgatcttgacgcatcctgttttcctgcttttatttttctttatagcaatttccactttctgaatttaaatgtttatttctttgtttattgcctgactcctctgagataaaagctctatgaattcaaggactgggctcacttctgtaggacctggaaaagcatgccattgactcttatcaagcagatgaaagaaaaacatacaataagtgaagtccataaaaaatagaagaacccaacagaaaatgggcgaaaaaggtgaagaacaatgacaatttcctagagctgcactaatataaatgtatgtgcatgaggaatatttgtatttttgtataatatgtaatccattaaaaaaattccgagagattcaaatgaactaaagtactcgaaaatgtttaagccccccgcgcaacaactctcgcgccccctgtcggcgcgctggtaaatttctgaggattctcagcaagaggactgaactcaccctccctcttttacaaaatgtattcttgtcgctatttcattggctgtacctttcagacgcccctttcacattagtcaagcctccagtccatcacttccggacccaagccctctattggtcagctgtaggcgacagcagacagcgggccgcgctcaagcaggaggagttcctcggtgacgtcacagacactccccggctacattccaaggcgtgggcggagacttcccgcggcctctgcctttgggggcgggacaaagccgagaatgagacttctgattgggtctgctaggcaaggcggatatccaattggtcaagccttggagggaggtggggccgcagctgggtcctggagcagagccgaggagccctggggtccctcaaagtttgtgtctggagccgtagcggcaagtgggcttgcggctaagggattttcctgggatgagagcgggtcttctgccttcattttggatgcacatcccgctttagccccggcagcctttggtccggctcgtgtccctggggattctcggatctccgag

SEQ ID NO: 39365 - DNA, 2300 bp, Homo sapien
gggataaagaagaaatcctgatgaatcaggtatttggtatctcagtatcaggatgtggtgatctagtgagtttcagtcccttgcctgagggtcagtttcctgaggaaaaaactcagttaagacataagtttcaagttttaagacagagggcacatttctatgtttattcaaaaatccataaatatgggacaatttggccagtttcaacttcaggacattttaaccattgtggactcagtgacctgtgaagtgtacaggccagggaaacttcctctttgccttctgaagtttcactgaaaaatcaactcacaaaaggcagattaattggagaaaaggtattcaattttatttaactatatgtttacacagggagaaccacagagtgattacccacccacaacagggtttagaagcttatttactggtaaatcaggttatgggagaggggaaaagaggaattctgttgaggagatcactagggagaatgaatggatcagggagtagagattaacttgtacattaccttgtgaaagggtttgttcaggaaaggttacattcttagtcttacagggagaggaagaaaaacgaattgttccttttggtgggtctggatcttaggcagataaaggaacttcactttgggagaggtggtagggagtagaggtcagagggaccttgaggcttttccagttcagtatgtcaaagtgccatattttggggtatcagtttctgactcccaacacattctttgtcttctttttttgtaatggatcatgagataacaggtaggggaaaaagaacaattgtcctccttggtgggtccatcctatctttatgtagacaggggaaagtctcttccagagcccgttgatctctaagggtctttacttcaaaatcttcattataccagggagccatatgttggggtggaatttcctgcctccttcaacccccagctccaaatttggaaatggcttctaatttttttaaggaaatgtcttttatttcctttggccactgtgattgatttcacgatggatccatgaaccaagaaaggcaatcaaggctaacaagtttcaatttcaggactactgtttgagctactgagaaagtaaaatctctttttcgttgtttgagctggaaaccttgtcactccaaggacagtcagtaaacacttttcaatgttaagggaactgagagagagagtttcctgagagaacaggaaggcagagagacgaatgagaagtgagaaattggtcctggccatgttattgttcctctagtccagtttaactggtgataagcttaacttgtgataaagatcctagatccctttccagtcctgctgcatccaaatctcccaggaagtcctagaaaatgtctagtctcccctgaagctagccctactgccagaatttgaggaatatgaaccaataaatttccattatagtttaagagaatttaagatagatgtgtgtattagttcattctcacactgctaataaagacaaccaagactgggtaattaacaaagaaaaagagatttaatgggctcacagttccacatggctggggaggcctcacaatcatggcagaaggtgaaagaggagcaaaggcatgtcttacatggcaggaggcaagagagcatgtgcaggggaactgtccttcataaaaccatcagatcttgtgagacttattcactatcacaagagcagcatgggaaaaaaacacccccatgattcaattacctcccactgagtccctcccatgacattggggattgtgggagctacaattcaagatgagatttggttgaggacgcagccaaactatgtcagtctcttatttgccaacaaaagcatcctaactgatagaggccagacagatttgtttctttttgttttttcaatcttttgttgtgaagaagtaagcataaactctcaataggttacgttttacaagcctctgatgaagttcaaaggacaaccatgcttaggatttccaggacaacctggaaaaaaaaacaggttgagaaataggtgtgttaatctcccttccctctgctcctccctctggccttcctttctttgatggaataggccctaggacacctttctaaaaagactccctgtggtgttcagaatcactcctacagtcaggttctccacaatggatctcagtgctgcaagtcaccgcatacctctaagtgatggaaacagcattcccatcatcggacttggtacctactcagaacctaaatcggtaagcttattttttctctctttgcttgcttgtttgtt

SEQ ID NO: 39366 - DNA, 2300 bp, Homo sapien
tacgattgttttactcatgtgaaattaggaaggctaaaacgatggaagatcattttctgtaaaaccatggtgatttgaaaaactttaagctagtgggtttgatcaaattacatggaattctttcaaaaccagcctattcaattttacttctcagttttccttccctaccaccatcatctggggaataagagggacttgtctttagtaggcttgaatcctgtataccacctatgtaatgaatttttagcatattaagggagttgatttttgaatacaaaattccattcctattatgtgaatgttttcaaggtgtagcttcaaaaatatacaatatggtttgaattctggggaaggagtgttcaactttggggtggctttaggggataacagataagtcagaattttgaaggaactaaaacaaagggaacagcgtgtacaaagcagggtggccttacaattgctgcagcatgaagcatgagagtcgcggcgacttcagcttgagaggcatatacggacgaaatcgtggagagatttgtgagtgggtgaagacctgtgggacagacttccgtttctggacccacccaggtcagaatcacttgagatgctatcaaaattgaataactgaatacggaggtggcccaagcacctgtttttcactaagcttctcaagttattcttatgcaaactaaggtttaagagctacttccatgcaaaaaaacaaacaaacaaaaaatcccaagcttaaacaggaaccaatgggtgggggaggcgggaagagctgttgaatgtcttgtgattaagtaaaagaacctctcacttgaggcctacggaggttgtgtttaagggcaaggtcttgaaggaaggctacgttgcctagccctcccccattgccatcccatatagtcctccaggaaaactgtgattttagcaaagcctttcatgacccactccatctttctctaaagtccagtaccgcttcattagtattgacaaaaaaaaaaaaaaaaggtaaatacttcttaaagttacgtgttacaaaatcttgtttccttcattccgtttctattcttcaagttccttaaaagctgcgccattttttgagtgaaaaatgtgcgtaacttctgatatcagcgtagagaggtgagggagggagggagggaataaaataagagggagggaggaaatacaaaagaatcctgaagttatgaattatttgggtaacagtattgaggtttatttttgcttaatgatgctatatttatgcaataaaaacatttgtcaatctgtattaattcctgggaaaacgaaccacttttagtcacttaaaaagcaaatcactgactttaaaaattaatttcacctttttcattggggaaaccctttaaaaatttccaacttgcacgagaacttcccccccttattcttcatactcattcattctagagatgagtaaaattaggttgcaatatccctgctgcctccagagtacctctttcacacagtattttaaaaaattatttccttgtttgctcttcagtacctccactccttcctcctgtgaccctccgaccatatttactcctcctacaagaccaggtctccagtaatgaaatcagttttccaagcagttacttaattaacggcattgagtagacaagtgaggtcccgccccctaggaggagctaacaccgcggaccgaatcaggcggatggtcgttaacaaatgaacccttaatcttttcagaggaggaaacatacacaaaggcccaatcagaagccgcgatttcaggcgtccggagggggcggggctgggcaagcacctcccacttcccaacctcccgccgcggccgacggagcctcgcgggctccaacaggtcccgccccctcgccaggcgcggccgctattgggcggcgcgctccacaccgaagcctcagttgctgggagagggagggcgggggcgggggcggggcctgaggtgggccagggggatgaagagaaaggcggggaggcaagggcgggctgggcgtattccacgagcgcctcggcggttggcgaagcggacggggtgcagcctccccggtgcgaggaacggtctccgctgacagataccctccttccggccgcgccactcgggaggcggatcccgtgggcctgaggaggcttcccccgcccggtttgctttccctccctcgctggcgctgccgcgagtccaccgagcggcctctgaggagcagccgcaggaggaggaggaggtcgtcgggggcggcgggcggagaccgcgctctcgcttccccggcggc

SEQ ID NO: 39367 - DNA, 2300 bp, Homo sapien
aatcccaagcttaaacaggaaccaatgggtgggggaggcgggaagagctgttgaatgtcttgtgattaagtaaaagaacctctcacttgaggcctacggaggttgtgtttaagggcaaggtcttgaaggaaggctacgttgcctagccctcccccattgccatcccatatagtcctccaggaaaactgtgattttagcaaagcctttcatgacccactccatctttctctaaagtccagtaccgcttcattagtattgacaaaaaaaaaaaaaaaaggtaaatacttcttaaagttacgtgttacaaaatcttgtttccttcattccgtttctattcttcaagttccttaaaagctgcgccattttttgagtgaaaaatgtgcgtaacttctgatatcagcgtagagaggtgagggagggagggagggaataaaataagagggagggaggaaatacaaaagaatcctgaagttatgaattatttgggtaacagtattgaggtttatttttgcttaatgatgctatatttatgcaataaaaacatttgtcaatctgtattaattcctgggaaaacgaaccacttttagtcacttaaaaagcaaatcactgactttaaaaattaatttcacctttttcattggggaaaccctttaaaaatttccaacttgcacgagaacttcccccccttattcttcatactcattcattctagagatgagtaaaattaggttgcaatatccctgctgcctccagagtacctctttcacacagtattttaaaaaattatttccttgtttgctcttcagtacctccactccttcctcctgtgaccctccgaccatatttactcctcctacaagaccaggtctccagtaatgaaatcagttttccaagcagttacttaattaacggcattgagtagacaagtgaggtcccgccccctaggaggagctaacaccgcggaccgaatcaggcggatggtcgttaacaaatgaacccttaatcttttcagaggaggaaacatacacaaaggcccaatcagaagccgcgatttcaggcgtccggagggggcggggctgggcaagcacctcccacttcccaacctcccgccgcggccgacggagcctcgcgggctccaacaggtcccgccccctcgccaggcgcggccgctattgggcggcgcgctccacaccgaagcctcagttgctgggagagggagggcgggggcgggggcggggcctgaggtgggccagggggatgaagagaaaggcggggaggcaagggcgggctgggcgtattccacgagcgcctcggcggttggcgaagcggacggggtgcagcctccccggtgcgaggaacggtctccgctgacagataccctccttccggccgcgccactcgggaggcggatcccgtgggcctgaggaggcttcccccgcccggtttgctttccctccctcgctggcgctgccgcgagtccaccgagcggcctctgaggagcagccgcaggaggaggaggaggtcgtcgggggcggcgggcggagaccgcgctctcgcttccccggcggcggcaagggcaggacaatggaggtggcggtggagaaggcggtggcggcggcggcagcggcctcggctgcggcctccggggggccctcggcggcgccgagcggggagaacgaggccgagagtcggcagggcccggactcggagcgcggcggcgaggcggcccggctcaacctgttggacacttgcgccgtgtgccaccagaacatccagagccgggcgcccaagctgctgccctgcctgcactctttctgccagcgctgcctgcccgcgccccagcgctacctcatgctgcccgcgcccatgctgggctcggccgagaccccgccacccgtccctgcccccggctcgccggtcagcggctcgtcgccgttcgccacccaaggtgagaaccggccgcggccgctggggagcccggggagagggccaggagggggcgggcgcccttgtgcggcgcgacccgctgtcatgtcgccgccgcccggggtgcgcggcgggggaggggcgagcaggagggtctgtgctggcgacggtgacatggagggcccgcgctctgcggcgtgtcgcgctcggccagcaacttccccgggcgctgtggacttgaccgcgccgccgccgccgccgctgctccgcattctcaacagccgggcggcccctgccactcgcacttttgcagacctctgtcggagtctcctgcagccggaatctcgggttctttgccggctgcagccagttaa

SEQ ID NO: 39368 - DNA, 2300 bp, Homo sapien
aaaagaaaaacatgagatagatgcttcaggaaaaaaaaaaaatcactattaattccccccagctgcctgctcccaaaatcctacaacacattttcattccaaattatagacagatgaaaaccacaaaaacgagtccctttcagaggaacttatatttaatgcccagtagggtatatgatgaagaaccctcacatcaaatacagtgcacgctgctgtatttatattttgggtagttccactaaaagctatactgcaaacaatgaggcttgttgtaaaaggatcacctgtacaattaaacctcacatagacacacagcaaacccaaatgtatatacttccctcagtggaagaagttgaaaatctagatctagaaatgtataaaaaatggccttgaaaacctgctataccaaaatacctctacagacaagataaaaacaaaaacaaaaatcaaacatttgttttccggatttttctttaatacagttgccatcttacatgatgtactattaagtgccttcttaatagcatctaacctacccttctgttgcaccgtttggcctcctgggatggaactcttgttaccacccatgtttgtggagtactgttcttcagtacagtacacctaattcatattgtcaggccatataattcacgggtagtggtattaatttctaaagctgaattaaagcacacatccaaaccacatatattttttacttttcaacttaaagagttcatacaaagtctatttcctttctacagtagctatcactccagactgtggtttaaaaatccaagaagtgggaagaatgtctttgttttcaatgcttctttcttccatcctttttctatcctccttttttccttctttccattttctttcttctattcatctccttctttcctttctttcttagtgataagaggttaacagaaatgggctattaaggaaatcaaagtctagtaaacgtccaaaacagagatgagaatagtcacaaactcttctttttgtagtgatgttaaattactgacaaatgtttttttgaaaacaaaaaaatctaaaaaccagcacaagctagtggtgctgcatattatttaagcaactggcgttcttcaatgcttttgaggcgtttcttccggggctgtacaaagtcatcatctgaatcatcactaaatttattatcttctgattcattcctgaattctggtttgggaaaccttttttctggatagaggttctttagaagttcttcaaaataattttcaagttttataccagcattggctacttctgaatcaggctgtggagtaaaaataaaaatgagtaaaaaaaggacacacttttgacttctgagattatatatattaatgagctgttttgaaaagtgttcatgcatagtcattgaaataatagtttaggactagacaaagtctctgtacagaaggccagctaaaataaaagattcagaagtgtggaaaaaagataaaagtaaaagcctggattattctaaaagaaggtggtaatggtaggactatattgccaaacacatatcagttaggattccataaccataggatcatgaaccaggtatttttagaacaaattaaatgtagtactattagaatgagtaacagagaacaaaccaccagcagcaaaaggttctaagtctgactgatgtgtagatgaactgacagatgagaaatttttaaattagagctatttggcccacatccttaatatttcaagatcaacataaaaataagaaatacaggtgggaatgataaagaatatgtctaggtcagagaaaaacattttgtctttcagttatcagctgtaatttgcatttccatcaccatctaataaacctttgaatataaatgtggacagagttatctgaattatctcttgcattccctgatctgaaaagttggaaatttattctaactcagacatcttggtctcctatgttgacaaggtgtttagtaataaaatgattttcacactgctgttccttcctgcccccttccctcccctagcctcacctcattgaattcagcacagttttgaaagatcaatctaaaatcagctacaaaatcttcaggttttgagtacatggaataatcttcttgtagtcttttcttgatggttgacaaatccattggatttttaattattttgtaataatcaggcacctattaaaaaaatgagatgttataatacaaatagctaaattccaccttgtcctaaatatattctatgagatgtgctctaaaattcagaatgttctcattgcttttctc

SEQ ID NO: 39369 - DNA, 2300 bp, Homo sapien
tttgcacctgcactacaaaattgtattacgtgataccgttttttatagtacatgacacacatgtaaatgtgatatttacagctcatatttcattggctgcatttgtgctgtttcctaaggtgcctacagaggctccttccagcaggtacacaatctccctcattaggccatcacagctcagaagacttctctctaagcagctgaactctcccaaggtgactgtttcctgctctgggctcctcccatcctcctgtcttggcttagcccatctgactctgaccctgtccctgagcttactgggaacaattgtgctaaacggaagggccaggctaatgagcaacattgtcactgtctcccaggccccccaaccctgttttctaagcggttgttaattgagaaaactaaagaattgtggggctatgatggcccttgtgttttgtgagagtcatgctgaagaaacgctttgtgtgttgcttaaatcagaaacagtggagtcatgtcatgtattaaagacaagcacctgcagaaaagagctgaccctagggaggtggcgagtgggggcgggggagggtcgagcgtgggggtgggggtaggaagggtcgagcatgggggtggttgggggaagggtcgggggtggaggggaagggtcgagggcaggggtcggggggaagtgtcgggggtcaggggaaagggcggggatgggggaagtgtcgggggaagggtcgagggtgggcgtgggggtaaggaagggtcgagcgcggggctggttgggggaagggtcagggttatgggggaaaggtcgagggcgggagttggggagaagggtcgagggcgggggtggggggaagggtcgagcgccggggtggcggaggaggaagagctgggggtgagcagcagcagcgtgcgggggaggggggaagggcgcaagagaggatcaggggtcagcggcacacccatggaggatcaggggtgcgcccgatggagggtcagggacgctggagagttaggcgcgcgcccgatggaggatcgggggtgctggagattaggcgcgcatctggtggagggtcaggggcgtgcccgatggaggattaaaggcgctggagggttaggcgcgcgcctgatggaggattaggggtgctcgagggttaggcgcgcgcgcccgataaagggtcaggggcttgcccagtggaggattaggggcgctggagggttaggcgcccgcctgctggaggatacggggtgccagagggttaggcacgcgcccaatgggtcagaggcgtgcccgatggaggattaggggcgttggagggttaggcgcacgcccgatggagggccaggggtgtgtccgatggaggattaggggtgctggagggttaggcgcgtgcccgatgggagctcaaggacgctggagggttaggcgcgcgctaggtggggcgcgcgagggaggcaggacgtcttccaggtagaaggtgggggagggggagggcagggtagggtgcacaagaagggggcaccactgaggatcgttgggggcgagtgagggaggcagagggagagctggagccccagcgagcggacaggtttctgtctctgcagtctgtcaaacagggttacggaacgtttctgtcctagaaagtgtagcgtgcaggacccagtcgtggcttttgtcgtgcaagaatatatatgatgaatttttcatggttcagtgtgggagaaatgcatttcagtcttccctctaaagagtgaaggaaggagaaaaaaagcagaacagcgacagcgaaagggaaacagagctgtttctggtttgttttgttttcccctagaaatgcgagctgacagcattcctttgattgccctggaggccgtcagtcagggctgcagtgaagcctgaacttcttgaaggcaggaaaataaggagcccagaggcacagacagcagctgaggtctcaggccaagttataataaataaaaccctagtgtcaaatcccaggtccttgaattttatcaggggaggacaggccattgtgagaacgagtaaggaaaagaagtaggtgtatcttaggacttatgaatgttctgaagagttttttaaatgagtgattggatttggtgtttaaagttatgtctatttgtaataacataaagggagactgcttctagtggccccaatttgtgtactgtataaggcagcgcatgaacagacaattttaaaaattacagtggaaattcacaagtacacatctgaatagagtggagccgaagccgtcctctagcaacaagcgggcggcagaggaccccgt

SEQ ID NO: 39370 - DNA, 2300 bp, Homo sapien
cgcagtggctcacggctgtaatcccagcactttgggaggccgaggtgggtggatcacttgaggtcaggagtttgagactagcctggccaacatggtgaaaccccatctctactaaaaatacaaaaaaattagccgggcctggtggcacacgcctgtaatcccagctacttgggaggctgaggcaagagaatcacttgaacccgagaggtggagtttgcagtgagccaagatcatgccactgcactccagcctgggcgacagagtgagactttgtcttaaaaacaaaaacaaaaacaaaaactctgttaacagtgtcttttagatggattaaaaactagcatgataatctcttctttaataggtgaccttaatccatttccgtttattgtgatttctgattcactggctttttcagttattattccttttgttttttacttcccttccctttcctgtctttctgtaatacctgccaacccttccccactactgattggtgtgcaagctacagatgacagttacacttaacacttcaaggcacatattcactaaatttttctcataatatttgctactggttcaattatcacccctttgtggatatatgtcctttttttccctgatagcctttaaagttttatctttgttctatagtttcactcctgtctgtttcagtgtggatttgttattgtttttgttaaacattaaattgcattagtagaatttttataaaacatgtaaggtataaaaagtaaggatcagcacacaccatgtgtctgtcgccctgtgtaagataacggtacccacaggggcattcaaaaaacctgtgtgcccctcctcacccctcctccatctcctttcccctcttcccttcgagatcatcattatcctaacttctgtatttttctttattttttcatagttttattacatatttatttttctaaataacatatggtatagctttacatgttaaaaaattttctctaaatggaactatattgtttattcttctgcaacttgctatttcatcaatttcatatatattatatacatatacatatatacatacgtgtgtgtgtgtatatatatacatatatatatatatatattttttttttgagacagagtctgaaaaaaagctttgtctcccaggtgggagtgcagtggtgcgacctctgctcactgtaacctctgcctcccggattcaagcgaatctcctgcctcagcctccagagttttgcccggctaatttctgtatttttagtagaaacagggtttcaccatgttggccaggctggtcttgaactcctgacttcaagtgatccacttgcctcagcctcccaaagtgctgggattacaggatgagccaccgtgcctggcccatcattttctattttaagactccatattgtttaatgtttctgaagttatttttattgttatttatttatttttttgaaatggagtcttgctctgtcgcccaggctagagtgcagtggcacgatctcggctcaccacagcttctgcctcccgggttcaaataactctcctgcctcggcctcctgggtagctgggattacaggtgtgtgccaccattcctggctaatttttctatttttagtagagatggggtttcaccacattaaccaggctggtcttgaacgcttgacctcaagtgatctgcacatctcggcctcccaaagtgctgggattacaggcatgagccaccgcacccagcctggcctagtgttttaaacgagaggaggcatgatttgccaaaatgtcttaacttctccatgaagtggccatccactcctccaagtacttcctaatcctctcgtttggtgatggaactcttaagagagcatgcacgtgtgtgtgtgtgtgtgtgtgtgtgtctgtgtgtgtctgtgtgtgtctgtgtgtatgtgtattagggtctgcaatcatgttatgtgctgattcctttgattttttttagtcatctgttgtgggtaatgtatttcaggaatgtcatagcactttctgttggcttaccttctttttccttcctgcatagactgttctagaaaaactggaaggagagttacaggaagccaaccagaaccagcaggccttgaaacaaagcttcctagaactgacagaactgaaatacctcctgaagaaaacccaagacttctttgaggtggtcacgtggggatgagttactaaagggcccgttcctcagaacctcaaatttccattttggaaactggctggcctgggatctgagtaaatcactctgtttctgttccatg

SEQ ID NO: 39371 - DNA, 2300 bp, Homo sapien
ggagcttattaaaaatgcaagtcttggccaggcatggtggttcatacctgtaatcccagcactttgggaagcagaggtgggaggattacttgtaggctaggagttggaggccagcctgggcaacatagtgataccctgtctttatgttgtcatattttataaaaattaaaataaaaaaatcagccaatggctgagcacggtggctcacgcctgtaatcccagcactttgggaggctgaggcaggtggatcacaaggtcaggagatcgagaccatcctggctaacccggtgaaaccccgtctctactaaaaatacaaaaaattagctgggcgtggtggcgggcgcctatagtcccagctacttgggaggctgaggcaggagaatggcgtgaacccaggaggcagagcttgcagtgagccgagatcgcgccactgcactccagcctgggcgacagagcgagagactgtctcaaaaaaaaaaaaaaaaaaaaaaaatcagcccaatcatagtgatgcacacctgtagtcctagctactcaggaggctgaggtgggaggatcacttgagcccaggaggttgaggctgcagtgagctgtgtttgcgccaccacactccagcctggacaacagagcaagaccctgcctcttaaaaaaaaatgcaaatcacagacaatctaggaaacttgaatcctagaattaaggcaaatttaagaattattgaattttaggagtgactggtattttatgtgtgtttgtgtgtgtatatgtgcgtataaaagaatccttatcttttagagatacctgctggaatattttgaaagaaataatatgatgtatgggatttgcttccaaataatcagaggtggggaggggaagtgggtggggtgtggatgatagaacattcatgaactggtgtggccaagtaatgtgtacgtaggggttccctgtactatttgctgtacttttgcagaaaagtacagaaaagttaaaaaaaagcacccccctcactcattctggggtaccttctaaggccactggtggggagagtccctgtgggggatctgtgcaccaccctggagaagcaaagctcattcaaacaaacgcaggtggctgttgcagccccgcacccctgggcaagagaaatgcacctaattggcttgttctgcccctcgcaccctctgtcaaagaaataggaaaagacaagacccctccaaaggaaaagggcacatatcacatatgcttctgtctctttttacctgggccacagcggaagctgaatttcagccattgggcatttcataaggagtcttctattttcctttgaaagtagagtgttttggttaatagttgataggatggtgagtgtgatattttttattttccaaaactattttaattttttcatttatatatgtatatacacacatatatacacacgtatatacatatgtgtatatactatatataatgtatataatatataatatataatgtatataatatatataatgtatataatatattatatatatagatatatatatttatttatttatttttgagatggagtctggctctgttgcccaggctggagtgcagtggcgtgatctaggctcactgcaacctctgcttcctgggttcaagcgattctcctgcctcagcctcctgagtagctgggattacaggcacccgccaccacactctgctcattttttcgtatttttagtagagacaggatttcaccatgttggccaggctagtctcaaactcctgacctcaaatgatccgcccacctcagcctcccaaagtgctggaattaccggcgtgagccacggcgcccggcccccaaaattatttttcaaagttattttgtttttacaagttcaagggatgttttggtttactggggtccttctaaggcctccaggaatcttgtcctcaaccttcagctccctgaggggcaagttactttcattagaaaataaatgaatgcttcctgctgggaacttaaggtcatggcagagggcacaggtggggcgggggctgagcaggctggccggtggggcaggtttgtcttcacccacaacaggccagtgttgatacaacagagctgcctcctggctctttgggagcctgggaggagaaggagccgggaggggcgctgcggggaagccacctgcggattcactggctgctgctccgcccaggactgctagcaagcacggagggctgccagacctggggctccctgctccgtgcgtcaggttggggaaaccaccgtctgccccagaccctgacccagg

SEQ ID NO: 39372 - DNA, 2300 bp, Homo sapien
atcttcccacctcggcctcccaaagtgttgggatgacaggcgtgtgccaatatgcctggtctgttcttcaaattttggatctgagaatattttctcaggtctcaaacatttttgagatccttggaaatcttggggattccacgtaccgctgttatccctagtacccattggataaatcagtcctgccctgtgaagcccactgcagggtttacttgtgaggaaaacatcgaggacagcatttgttctactaagcagcgtcctctctgtggggaccttgagttccttgagcacaagggctgtgtggtctttctcacccccaggtccccacaccgagagcctggcctggcatgcaactgtttaatgttcaactagtggtaatgcctaaactggacttctgtgcactgactgaaaatcacccttcctagggcacgttggccctatccccaaatccaggaacataggccaccactattttatatcttagagccaattagaaaaaagtgcctcccctgggctgttacactccactaggaaatctttccttggggcttactcacgccttctatgtctttccacagagctggagtccacccctcacccttaccaggcccattcatgcgcaggaacacttccacacatggcaggctgtgtgcacacagacgattccctcgcctttataggtgctattcctttgacttgaaaagcccatcaactctaatctgcacatacaaacttcagcacccagcccaaatgtcactttctctgtgaatccttcccctatacctctcaggcagagttcatcccatcctcctttttattcccatcacagtggaaggtacccctatttgagtcttgccaggttgcatcaaatttctttcttccgggtttggttccctgctgcactgtgctctcaaggggaagaggcgtgtctcagtcatctcagtctccagtgcctaggatgagaccttttatatacatgtgggtcttcaataaatgttttagacggaatgcagagctctagtcaagttactcctcagctcaaaatctctacagaaccttcccctttgcttcctgactttgtttcaaattcctctaccaggcacgcagaagcttagcccacagctctcctcttgcctccccacctcacatgccttggctcacctgcgcttctgggtgctgctggtacagccaccctctgacacttccttacctctggacctttgctcatctgtccctctacctataatgccatcttcccctctccccctgtcaaaattctagccatccttcaaggcccaggccaaatgccattttctttttttttttttttttttttttggagatggagtctccctctgtcggccaagctggaatgcagggtcaggagcatctcagcttactgcaacctctgtcttccgggttcaagcgattttcctgcctcagcttcccaagtggctgggactacaggcatgcaccaccacacctggctaatttttgtatttttattagagatggggtttcaccattttggccaggctggtcttgaactcctgacttcaagtgatccacctgcctcagcctcccagagtgctgggactacagggtgagcccccatgcccaacctcaaatgccattttcttcttgaagcatcccatcagcagatgtggcctccactgttgaaacccacagtgctttatcctcccaagccattcctcaaacacggttctggggttgaatgatgcgtgtttgtaattaacgcacttcgacagcaggtatctcccaacttcagcatagtgggtgctcagtgaatattggcccaaatggaattgagcatccatgctacacctgcagatgggagaggcagcaaactcatgtcccaggaaccagcatgacacagatctctcttgtcctccccttgtttctcaataaggacaatatttgcgctcaggggagaagggcacagcttgcccctcccttccttcctcagccaacggtttggcttcccttctagagaggtgagagaaggtgtgacaggccaagtttcctttgctccaccccatggtgtttcccccaaacacccagcataagttcacctctggcagagttgctttccagctcctgcaggtgggagtcgactcacctgcagcaggcactcggcacaactccgcaggaccggctcacctgcaccgggcactcagcacagcctccagcatgcagcgcctccccgctgccacccgggccaccctgatcctcagcctggcctttgcctccctccactcggcttgctcggcaggtagcgt

SEQ ID NO: 39373 - DNA, 2300 bp, Homo sapien
gttgtttaaatttattaaaatcaaattcagtaaaaaaaactcagcttcttgtttacattagacccatgccaagggttccattgccgcgtgtgactagtggctaccatattggaagcaccactcagacatgggacatttccaccctcagtgcaagttctattattagacagtgctcatgctgacctaggtagatggaaaccaagagatggattggaagaaccttcctagaaattatattgctgttcgttctgcttcttggggaatgcaaaaaggaaaaaaaaaaaagtggtgggcatggaaactctcaaggttcccctggctgtgggtcagtgtgtccttcaagggagcttgttgtcacagcaggacgagttcagaagaaacctgctgtttagctaaagccatgaagttgctgctgagactaattttatgccacccaacccccaagccactccaatgtcctgcttaaagtatagtaattgcctcgatgcaatctgttactgtaaattatttacagctaaatggcttagagcctggtctttatttgttttggagaaactgattcctcactattctaattttccttatgactcaaataacttccttggccctgactttcatttcacctctacacctagaatggaagttgtcctcttccaaagtgagtggaaaaaaaccctagttggctgaatgctagggttaggttcgagcttatgaaattgccattgttataggtgaaaattgttcaatatcagcaattttctgtggttcaaatggaatagccccggtgaaaattcctaagaatttaaacatcgccctcctcccttataagcagagccagaagcgagggagggactggccctacttggggctattccacaagaaaagctgctgggaagacccaacgattcagtgcagttaaacttgtcttctgattctgagctcccatcataagcaaggcactgtcggggtaagtagaaagaaactcagcactcttatttggggaggggtgaagttggaaaataaaatgaatgtgcttaccataattgctgacattcactgtgtgtgttctatgggctatttctaagttctttacatgaaattacatcaattcgtcttgacaagcactatgattgtccccatgagataaaggaggaaacttggcatagagaggtaaagtcatttgctcgaggtcgcatagctagtgagtcatggaagctggacctgggttcaggctcagcggctcaagagtgcacgtcttgaacctcaacaccaacacccctggcagtggctacagaagagagtctgaggatgagaggggcagacacaggactttgggggcagggttggttttgggagcaggagtgttgcagggcatagagagtgtggtggtgttctgaggtggctgagaacaagatcaaagccaggagcagaagatggtaaccaaggtccctctgccgtgagttgcagaacccggcctggcagggcaaggcaggggatgtagatcagccttccagcctccacaggaaaatggggagataacccagcatttccagtgcccggggaggcaggagggtgggagacagtgaatggcagccctcctggcagtcaggttttgtgaaagtcgcagagaaagtacaaggggcagggagggatggaggacttaggaaagggaaggtcagacacaaatgtgcacagggaggattgcaaagcacgacagcccagtggggctgagaaggagccttcaggacacagcggaccaagagatatcattttggtcccctgatgggtgagactccagcaaataactttttcctttctttgtggcaaaggccaagagaggtggctgctcctgccttagctgaggaattgagtatctgatctccgtctcaggccaacctaagaccccccctgccccagccccacctcccaccccctgcctaatccttcagatgagaaagttctgtttcctccttcctttgcgcaggaccaaccctggccaaagaatcttccccctcctccttctttccctcccacctctcttccctccttccctcccccttcccagcctggccatgaataaagctcataacgctacctgccgagcaagccgagtggagggaggcaaaggccaggctgaggatcagggtggcccgggtggcagcggggaggcgctgcatgctggaggctgtgctgagtgcccggtgcaggtgagccggtcctgcggagttgtgccgagtgcctgctgcaggtgagtcgactcccacctgcaggagctggaaagcaactctgccagaggtgaa

SEQ ID NO: 39374 - DNA, 2300 bp, Homo sapien
tacatccctaccagtcacattccctgtgttcagagcctggaaatgaaattgagttcagttcagcctctctgtaatgaatcaagaaatgtaaaagagctttgagaccccaagggaaaggagagagttgcttctcatttctgattttattgtgctgttactctgtcgagtggctattaaaattgtcttatgctctttgggctaagaggggatcatctcgcttaagatgtactcctgatgtaaacatttcccccactttccaaataatggtaaagaaaacagtggcaagggctgttctgttttctggtacctgagtgaaactcagaagaaaagcaggcttagctaagagattttcactattaacctgtttttattagatcagcgaagacagtcatgcatcgcttaatgatggggatgcattctgagaaatgtgtcattaggctgttttgttgctgtgccaacatcctagattgtacttacacaacctacatggtatagcctactacacacctgggctgtgtggcatggcctattcctcttaggctacaaacctgtacagcatgttactgtactgaacacaatggtaagtatttgtgtatctaaacatagctaaacatagaaaaggtatggtaaaaatacaattttataatcttatgggactaccatcaatatgtagaccgtcattgaccaaaacatcctgatgtgtgcatgactgtacttttcattaaataacagataaggggctatagaatttggggctctgactgatcaaaacctgtgtatctgtgtcaagttttaagacccctgaaacagctaaaacaggtttccaaagtgtaatcactggatttcaaaaccatgttttagcccttcattaatgaagcctgttgtacagatttagagtcttacaatatgagggaagttggttctgggaaggtaagatgtagccagttttcatctgggcacctctgaaagagaaggagtgcaggagagtaagtctctcaaggacgttcaacaaaggaccagcagcatcttatcaggcgatcctcagaggctccaaggagcattggagagaatgcccctttctgggcttgatgtcttggttttggtttaataccaaatttctcttggtcttggtttaatacccgactcctcccaaattgaacgattatctttgtatgtcactcaaaaataccaggtttcctgaatatgttattaagaatttcagatatccaagcagaattttattatggacaccttgtaatgaattcaaatcgtgtgacagcaaacgggataaatggccccttctcacccagttccgctcagggccatacaggcttgcacatagagtgtgctaaaaatggtaacctcctttgagcattgcagaaagagggttctgtttcaaattgggctgaccgtaaaagcaattttgatgtctttcaaactaccataaagggattttaactgtatttttattcttagaaacaatacacctttaaacagatgtcaagaccaaagatgatgtataataaacagccggtggttatggtgtggtgtgagcaggcccccggatcaccagccctctgctggtggtcataaagcacacacagtttgtacttgcttcctctcgacgcctgccacaacagttttgccagtcaccaaactcagaaaaaactagctgtgtgagcagcaccgtaccctagcggtcttcagacattaagttcacgtcatccactgaaaggaagggtccttgcgttgacagcgtgtggctttggagtccgtttatggaagcactctacaatgaacagttgaattttatgtctattcttttttcctattttaaaagttctagtggtaacacaaactgtaaatttgagtcagaatgtttggagaaatgttgtttttttttttttcagagactactttgtcactcactgaccatgtctggttccttctctgaacttcattctccccataagccaaacaagaacagacctcccccgccacctcccaggcaccgtagttgtgagaatcagatgtgatcatgtgtgcagatgtcctgtgaggagggagcataaagcactgtgaaaatgtagcatgctgtctatgtggacgccctaggatgagtgatgtgaaacgctgcactactgcggtgaatgggttcacacatgggtaatgagcaaaaccgaaagctcggtgtgactcagtttcctcactcccattttgctttaatttcacttccttcaccaattttccgattgcatttattaagcatctttctgctcccgactttctggtgtctctgg

SEQ ID NO: 39375 - DNA, 2300 bp, Homo sapien
actgatcacccgttagaagcatttttcagatagggggctaagtttaaggatgtgtctgtagagtagtttgtctttgtaatagactcactgatccagatgggtaacggaatgtcttcgttggcccctttaagtatggtgatccaactagctgggctaaactgcaggcacgtggcaagtgaagcattctagatagaagccgcccacccttcctcacagagggtatggggtccccagcccctcgggcagaaccttttctctcttcactgtgtctgctgcagtcaccatgctgtttgggctcatggagcctgtaagaccagaaaggatgactcttcttcgttggttcctggttttgtctcttaacagtttacctggtgtatattatgaccgtgttttgctcataacagtattgggaaatgagatttaaaaaatctttattgttacttatatttctacctcttaagcagtaggtatagaacacaatttgaacctttgcgtttttttttctttttcttttgagatagagtttcactcttgtcacccaggctggagtgcaagagtgcaatctcagttcactgcaacctctgcctcctgggttcaagcgattctcctgcttcagcctcctgagtggctgagattacaggcgtgcacactacgcccagctaatttttatatttttagtagagacaaggtttcaccatgttggccacgctggtctcgaactcctgacctcaggtgatccacccatctcggcctcccaaagtgctgggattacaggcgtgagccactgtgtctggccaatttaaaccttaatgactcttgtgatccagagataccttcattttaaagacaaatggttctgaatagttttcataaaatagatattgtaattgcttgcacacatacgtaggctttttttttttctttttcttttttttttttttaagagtctaggtctctctgttacccaggctagggtgcagtggggcagtcatagctcactgcaacctcgacctcctgggcttaggagattctcctgactcagccttgtgagtagctggcactgcaggtgctcaccaccaccctcagctaacttttaagcaattttttgtaaagatgggggtcttgctatgttgcctaggttagtctcaaattcctggcctctctggaaatgatcttcctgccttggtctcccaagttgctgggattacaggtgtgagccactgcacccagcccacatgcatagttttaatatgtatagtttttaaaagttttgatcttttaagggtatgtcagactattttctaatagtcaatagactactttacttattgacttctagctagggaaaatttactagtttttttcaatacataaactttgaaatatgatttttggctgtttaggggctttcagtagaaatgttcacttccaggtactgaaatgccttgtaaatagttgagtgttgctgaaaaaatgattgttgaattttggcagtttttttctggttcaagcctcccctctccttcgcatgaaatgtaacgcacattcctcagctgtcatttttttatttttttgagacaaggtctcactctgtcatccaggctggagtacaatgatgcgattatagcttactgaaagctcaaattcctgggctcaagctatccttccacctcagcctcccaagtaactgggactacaggtgcacaccaccacacctggctaatttctttttttttttctttttttttttttttagagatggggggggtctcactttgttgcccaggctggtctcgaactcctggcctcaagtgcttctccacctcagcctccccaaatcctggaattaaaggtgtgagccactgtgcacagcctcaactgtcattttttaattcttatgatagaacttttcctcaatgtcaggaaaactgtttagggttgccacaaaaactcatgtgtgattcttcctttgccatttctcattgtagtcggatcctgacctcccagccgatgtgcagacaccatcctcggtggaactggggaggtatccagcccttcccttcccggcctcccagtacatcccaccccagccgtccatcgaggaggcacgccagaccatgcactccctcctggacgacgcctttgccctcgtggcccccagcagccagcctgccagcaccgcaggtgtaggccccggagtcccacccggcctgcccgcaaacagcaccccttcccaggaagagaggcgagccacccagtgggggtccttctacagcccagcccagacggccaacaatccc

SEQ ID NO: 39376 - DNA, 2300 bp, Homo sapien
tggatactggcttctgcaacttcacccagcgcattgagaaaggcctaatgacagctctctttgaagtgagaaaacaccaccagggaacgtataacctcacggtgcaggtgagaatatcactgaatgcagagcagaaggctttagcccttgaaggggaaattgttccacattgtttaagatgtgcttaactcttattccctccagtggcggaaacccagtttatgtgagtcgggattgatctattcctgtggcgtaaggtcggcatagcgtgcacaggctgagcatctttgagggttgcagagtagctgatacccagggagctcagatatggtgagctgaagaaacatgaccatattcaggaaattcaagaattacctagaaaggaatggtatcaacctaaatatccaatgggggaatgcctacccatactgttgtttccatatagctactaagaacgggtgttgtacgtatcatatggaaactgctgatgtttttatgtttctttgatttttttccctctacattctttcctctctctttccaaaatggatgttaaaatagattttggtgctcctggatccactttccatgtttcttattttttcctcatattttccatctctttattctctgtttttacagatttactaaatgtcgtcctccaagtcatgaatttagtccttagctgtgtccattatgttatgcaatccctctactgaatttttaagctttttgttcattgttctttgctccattttcattgtaggctttcctgcgatgatgcagtgtcaccttaaaagtctctgaggacgttaattagaattgttaaaatgcgtcttctgtttcctaagtcattcctgttttctctgcagtccttgctctgcatgttgatctcggtgctttgctttcgtgctgttagtttctgtaaatctggagactgttggtttgttgttaggaatgaagaaccaagttgttcattttagtagctggcacagctttccccttgagctgtggggatctctttctacgtcagctccatctcctggtgggaaaattcgtcggagcgctgggtctggggcagaatatgtcagcgtgggcttctctctgggtgcagtgtgtggtcagagacaagcagacagggaacaccctccttccagcatctagataaagaggttcttcctaggggatggggcactttagtgtgtgtctcagggcagagctagctgcgttttcattcattttctttccttcttcggtgtgcacaggagttatcttagcctctgcccaccttcttggttagggcccagacccaccatagtcctcttaggcaggagtttgttttcctcaggaggcagtcttgttctgggtgagggcctggctgctgctagcacctctgttggcctgggtgtggcagttaggaaggacggaggaggaaggcaatacactcagctctttggcacagccttgtaattaattatactgattaccactgtgtagcctgctcttggtctcattcctgctgatctctgccacagagcccctcctggtcctcttggagagcgtggcccttggctctgctgcagcccatgcttgtgtatgttttggattctggctttctctgttctggtttatatcaatccaatcccatcctttcttcatcccccagaggtttgacggaatctctagttttcttccattctcagtgctgttgtggatttattcccctgtgttcagcttattgttatttcagtggcatttggggtgggaggagctgtacatgtgctcagttcatcacttaatgtaagaaacattttccataaactgagcagttaaactcttacaaaagggaaccaggttagaaagccagttacgtttcctttaaaaactttacctcctttaaaaaaatcggtgagaggacctgtgagagagaaatcatggttaagctttcagcagaatgttttattatagaagcttattctgactttattctttcagatcttgaatatcaccatcagttcctcaagggtgactcctcggcggggcccggtgaatatcatctttgcggttaaaagcacacagggatttttgaatgggtcggaagtgagcgagctgctcagaaacttgagtgtggtggagttcagtttctatctgggatacccagtgctgcagatcgcagagcgtgagtacagccctcttggacatgctggggaggtgatggcgggcatttttggtggaagacctcttcttaaaatttttttagttttttaaaagacttgattttttaaaaattatttttccat

SEQ ID NO: 39377 - DNA, 2300 bp, Homo sapien
ggcgtgtggggagcaaaggctgtcctggactcattctccaaagccattcccacaggtagggtgttgatcactgacgtgtacctgccatcaggatcctcgctcccacctgcccagagggatgtggcactgtcacagtgagcagaggctcccagcaaccccgaccacagagaggaaaagacccagcgtgttctcctccttctcccccttccacattctctgctcctctccttcccggtccactccaccccactcctccctacctcttctgccgttttcgtcccctttttcatttctgtcctccactcctaccaaaatcaaaacagaggacaggctgctcgtcaccaccaggctgtggttcagcacacagtcatgaccctcgagaccacatacacctgtcatgtctcatgaggaaaaatgcagagaccctgaccaagcgggccaccgtcgcgggacatgacccttgaaatcagtctacctctcaggcatgccctcaggtgggcaccagcttcacgcggccacagcagccatgcaactgcaagggaagctgctggccagtctgctagcaacccaggctgtggtggggaggagaccaaaggctgatactggattcagaggatatttagtcactacttttctttcctcgggacccaaggagcatttacagggacctataagagcaaagagtcactttacttttctttcctcgggacccaaggggcatttacagggacctatgagagcaaagtgcagtctcctttcaaggaaaagtaagaagagtaaatgagtaagaaattgcaagggttgcccttacatagttgcccaactcattgcttgaattaaacaaaaaagtattttgtttaaactatgtcatccatgcacctactgggttatggtaggacaaagatcctaccaagaacttccaaggcttgtttagttcttgtatttgttctaatatttattctccttgtgactgctgactaatatgcaccatcccgtgcatgcctctgatgtactaggcaagggctgagcgttctgcagggactaacgcatttacatctgaacaacagcccaatgaagcaggtttaactaagctccttgtttaatgggtgaggcagcagacgattagagaggataaataactgttctgagaactcgcaggaggtaagcataggagtactacctgggagttaactgagcccagcgcctctgctcttaaccatgaagctccaagcctcacaggcactgcacacaagctccttagaaagattgcccaccccagagaggcggcaggaagctgggccttaccagttgtgatcagataggcatcggggactgtgatatcacaaacatatggcggcttggcagtagccagtgttggtgtgtcgactgttgcttcgagagtgaaggcagtcacgggacgcagggatggcaggggaggagcagcactactctctggggggctctgacttgcggcgtcacccatcagggtggagtcgaggggaccaccagtggcagcaccggtgctggttgtgctcacttccgtggaggtgttcagtggcacctctgtgggtgtgagtgatgggcccacgacggtcagctctgtgggcagagggaagggggttgcttcagaaacaaacgaggatcctgatggcaggtacgcgtcagtgatcaacaccgtaccagtgggaatggctttggagaaagaggccaggacagacacgtgaccgtctagagcactgatttggtcgtcaggaggtgtcagagttgagaacaaagaagactcagttaaaatgggcgttgtgtggacagtggtcaatggtgatgttgcttgaatcccggcagtcaaaatgtcaaaagactcagagccggggggcaccagtgcagtgactgcggattcatgggaaatgagtgaagactcaagataggaggtagtttcaatgaaagctgaggtaaaatgagcttctgaatccgtcagtgaaaccgtagacgcttcaacaaactcgagagaatcagaagggaagcttgaccatggtgacacctcagaacggctaggtagcaacatgatggtgtttaaaggcagctcggaacttggctggagctgcgaaaactcaagatttgtggaactgggaagagacagctgagatgactgcagatcactagagtcaaacaatgtaaatgtctcaaccaagggagaaaaagactgagatgtgaagggggacaagtcactcggcatcagagacagagacgcaggtgcttccgaaggcgaagagatggagccgctgagttccagcgggggtgtt

SEQ ID NO: 39378 - DNA, 2300 bp, Homo sapien
cgcatctcagctaattacatctacactgaccctgtttccgaatatggtcatattgtgaggtcctgggatttcaacataggaatattgggagcacgtaatacataagccatagcagtgtcttaacctgggttttccgccagaaagcaaagtctgagacgtgggtttatgtgcatattttattctaggacatgatcctgaggaacagaagtgagagactgaggagagttcaacagggaaaagggaaagtcagtccaaggtgttctcaagtcagacactattagaaaccgatgcctgtttttgctgtcttctgaaaagtggatatttttcttcctaattcactctttccctgagattatgacacttcctgggcctccacttttggaaaatggtcttcagttgggttctttccttatctaggctaacacttgtccctcatctccgttgtggcctaaacaacaggccagctggtccagtacctgccttgggtccccagtcactgcccttgagcagctcctgttttattcctggattcagcacgttccccttactgtcttgcaggccatccagtcacttagaagatggtttttaaacatttattaagcaatcttaaatgttctgaagtagacagtttcaagatctctagtctgccatgttgctagaaacagaatagaaatgacttacttaaaaaaatagagtaaattcaagactgtccttataccatttcacacaggtatgttctgatagactgttgggattagagaaacgaggtgttgttatgcattttgatagttgctcagttctcagcctgggctgcagaggacagtccctgggccctgggctttcatcagtggctgggccatcacttgtcctttttctctaggctatgtcatacctgaattatcggtggagaggcctcaacttactaaatgataatgacagcagtcacaagttaaggaatacaaaagtttgaatggatgatgggataatgttggcttttgttgtcagaacttggtatccttggatttcattcattcattcattcattcattcatcaatccaagtgatgtcaattgagctcctagcacttattgtgctaggcactggggagacaggtaaacaatgcctgtccttaggaagcccagaatctagtgatcagatagttcatttcagtgggcatgataaggacagggagaagcctagggagaggcacgaatccaacttcagagcatcgaggatgaagctcatatctgtgctgcatctgaagggccagaaggagccatccatatagagagctggggaagggcattccaggcgggggtgagaggatccatccatgtagagagctgggaagggcattccaggcgggggtgagaatgtgcacagccatggaggccagagagtgtttgggtttggggcactgcaggtgccagagcatagctgggaaggcctagagtggggcaggaaatggtgaaagctgaggctgcaggaagcctggggccttcatgtggaagcctcagcaactgtgttggggagcacagctgaggaactggggaactctcttacttgggtagtgagagatgcaatgagttgtcatgttcatttctcgtagcagccagctcctatcactgaagagaaaacacacaggccttggagtcaaggaagccttatattcagattccagttccactctgtctgggtggtcttataattgatttatttaccttctggaaacctttctttactcatgtcataaatgagagaaaatggactgaacagccccctctgtttccagtatcctacggttctgtgggaaaaactgtaaatatgccctccccacccccacacatacacagcttaggtaaaaacagtgcccaagtttaggaatatttgcagatattgtcctgatggtaattctgtcaatttctcgtttccagctagctgtttaacttctgacggtgattcatggatatttatggtgaatggatgtttgttaaatgagtaaattctcatgcctgaaacaaaacgttagctgtgtgacttccaatgcattgcactaacccagctctgattttcttgatagatgagctctctccggaacagcacaacctttctttatactccatggagctcgtgctgaagaaaagcactgggcacagcgctgcacaagtggccttaacagaaactgctcccggctcccagcacagcagtcctctccatgtcacagccccgccgtctgccactacttttgatacagccttttttaaccaaggaaaacagaccaaaagtacagcagatcccag

SEQ ID NO: 39379 - DNA, 2300 bp, Homo sapien
tttaaaataatcctcatgccaattttagggttgagagtgcatcctcaaaccaccaattccccaacatccctggatgaaggctcttcctggaggtgttggctccttggtaattccagcctgcctttcctgctggctgcttcctccttctgttggaaaaagcttaggcagagagttcaggaacaaatgctgagtgccaaggggacgtaggctactgcctatttttctcttcccccacttgcttatttaatgtgggtattcgccaagcttctttccccccgtcccccaccttttcacactcttcatttttgccaggtgatcttatcaactctcagttacctaatgctctgatgtcacgcaaatctacatcccttcccttctcatgtccctcaaggtctagacctgtatacagaatacacctgcctgttgagcgtcttaccttgggttgtccactgcaaactctcaacataaataacactggggttatagtccctcaaatcctgtttattttctgttattccccacctcgtcttgcttttctagaaatccattcttctcattgctgccaggggtctttctaaaacacctatcctacaatatggccaggtactattttaggtggtagggatacagcaatgaacaaaacaaggttcctgctttcatgagcctgaattctatagctaaatatataaatacacaataaagaagaaaaatatcagtggtaagttccatgcagactggggagctactttagatttgagaggtcaggaaaggttttgctgaagagaagacattaaagctcagagctgaatgacacaccttgagtggcactcaggagacatccacacttcccagatgaaaatcctttagtgacttcccaaagttctcgggatataagtccaaatttcacagcatggcagagaaggtcttctggcatctggccagttgtcttcctctctagcttctttacattacatgacattaatgcatttaatcctcacgagcaccttgcaaaatagcagctaggctggctgagttctctgatggtctgattcatctttgtactgtcactgcgttagtagttggctcaacaaacgttcatgaaacaagcaaggtgttggacaaaaagcatggatgcttaaggcaggtctagactggtgctgctcaacaaaaataaggtaatccacatttgcaatgtaaaatttcctcatagctacattaggaaagtagaagcaacacatgaagttgtcataacattttatttatccaaatatatccaaaatattatgtttaacatgtgattcatataaagttagtgagatattttacattctttttctcattctcagtcctcaaaatctagtgtgtgtatttcacacttatatcacatctcaattcggactagccactttccaataaagctcagcaggccccgcggggtggctcacgcctgtaattccagtgctctgggaggctgaggcaggtggatcgcttgaggagttcgagaccagcctgggcaacatgaggagaccccgtttctacaaagcaaaacaaaaaccaaaaaaattagtgatgcgaaccttcggtctcagctactcaggaggctgaggtgggaggatcgcttgagcccaggagttccaggctgcagcgaactacgatagcgccactgcactccagcctgggcgataacgtgaggccttgtctccaaaaataaaaatacaacaacaacaaaaaatcccagaagtgctcagcagccacatgtggctagtggccacctcccgcgaagcagcccggccactcacctcctaccaccttttacctatttctccttctccgcaggcctccctagcactaccagttgtcttgttggcgagtcctttgtgactcccactatacaagcccctcaaggccaggcttcgccctgaacggtgcctgggcggagcagacgctccatcaacgctgtccccgcctgagtccacgtccaggggatccgcaggcgccgtaccctgcttccacgcgccggggccgcccctcgcccggcctcccgcaggcccacccctcgccaggcccaggcccatccccgggctgttcgctggaaatcgtggacgtgactgggaggagcctgcccgccccggctcgctgcgccgcgcgcacagggcccgcgccagcgaccatggcggagcccacagtgtgctccttcctcaccaaggtgctgtgcgcccacggcggccgcatgttcctgaaggacctgcgcggccacgtggagctgtcggaggccaggctccgggacgtgctgcagcgcg

SEQ ID NO: 39380 - DNA, 2300 bp, Homo sapien
tttttgtggggggggggggggttgggggttaggttgctggggtgcagtggcgcaatcacagctcactgcagcctcaacctctcggactcgggtgatcctcccactgcagtcacccaagtaactaggactatgggtgcacaccgctacacctgactaatttttttattttttaatagagacacggtttctccaggttgcccaggctgtcttggaatagtttgtataatgcatggcacatagtgataataaacagccacatgaataaaaaaaataaattagaaaaacatgttagtgggggagggtggggggtgggtcatgcagagaaccaaatttaatcctgctctcactagcccaaggagacacacttgctgtaggatagaataagggctggggtactatcctgaactacagtgggacatagaagtgaactacggcacacgtcactgttcatgggcatcttacaacatattcattcagtctatcccatgttatacaaatccagaatggaaacctgaccttaaaatagagataaactggggccaatctttctcattctaatgagtcaccttcttctttaaagagttttttccttcaagcatttattttttaaaatgtaattgttggccgggcgcggtggctcacgtctgtaatcccagcactgtgggaggctgaggtgggcggatcacgaggtcaggagatcgagaccatcctggctaacacggtgaaaccccatctctactaaaaataacaaaaaaattagccgggcgtggtggcgggcgcctgtagtcccagctactcgggaggctgaggcaggagaatggcgtgaacccgggaggcggagcttgcagtgagccgagatcgcgccactgcactccagcctgggcaacagagggagactccgtctcaaaaaaaaaaaaaaaaaaaaaaaatgtaattgttttgatcatggaaaatttcaaacataaagtacaaagaattgataataaacccctgagtacctatcatccaacttaaacactgtcaatattttactatctttgtaacgtatttgtagtagtggtaacaatattgttactaccatcacctctaaattttttttttctttgagaaagagtctcactctgcatgcaggttagagtgcagtggtgtgatcatggctcactgcagcctcaaacacctggattcatgtgattctcctgccttagcctcctgagtagctgcaactacagccgtgcaccaccacacctggataatttaaaaaaaatgtttctagagatggggagggggatcccactgtgttgctcaggcaggtcttaaactccagagctcaagcaatcctcctgcttcggcctcccaaagtgctgggattatagggatgagccaccacacctggcctaactttttttcttttgctggaatattttaatgtaaatccaatacatgttatcatttccctgtatatatattaggtgtcttcctaacaggtaagaggttttaaaaaacataatacaatatcattaacctatgtaacaaagttaatgataattccttaatatcatctaatacccagttcacgttttatgttttcccattgtcttaaacaatgactatttagagttgaggtattgcaaatcagtatctaagcagggtctgtacattgtgtttggttgatttgtgtcataaatatcttttagtctactacagtttcccctcctctacttttttcatgcaatttcatttttaagaaatcagataggccaggtgtggtggctcatgcctgtaatcctagcactttgggaggccaaggcagaaggattgcttgagcccaggagtttaagaccagcctgggcaacatggtgagttgagaccccatctctacaaaaactttttaaaaagttagacaggtgtggtggtacacacttgtggtcccagctactcaagaggttgaggtgggaggatcacttgagcccaggaggttgagctgtctttgcaccattgtactcagcctgggcaacagagtgagactgtctcaaaaaaaaaaaaaaagaaaagaaaagaaaaagaaaaaggaaaaaaaaaaaacaataaaaacaacgactaggtgatttgacctatagaattttccaaattcaaaatgtagaaaattaacctggcatgctggctgatgcttataatcctagcactttgggaggttgaggtgggaggatcacttgggctcaggaggttgaggatatagtgagccatgatcacaccactgtacttcagcctgggtgacagagtgaaactctgtctcaaaacag

SEQ ID NO: 39381 - DNA, 2300 bp, Homo sapien
agagatgagagccaatagactttgttcctgaatctagagcaatttgtccagctacttctgtttgtttggttcatagaaaccagttcagagcaatttatgggttcctagtgttccagatggctttttcttttcttttctttttctttctttctttcttttttttttttttttttttttttgagacagagtctcgctttgtcaccaggctggagtgcaaaggcgcaatctcggctcactgcaacctctgcctcccaggttcaagcaattatcttgcctcagcctcccaagtagctgggactacaggtgtgtgctaccacacctggttaattttttgtatttttagtagagatggggtttcactgtgttagccaggatggtctcaaactcctgacctcgtgatccacctgcctcagcctcccaaagtgttgggattacaggcgtgagccactgcacccgtccgcctttttctattcctgaactagactgcaagtgtattctgtcatgcattaagctagtatctgagtgccagctgtgtactggctcctgttgtgggtgctgggatacagtgatgaagttgctcttcgagcctgtattcaaaagggtggtgagagacaatggtcaagtaaacaagtcaggccatttcagaaagtggtaacagttactgagaaaatgaaacggtggagaaaatgaaacagtgcaaggaagcagccagaaaatggaggagtcagtgggacagcacttacttttatagaccagcctctgcctgtgggaaggagggcgctccaggaggaggaagaactaaggctaaggctggaaggtacagaccagcttgaagtttcacagaacaggtagatggtctgtaagagatgagagcagtgatagaaacttggatattttattaggcggaggtcccgggaagattttgagcagtgttgtggcatgatctgatttgctttgtgtgtgtgtgtgtgtgtgtgtggtttatgtttgtttcatattttaagagtgcagttggatgagtattgacaaatgcgtgtaaccaccaccctaagcaggatatagaacatttccatcaatcccgaaagtttccttatgtctctttgcaatcagtttccccagcaacaccacatacacctcactttatccccatcacaggctattgctgatttgctttctgtccctgttttacctgttctagaatttgatattaataaacgcttgcagtaggcacattgcatgtggctgacttctttcactctggaataatgttttttagactcaaccgcgttgttgcatgtatagtagttgttcctcttttatcactgaggaataagtaataagttattgtaaggctattccatagtttatttgtttaccagctgatggacacttaggttatttctcctttttggttatcataataacgctgctgtgagcattcacgtgcacatctttgtgtggatacaggttttcatttctcttgggtaaatacccagaaatgggattgctaaatcacataggagtgcatatttaactgtataagaaaccaccaaactgttttccaacgtggtggtttcattttacactctcactagcaatgtattatgacttactttctgaagggttcactctggttacagtttggactgaggtttacggcatgaattgaaaatgatatttcacacttgatgtagaaaagaacccttcaagacagctaccagattccaacccgtaatcactgatgtctggtgtagggaagcttgaaaggatggtgtcttgttatttggctgccccagctctcctcttttaccatccaacttggatttaaagatgagattaattcctgaatattcattcactcctttgctttgagccttctactaatggcagtgaaggatacaagtcttttactgtgagcaattctcatcccaaaggattttctctattcgtatacatacaggtcagtcttgaatatttgccgtgtaaatagcctctgcaaaataacaagaagtcattttctagggctgatcttgattctcactgcttttatttttttttctgtccaaagggatgattcagacaaacatagcttccaaaactcaaaaggatgtcatcagaagaccaacatttgtgcctcagtggtatgtgcagcagatgaagagagggccagagtaagtgttctgaagcagctgtttgctgacagatgcttgagatgttcatgccctgggctcatcaagtcactcgtgaatctggagcctgttttcctgaaaagttcctgtttgcattactctgcagtttcc

SEQ ID NO: 39382 - DNA, 2300 bp, Homo sapien
ttttgtatttttagtagagacgggttttcatcatgttggccaggctggtcttgaactcctgacctcaagtgatccacccaccttagcctcccaaagtgctgggattacaggcgtaagccaccatgcccagccaagtgctgctatttctgaagcattttcatattatataatggcattcatttttaatgtctttatgaagtggatgtaggaaagatgaattttatgaagcagatagaatacatgattctaggattctgtgcaaattaatgaacaattaaacctccttatatttgggaaatggtttatcatttacaagggactttcatcccaaataaatatttcatcattgttcctcacagtgaaaccacaaagaaaggtagatatgtcattttttagccttacttaagagggtaaagaaactgaggctcagaaatagtaagcaatgtttattgcaagcagcctcagctcatttttagaagaatgaaggataatgtaatgaagaaataaaaggtaacattttcaaggcctcacatcactagaaagtagcagagtgcatgttctgatcccatatctaatgctttttctctctcactacagttccctctgaacagaggaatgtctggagggatgggttttggtggtagcttctcaatgtaaacttattgtgaatgagaaagatctgtatatattttcacttccagttaatctcctgagttaagccttttcttgacaggaggagggtgtttgcttttactacataactactgccccctgggtttggaagagaaaaaaaatgtctcttctaccccttccccacacaaaaaagcacaattcacacacacacacgagcacacatgcacacctcacattcacacaccacacgtgcacatgtgcctcaaacacagacatgcacatcttccacatgtacccccggcacacaaacacaccccacataaacatcacgtgcatgcacgccacacacactccacacgcgctcacaaacacaccctaactccttccttcctccctgcttccagaagggtgtgacctatcaagtttctagaggaaggccaattccctgcaggccacactgctttgtcgatgttgacttctgatatactttggccttatggagtgagatgaagaaaactggaaaaatttccagcttaaacaaagtcaggcctttagactgtggtttcattttctgttggtttctttgagcattgtgaatctgtcaatagccaggtacacccgtatcacgatatgggcaaaatcgaatgctttctggaaaatcttctctgatttgccctaatctatctctccattgaccccagtgatgaacgttgactcaggaccaggagatagtggacagccccacctaaaagttttggggtttgggggctactttgagtcccagaagagagccggggactgtcatcctagagctgatcctcactgtcatcctaggccatggaatgacgtgctctgccgtgcaggcagaatgtcaagattctttcatcagctgacacagttggtgagcacctgtagtctcagctactcaggaggctcaggtgggaggatcgctggagcccaggagttcgagcttgcagtgagctgtggtcgggccactgcattccagcctgggcaacagagcaacactccatctcttaaaacaaaaacaaaaacaaaaaaaaccgtcagtgtcaaaccacccatcttcaagatttttacacatcagattacgccaagtaatttgatagcacttggatagcaaagctacaaaagtgaagaggaggaagggtggtaggaactcagtcacattaactccaatgttcattattttgtttcattttggctttttttccccttagctccttcttcacatcgtagaaacatggcatatagggctagaagcaagagtagagatcggttctttcagggcagccaagaatttcttgcgtctgcttcagcgtctgctgagaggtcctgcacacctagtccagatcagatcagccacagggcttccctggaggacgcgcctgtggacgatctcacccgcaagttcacgtatctggggagtcaggatcgcgctcggcctccctcaggctcgtccaaggctactgatcttggaggaacaagtcaggccgggacaagccagaggtttttagagaacggcagtcaagaggacctcttgcatggaaatccaggcagcacttaccttgcttccaattcaacatcagcccccaactggaagagcctcacatcctggacgaatgaccaaggcgccaggagaaagactg

SEQ ID NO: 39383 - DNA, 2300 bp, Homo sapien
acataccactatgtctggctaatttttatttttagtggagatgaggtctcgctatgttgcccaggtggatctcacagtatgttgcccaggatggtcatgatcctcccgccttggcctcccaaagtgttgggattacaggcacaagccactgcacctggcccttaaatcatttttcatggcttcaaattggaggagattctatgtctgtactcccaaccactgtagccaaactagactcttcagtctctcatcttctatattcccattgtggcatttacccatgaatttgcttatatttccatgcattttttcatgtcttcgcatacatgctccttgagtgcagggactgttttttaaacttctgcatgtccttacattactaactaatgtaaataccacatagaagatagtcaataaacatctagaacttagttgatttgataataaaaggtccctgggaacctgtcagaccacaaataaggccaagtggattaaaagacaactatagaagcagcaactagagggaacaagatgtccctcttagacatcctaagatgatcctatgtggcccccatgtttggctggttttcataacaaagtactctattcctgaaagagggtttatataccatgaatgacaaaactgaggagaattctcattaatcattttgaagaatttctaagttagcaaccagaatctattattttttaaaaagatgtatttcttatctgatcaaatgacccatctattttatttgaagatgttggaaaaaaaaaccttttttctcttcaacttgtgtcctgtctttgggggcctaaaaattaactggcactagacagataaataggagaaaagacaaagtttatttacacatgcatgcaggagcttccagtaacagaaaactcaaaagtaaaggtttatatacctcaacttaacaaaaaggaaagttttagggcttcagtaggagagtttggaagttttgattgggttgttttgtgtttttgagacaaagtctcagcgctatcccccaggctggagtgcagtggcacaatcccggctcgttgcagcctcctcccgtgctcaagcaatcctcccacctcaggctcccgagtagctgggactgcggctgcacaccaccatgcccgggttgtttttattattattattattattattattattattattattattattattgaagagagctcactatgttgcccaggctagtcttgaactcctgggttcaagcaatcctcccactgcctcggcttcctaaagcgctgggattacgggctgagccacagcacccagcccattgggttttttggtgctaatggtaatgggacagtctgtcttcctggcagctgaatactccgagaggcttttaatggcaccatgttttcgggaggttttgctttagtcagataagggaagtttcattaagatttctttctacatcttctgtagctcaatgttttcacttaaaaacaatctttatgtcaactctgggggtcaaagtacgtccccacggtggaaaagttcttgtcccaatctctacggggaggaaccgatctgaaatcttgggatatgtcttagcatgtccaccgtgattgaggtacaagcagtggttcagggcaccgagttagcgattctaggtaagcaagaccatgtcaagaagtggtttgtccaaaagttcgtgagaaggcagaaacgagggagagtggcaatcgttgttctttaagagggcacggtggtggaggagaaacttgcacatcggggcctggggtaccacgatctggggcctggggacgcgatttggggaaactcggtggcatctgggctccgcttgatgccagtgcgtgttcgtgcaagttacttcctcaagttcagggtgaggataataatatctaccatgtggagttgctgggaagattcactaccaacagaggcagagcgcacggctcgcaggaagcgctcgctagggtctgctctttccgggaatgggtggggtgcgcactcctcaacagggctctcaggacttgcgtcacacgcctcagtcggctggcttataaaacaccggccagagccccaagatcgcttttagtttctcttctttctaaagaaggctcgcggagcccggctggagaacctcaccctcgccgagcctagaaccgagagggggccaccccaggcggtcaccagcagatttgcccgcgcgttctctttctttccacccagttgcccttgcggccggctgtaaacctgccactaggacccggtcggtgagatctagcct

SEQ ID NO: 39384 - DNA, 2300 bp, Homo sapien
ttgcaactcttcttccttcactttcagatgaaacaccacacaattgcataactctaactgataaacttgttttctcctaggactgatctgcaagagacttttcttacttaggctaatgttgtttggtttacagacgcatgttatttaaaggatgaatctggaacttactgtaaaggtttacgcaatagtgtctttaacagaagaaatagaaagtgcttaccttccagaagccacttagattcacttctgtctttgtaccacaactgtgtattgaagatgtcatttgccatgtacaggccctaaccaattacacacaaaaggccctaaataacagccacatgaatgtctcattattaaataatgaagttactgtcatgagaagactgtattacaaaactgtatggtcttagacatactcactgcagcccaaggaggaatctgtgctatgacagaaactgaatgctgtgtttatatcccagatgaatcaaataacgtcaccaaattaataactgatttgaaaaactctaataattaacctttcggatccaaaaccctctctaagctactggttaagtaattgatttggatcttggggaacttggtggcaaaagctgttatgtattttaggaattatcatagtttgtgttttgtcttgcctttgtctgcagagctgttatggtatttatctgcaattgggtcaacacacagctgagaaaatgtgtagaacaaagactactcagagaattgtttgattgaagaggcagccgtgtagcctgaatcaggttccagaactactttctcttgttgctttataattcggacttggtcctttccaatttcccctcctccctgggatgtgactgccaggaaggggccttcctagtgacatgaggtttgatcaaatacacggcctgagaatataattcttctataatgctttctctgaaagcttttgaagaaaaggggaaaatgtgaaaagaaaatttcagcactttccaaacgtactatgccaaggggaaaagttaagccctgtaaactaaatcacagaacatggctgtttttcttctctggtgcatgactgttgcttcctgatctttgtgttgatgttatatattaaccagattttttattctttattcagactaaatgacgttggagatagagacccttgtgattgttacctctttacaatagaatattaaacaacccccttacagtgtaatcaatagtagtgaattgaatcttctgtgtacgttagcctcatctagaaaatgctgtaattacgtacagcactcctgtttttggtgatataaatgaccctcacctttccctgcatcagggagcactgatcaccattctttgctgtcagtggttcccgggatagccgccctcacactttgcacttgaataaactctttcaactggatccctgagctttttggttattttaggctgacattagttaactaacaagatgttagttcttcagtctgttaattctgaggggttgaccagaggtcctgtaaggtcccttccaactctaacattccacgatttcgtgaatttaaagactgtggttgcccctgtattaactgggttcaggagtaagatagataaattaagtcatccaatcgacaaatatttattacagttctctattgtgtgtaggtgtatctgtggaaataggaaactgtattttggtgcactcctgcttccaaatcacagaactacaactccttcagcagaaattttctaagcttcccgcaccagccagagaccaagattctgcggtgcacatagtcaagggttgctatggagtccaacacggccccaaacagaagtggtccctgaaaatttctttcccagaaaacttgcatttgaaaaacaatgccattccaattcgccttttcctaaagtaaactcataaatagagacaaccaaactttcgctctcagcccagagaacgacgctctcctcccaagaggaacctcggctcttccgcggcagaagctgcacggaaccaagaagccgcgggcgctggttctccaacgagcttttctcccgttcgtaccagcgtccaggcggggttaccgtggagacagaacgtgctgtgtggatgcggcgaaacgctgaggcgcggccttcgctgtgtggtggggactcacaagaccgacgtcaagatggttagtggctctgaatagtaagggagtactttgagtaggtcctgaggctggcgattagaggttcccagcacacttctgtgtgaagtctaggtgtgtccgcagagagtaatccccagc

SEQ ID NO: 39385 - DNA, 2300 bp, Homo sapien
gttaacatttttttctacactgtattataaaatattttatattaaattaactctgttgcgtctgttgcttttactttatcctaagcagtaggtaagtattgtgaaacttatatttcacatatgcacatatgtgttatgtatatatgggtgtatattctaggttacagtgtaaaatgtcttactgtgggttatggatcaaaaagttggaaaactcagtgggtgagaagttagaagataatgttggataagtaacacacctgtagaaggatttggcccacagaccaccagtttgcagtctctgagctaaattgtggaggatattgaatatgagtatacatacatagaactcagtttgtaggtaagttgcagccagaacagagaacgatataataaaaactcttttagagacattaatatgaccccgtctcaagactggtgggaacagagactgaaggcagaaaggtcatttaagtatcactaaggcaatctaaaaatgagacccgaattcagaatcagaaaaggagcaatagggaaggagataatgtaggtaaaacatggcgccgagtagaaaagatagggttttagagctgggagagacctttggaatcatagatttcatcaccatcttcgtccaagtagggaaagtaataacaggagaggaaaaaacggaaccctctcagaatttgtcaatgacgtcacactgacttaataaaagagctttcaatagttaatgcaattaacagaaggcttggattcccttcaggatgtgaagggcgagccctcaaatttactttttattcaatggattaaaatggccagtaattcttatccttttaaacccgacttccaattaattaattacaagtgagcctatggggcgtgcccaatcaattccttccccatcctgaaatgggtcctttagcattctcataaacagtacgtttcctgaaataccactaaaccctcttaagaagttttctatgatttcagcagtttaggccttctgaatgagcccagaactcctcatctgcttgttaattttccaactgcaaagcgttattgaacatttaatgaccctgccccacgcaacgcccactgcggccgggcgagggaaaccggagtaggtcgaggaaggggaggcctgcgctttcgggagggaagccgctggggctagtctggctgaagctgggcacttccttttttccctcgatacttaaggctacggggacacagggcgggcaggcacaacggctggcgcgtctctctacccttgcccagagtccgccttgaataatcagctaacaaccccaattcccttgaacccagcacgggagacccggcgccaatggctaggtcggtctcagtcccatcccgatgctagccccgggaagctcctggagcgcctctggtttccgggtgcgaatagtaaactgctcgggaaaccccagaaccctccctttgaggaagggtgcagacggcgtctccgtttccacggaaacaggccgagccatgtcgtcacttccgccgacctgtctggactccagactgttgggaggaaaagaggaaaactgagcaacagccacgacagtggacgcgagcgtctcctctgtgcgcatgcgcccgctcagcggcctgcttctatttatgtgggggatccaacatggcggccgcggcgaccctggcgatggcggtgaagcccatcagaacgtagtagcggggaaggggacacggtccgcactcaccgtggcgccggcggagacggctgagggtggtggagggaagaaaagcgacagagagcaagaggaagggcgggcaggcacgcagcgcgccgtagaagcgagcgccggctcgagcaaaagcggagggccagaacagtggggatggcggagccgcgcagagtagcgttcattagcttgtcaccggtgcggcggcgcgaggccgagtacccggggcccgagcgtgagcccgagtacccccgcgagcccccccggctggagccgcagccgtaccgcgagccggcccgggcggagccgccggccccgcgggagcctgccccccgctcggacgcgcagcccccgtcgcgggagaagccgctcccccagcgcgaggtcagccgcgccgagccgcccatgtcgctgcagcgggagcccccgcggcccgagccgccgccgccgttcccgccgctgcccttgcagccgcccccgccgcgggagtcggcttcccgggctgagcagccgccgcggccgccgagggagacggtgcgcctggagctggtgcttaaggaccccaccgacgagagc

SEQ ID NO: 39386 - DNA, 2300 bp, Homo sapien
aattagatgggttggaggcagccactgactttgccataaacatatgtatagaattgctttggtaaggtgcttacctggctttcatctttaaagtgggagtaatatttgcctttcttacctcacaagggtatcatgaggaccaaatgaaataatttatatgaagaagtattgaaaattataaagcattgtacaaaacaatgtaggcaaagagtacaggtgtttttatcttatcacagttagttttcgaaattattactgtcttttcacatttaatccctcacccctcatatcacttatttgcagatggtactgccccttttctgtaagatctttataatagtgtagatgtttgtagtagatctttctagtagtgtatcaagtagaacgataagaaagtagtttttttcttttacctttcttcaatcattttatttctttttaattcagtgtgattaaactggaacctcttcatttttccattctccatataattgaaaaagatacaggttaaaattacaacttttgtacttagccttatattcttacagtaactaataggatatgtatattccttgcccatggcaatgaagtttccctaaaaatctgactttcttaaagactagttagatgatgtgaagaacctcggaagtagaggtctagagatcccaggtaacagatatctttctacaatcagataagttccttttttctttcctactttgaacaccttcatttggttaagttgtccttcacttagtgtttgctttttagccatctttatcaggtgaggtaatgataaaccttgagatctagcctttgggaacataagtgtgatttaaacaaattgagttccttgctccaagcaaagtacctcctcattctaggtcctcaagtatgtgctttctgaactgggcagttgtttttctatgctattcaattcttttaaaatatgtgctattctttttctaaaatatatttgctatttttctttctttttctctttcttttgagacagagtctcgctgtgtcacccagtctggagtgcagtggtatgatcttggctcactgcaccctccacctcccaggttcaagcgattctcctgcctcagcctcccaagtagctgggactataggcacccaccccaccacgcccggctaattttttgtgtgtgtatttttagtagagatggggtttcactatgttggccaggctggtcttgaactcctgacctcatgatccacctgccttggcctcccaaagtgctgagattataggcgtgagccaccatgcccggcctaaattaaatgtttttaaagttttctccacttaaaagcatacggctaagacagaaaaaatagtttctgttaaacagaatgttgttgctgttttttgtttttttagaccgagtttcactcttgtgcaatgacgcaatcttggctcactgcaacctccaccacctgggttcaagggattctcctgtctcagcctcctgagtcgctgggcttactacgcccagctaatttttggtattttcagtcgagacaggatttcaccatgttggccaggctggtctcgaactcctgaccccaggtgatccacccgcctcagcctcccaactgggattataggcgtgagccaccgcacccagccagttttgttattctttataaaatctccttatggtaggaaatgaaatttactccttatctggacacttggtcatctttttaaacttgatttctcatcagaaccatttgtcattaagaatagtagcagtgggaaggaagaaaaaggaatagtagcagtgatccttaaatttttcttagcaggtgatatatttagaatatactttattatttcagaagtttttttcttacaccaaattatcagaactaatttttatttcagatagtaaccttttctaaatttattttacaaacatccttattgcagtctgtgttgcagttaggatttaagggagatgctgccatggtggatgaatttctttgacatttatagagttaaagacaacaggatatagcggaaacttttttgttttttaatctagtatgatgaattagttcccgcttctctaacaacaaaatatggaggcttttatatcaacactggcactctacagtttcgccaagcttcagatactgaagaagatgatattacagacaaccaaaagcacaagccacccaaggtgagtttatcaaacattgcaacagtactgagaatgttcaattaataggattttttttaatgttacttgtgtcacacgtgtgaatgtaaggaa

SEQ ID NO: 39387 - DNA, 2300 bp, Homo sapien
ctactgattttttgttgttgttgactatatctatggttatttttttcccccaaaatatactgcctccagccacacatttcagctggatcattgactgtattctggtcagcgatcctcatggaatgtagctaactctattaataattatgatgtcagtgactccttaaaggacagagtcatagagtctgtcttcttggattcaagttagatatgacaccagattcttttgtctgctcgtagaagtctgcaacttcaatgtgggggttgatcacacgatttggacctcttttttttgacctacactatttttgtttgtttgttttgaaatggagtcttgctctgtccccaggttggagtgcagtggtacaatctcagctcactgcaacctccacctccctgcaacctccgcctcccgggttcaagcaattctcctgcctcagcctcccaggtagctgggactagaaggtgcatgccaccacacccagctaatttttgtatttttagtagagacggggtttcaccatgttcgttaggatgtcttggtctcttgacctcatgatccacccgcttggcctgccaaagtgctgggattacaagtgtgagccaccatgcctggcctacactattttttaattaatacatataagatgtagatatttttggggtacatgtcataatttgatacattcatatgatcaaatcatggtaattgggttagccatcaccttaaatatttatctttataccaggaacatttgaattattgtcttctagctattttgaaatgtgccatcaattatttttaactgtagctaccctactgtgacctatactatttctaaatatctttgtatttgattctaaagactcttaatcttgatgggaattgatttttttgttttttcatgttcttaggatcacaacttttacagatttttaaaatattggccgggcgcagtggcccacacctgtaatcccagcactttgggaggctgaggcaggagatcaagaccatcctggctaacacgatgaaatcccgtctctactgaaaatacacaaaattagccaggcgtggtgacacacacctgtagtcccagctacttgggaggctgaggcaggaggatcacctaaacccgggaggtggagattgcagtaagccgagatcgcgccactgcactccagcctgggcgacagagtaagactccgtctcaaaaaaaaagaaatttctgtattaagccttacaaaagatatccatattctaatccttggaatctgcgaatgttattttatatggcaaaagaagggtggaatctgtgtgtgtgtgattaagttaaggatcttgagatggggttgttatcctagattagcctatggcccataaatgcaatcacttgtatgcttagaagagggaggcagaaggaggtgttttacacacacaggagaaggtaatgtgaagggagagcctagagggatttgaggttggaatgctgcggctgtgtccaaagaatgctggcagccaccagaagctggaagaggcaaggaacaaggtcttccctagagcctctggagggaccatgggcctgctgacaccttcatttcagcccggtgatattgactttggactttggactgaggaaggataaatttctcttttttcaagccaaaaagtttgtggtagtttgctataatagctgcaggaaacttacacaatacccagctgaatttgaatctctcaaatggctttgcctctctgttcatcacaactcatttggtgttctactgttaggagattctttttttttttttcattagatgttcatctcaaagtaattgtttattgcagcagggcacagtggtacatacctgtaatcccagctacttgggaagctgtaaggtgggaggattgcttgagcccagaagtttgataccaacctgggcaacatagagaggccctatctcaaaaaaaaaaaaaaaaaaagaaaaaaacctttgaacacgtgtcctaagaatgcaaaatagagtaatggcctattttgatttattatcatctttcttgtttctttaggctgccaaactttttgatgaagaaggaaggaaaaaattctttacacaggatatgaataatattcttctggagtaagtaattttctttaaaaaaaaaaaccttaagaatgatacattaaaaaatgtaataggcctttgagatactgagtggttggcaagtcttgggcatgagttcttccccttaagccttacagcatgtatgattcacatttgtttctcagcaaaattatctttct

SEQ ID NO: 39388 - DNA, 2300 bp, Homo sapien
tcaatattgtgcacctgagattcatcttatgtctacatatagcagaaatactttttttttttttttttttgtgacagagtctcgctcagcccaggctggagtgcagtggcgcgatctcagctcactgcaaccaccatctcccaggttcaagcaattctcctgtctcagcctcccgagtagctgtgattacaggcacccgccatcatgcccagctagtttcctattttagtaaagatggggtttctccatgttggccaggctggggtcttgatctcctgacctcaggtgatccgcccagcttggcctcccaaagtgctaggattacaggcgtgagccaccgtgcctggccagaaacacattcattttttactgctgggtacacagtgttccattgtgtgaatatatcccaattaatttgtccattttactacttatggatatttgggttgtttccaggcaggtagcctaagctaaataattcttcaaaagtaatcatctaggaaccatgataccagatgttcactttttaattttttttttttgagacagagtttcactcctgttgcccaggctggagtgcagtggcacgatctcggctcaccacaacctccacctcctgggttcaagtgactatcctgcctcagcctcctgagtagctgggattacaggcatgtgccaccacgcccagataattttgtatttttagtagagacgggatttctccatgtttagtagagacagggttggtagagacagggttctccattctccaggctggtctcgaactcccgacctcaggtgatctgcctgccttggcctcctaaagtactgggattacaggcgtgagccactgcgcctggccagatgttcacatttttaaacataggattttgtcatatgtgctataatatttatttactggtgttcgtggaataggttaatatacacatttttaaacatgggattttatgttatatgtgctgtaatatttactggtgttcatggaataggttaatatgcttatttgtaatatttgtgttttaaaaatctttttctttaccaaaaatcacattttaaaaacagttgttttggctgagtggctcacgcctgtaatccgagcactttgggaggccgaggcaggcagatcacttgaggccaggagttcgagaccagcctggccaacatggcaaaaccctgtcctactaaaaatagaaatatttgttgggtgtggtggcacacacctgtagtcccagctactcgggtggctgaggcacgataatcacttgaacccagaaggcggaggttgcagtgagccaagatggtgccactgcactccagcctgtgtgacagcgagactctgtctccaaaaaaaaaaaaaaaattgtttcagtaaagaaaagtcttataatatttctgcacctatgatggtgataaaagtatgttttaagtagttacatatatacttgtaagatgcttgtaagatgaaagtaataaattggttgattaaaactgtcagatgcaaacctactttcttttttgccctgaaaacgcacatgaataagagtttttgggttcctttcactttggccttgaccttgcatttttacttgcagcctaagtcaaaattactaaccataactgagagaacaggataccaacgtccggttggtagtcacccaaaccaaacacgtgtcttcgtgttccagagcagtgtctattcttagggtactggtttcccatcacaatggaaattaaccagtagtagtctatacaagtagaatacaatgattttgttttccgttttctgtatgaaagtgttcacggggcattttgaagagtgtaatggaacactattaataattatgctgggcgacagggaaaaactggaactcttcttggctaactggaatatgtcattctaattttgtatccagtgtgtcttaggaaaagtcagtgctgtagaagaaatgtccatatttagatatgctaatatttcaaatctataattggtatctaaaacataaattttatcttttgaggacctgcttacaagatttcgtaaatatgtctgataaaaacttctagtatgtttttctttttaggatgatcgtttaagagaacctctgcaaaaactgaaactggctgttagcaatgtcatgcctgaacagctatttaaataccaggaggactgccaggctcgtagtcaagctaagtgtgccaagtatgtatctcttctatttggactggcttttgcatttgagaagtgtatgtacgttatgtatgtatgtatgtatgtatgt

SEQ ID NO: 39389 - DNA, 2300 bp, Homo sapien
tatgctaccaaggaataagcctggtgaagaaacaggcttttctgttaggcacagggctttcggagctgaacaatttcccagtctgatggaagagactgacaactacagtatggagtagtggccatgtacctacattaagagttatttacgatgagtaaataaagggagcaacaggggaccagaggaggtgaaatgaataattttcaccttgccgtattgacttcaagggcctggagaagcgtctaacctagacttctggagtaagctgaagcccaaagggtaaagaggcatattaatacaaatggttaagtttcaggcagagggaatatcaggtaaggtgtgtggtggggaagagacaatgaaagtggagatacctggagcagagggtgataagcgaaaagtgagagatgaagattaaggtacaagcgaggatcaatttatgtcgtctgagctttatcttagggacaatgggaagcccctgtgatactataagggtaagtttactgggactccgaagtgatttgttcgttatacaattaggaacagaaccaaaaaatgaactgctaatttttaaaattaattcctaatcaatgtactattacttccccgctgtcccatgtttatcgctgacgcaccaattcaaaggacacggcacatgtttctttttttttttgagatggagtttcgctcctgttgcccaggctagagagcaatggcgcgatctcggctcactacaacctccgactccagggttcaagcaattctcctgcctcagcctccggagtagctgggattacaggcatgcgccaccacgcccggctaattctgtatttttagtagagacagggtttctctgtgttggtcaggctggtttcaaacccccgacctaagatgatccgcccgcctcggcctcccaaagtactggtattacaggcgtgcgccaccacgcccggcctgcggaaatggcctcaacgcttcaaccggaagcagaaattgaccgcggcaggcgccatctaacggccgctggagcaaagctcctcctggaaattcgcaacaccggaaaaggtccggctgcttccggtaaaaacccaccagagctgacgttcagagggcgagtctcgaagatccggccaatttgcccagcgcgctgtgctccgcgacggcgcatgcccgcttttgcgcaggcgcggggactacggcgcaggcgcggagactattgcgcaggcaagcgcgtacgcagaagcgtgcgcgcgcccgttcaacgtccggagcatcggtgcagtttcgagggtaaagcctttggcgcggtgatgtggacttttgttctctaactacaactcccagcatacgtcacccctcacgtgggcgctaggtgtggtttcgtgggatagggtaaggcgaaaatgaagtgacgatgacgtaccaaagaggaaaatagttgaatatgttgtgtgagcgcgtcgtttgcagaagccccagtggcctaatggataaggcattggcctcctaagccagggattgtgggttcgagtcccatctggggtggcctgtgacttttgtccttttttcccctttctaaacaaagcgaaatatgccaactttactttttttttttttaaatgggaagtgtgtgtgtgtttttactagctggtgggctgcaattttcgagaatctgcacacacccatgtcctttgtctgagccgcaggtcccctgggatttggggagacgtcaatacgttgaattttgatatcccttttataaatcatttaaaaatgtcttctcagcgtgttccatatcaaatccacacccacaccccccgccgggcccgcttctcctgagactcagcggttggtcggctaacgggcatcttcaatgacgcagtgaagaaaagcccctgtttccccaaacccttgttctgggttagaggtcctggtaccttcagttaacagtcgggtttcgtttgattttgttacggcgcccctgggccttcgattaataaggttcggtcaacggacaagtgagcggttccactgctcgtcagtcgatagggggagtcggtagtctgtccgaccgtaccattaggcgcctgggccggaggaggggttttcagggtcgtaggacgccgttgggcaccacgctcggagaaggacaggacaatggcggccttagggtccccgtcgcacacttttcgaggacttctgcgggagttgcgctacctgagcgcggccaccggccgaccctatcgcgacaccgcggcctatcggtaccttgtgaaggctttccgtgcacatcgggtacg

SEQ ID NO: 39390 - DNA, 2300 bp, Homo sapien
tcttgggttcaagcggttctcctgcctcagcctccggtgtagctgggactacaggcatgcgccaccacgcccagctcattttttctatttttagtagagacagggtttcaccatgttggcaggctggtctcaaactcccgacctcgtgattcgcccgcctcggcctcccaaagtgctgggattccaggtgtgagccactgcgtccgacctcaaaaattttcattggcccaatacgcatttatttttgagatagagtcttgctttgtacccagcctggagtgcagtggcataatctcggcttactgcaacctccacttcccgggttcaagtgattctcctgcctcagcctccgagtagctgggattacaggcacgcgcatccatgcccggctaatttttgtatttttagtagagatggaatttcaccatgttggtcaggctggtctcgaactcctgacctcaaggtgatccgcccgcctctgcctcccaaagtactgggattacaggcatgagccatccctcccagccgcaatatacatttaaaggaattttgggactattactactattcatgttttttattgatctgctaataacagttccaaggcgatgagtatacagtgttaatggaacacaaatctctattatttcctttcaaagtatccaggaagtgcctgtcttcttaaacatttgattttattaactcattcttcttacagttttaaatttctttttaggcgatgaatatacagtgttaatggaacacaaatctctattatgtcctttcaaagtatctagaaagtgcctgtcttcttaaacatttggttttattaactcattcatttttcttacagttttagatttctttttaagcaacctttcttcctgcacactgacctatgtcttacttaaggaatttttttttttagaagtctcgctctgtcgcgcaggttgcagcgcagtggcgtcatctcgactcactgcaacctccgtctcccgggttcaaacgattctcctgcctcagcctcccgagtagctggggaggcgcccgccatcacgcccggctaatttttatatttttagtagagacagggtttcaccatgttggccaggctgatcttgaactcctgacctcaggcaatccacctcccttggcctcccaaagtgcggggtttacaggcgtgagccaccgcgcccggcaaggaattaatattttactaaaacagtttttagaaacaccagggaaaggctcagggctaagtattttattccagtttgttctaacagccacgccatagcagacgtgtgaccacctccaccagccctacgaggggtagaactgaagccaaggccccagtcacgggccgggcttcagaatccaggcttccctgcggccagcgccgctggctccctgctccccgagatcgcctccccagtagctgagaatacgctgagtttttatggtttcacattcagactaagccgcccgcgaccttgtaggtaaagatgaatccgaatgggtcggcgcgcctgtttcctagggtactgctttcgggcgctttctcctgaagttgacacttcccagccgaggagccttaaagccccacgcagcggaaggaacgcggccccggcggcggcgagacaggcctgctcccggccgggaaaggcgcacgagaaccaggacgcgtccacgccactcggggcgggcgttcgccccgagcacgcccacctcagacgccaaggaggctgaccgcagtccggtcgacgatgggcatggtctctacttactttccgcccaggctaacctctagcgcattttgctaatttgggtctgaatcgccatcaccgcgggcagcgcagccttagccgccagccctacagccgggagggaatgtaatgtaaggtttggcgcctcggggcggatccggcttgcacagtcagttaaggaaccagagtatcgcgagatccggggtaaaggggcgggaggagcgcgcgtgcacgcgcccagagccgttagggtggaactccactcgggcggggcgggcggagtgatacagctggacgccagttggtggagcccccgcgggaaacgactgagcgcgaggagcgtgcgcgctcccgtcgtggcgacggtggcggcgagcggcgtcagagcttgagggggggttgacggcttctggcgggtggcggtgttgaaggcgagagcttgcttggcccgtgtcgcttctgtcccaagaaccggacggagagtgagggcacgagggtcgctgtcgggggctgtcgtcttccacgtacacgtcg

SEQ ID NO: 39391 - DNA, 2300 bp, Homo sapien
gaagtactacctaattgaaacacacatttgatacttggatcatgttatcttgtattataacttattactccattaatatatcctcggccgggtgcagtggctcctgcctataatcccagcatgttgggaggccgaggtgggagggtcatttgaggccaggagttggagatcagccttggcaacatagtgagaccctgtctctacaaaaaaatttaaaaaattaaaaaaattaatatgtcctatttctttagcaaaatcattggctccttgaggggagagagcttgtcttatatgcccctttgtaattccattgcctagcacagcagatgttgtcactaataggtttgattctgtgatttggatccaatgtcattgtgacaggatactttttcccccataataggttatttttatatgactttatgcccacaaaacccaaagataaaacacattaaattgaaaataatttcttgtattataaggtgatttggttcctatttgcagttctttcttctttttataaaataggtgctgttttacctagtttcttatgaaaaacatggtttgggccagatatcttgacagaaaccaaattaccagcatttttcttttaaaaattattgttggtttagctgaattgtactgccatggaataagcccaaataaatttgttaagtactgcatggttatgcagccagattgttttaaaatgtaaaccttaaagtccccaaggcagaactttaaaaatatcaataaacagtcagttgctattctctctcaaggtatttctgtatctcaaattattaagcgttttattatttcattgttttaaagatttctataatggctgctatttgatagctgtatttgttgagtttgctacggttatcaaatatttatggagcacccattcatttgcggtgaggagttattttaaaatgttttttggcatttatagaaacagattctgatcttaaaagctcaccagggaaaatatgtacaactattatgtatccataaaaattttaaaaaacacaaaaaagctcaccagggatactgcctggtttgctatattcctattaggaatttgttcatattttaactgatagctgtgtcttcagggcacaataacttaatatttgaatataagttgttaagcacaaatcagttactctgcctgatgaaatgtttgattagtaaaactccatgaatactgattttattctaaggcctgagccattagtttaacaaagcactgaaatgattctgctgttgccattaccaaaacatttagatacttttagcaggaagacttattagatacataagggatttttttgttttgttttgtttttgtttcaactttaaaattttatcattttaaaattgcttaatataattagggtacagatttaaaatgaaatttttttcttaaatggtaggaagcaaaaagcttctaattaaatagcattgacattctgatatgagtttatcatagcaccattctaacatgagcttgaggtcctcaccaaagtcttgatgaaacatactttttaaagaaataattttttaaaaccccacttggctcaaagacattgtccagagctccagctttggacttttacctgtagtcagtcatacaattatctggggttatacttgttaagtcagtatttaaaaaaatgaaacaccctgattttgttcacttttgtttttatataaaagaatctttacagtcaacatgtacttctagatgctgtattgaaattgctggcagagtttattctatacaaaatgaacaatctggccccttgttttatttgtaaaggttcaatgtatctatgcctgcctacctcaatctgcaagggagtgtcagaaaggccccgcattcgccaagccgtgagttatcgctaacttttcagatgtgttaatgaatgtggaacaaaagcagttgtgtttaaaaggaaaaaggaccatcaaaataacttttattatagtagcaggcgtaaacactaaactgaatattccaaattgtgtcaaaaataacctactagagacgagcttctagaaaacctattgttgaactgctctgaagctatcattttaactataaattactgttgttaaaattttatataccctggttgcaaattagaatgttttaaaaatatctttaaccacgttaaaacaatttgaacaaaatcttaccccatctaaaaatgatagtgtttagttgaatttaagttaagctctttagtatatgaccatatgaaggggtaaagttttaatcttttttgtta

SEQ ID NO: 39392 - DNA, 2300 bp, Homo sapien
ctgttttacctagtttcttatgaaaaacatggtttgggccagatatcttgacagaaaccaaattaccagcatttttcttttaaaaattattgttggtttagctgaattgtactgccatggaataagcccaaataaatttgttaagtactgcatggttatgcagccagattgttttaaaatgtaaaccttaaagtccccaaggcagaactttaaaaatatcaataaacagtcagttgctattctctctcaaggtatttctgtatctcaaattattaagcgttttattatttcattgttttaaagatttctataatggctgctatttgatagctgtatttgttgagtttgctacggttatcaaatatttatggagcacccattcatttgcggtgaggagttattttaaaatgttttttggcatttatagaaacagattctgatcttaaaagctcaccagggaaaatatgtacaactattatgtatccataaaaattttaaaaaacacaaaaaagctcaccagggatactgcctggtttgctatattcctattaggaatttgttcatattttaactgatagctgtgtcttcagggcacaataacttaatatttgaatataagttgttaagcacaaatcagttactctgcctgatgaaatgtttgattagtaaaactccatgaatactgattttattctaaggcctgagccattagtttaacaaagcactgaaatgattctgctgttgccattaccaaaacatttagatacttttagcaggaagacttattagatacataagggatttttttgttttgttttgtttttgtttcaactttaaaattttatcattttaaaattgcttaatataattagggtacagatttaaaatgaaatttttttcttaaatggtaggaagcaaaaagcttctaattaaatagcattgacattctgatatgagtttatcatagcaccattctaacatgagcttgaggtcctcaccaaagtcttgatgaaacatactttttaaagaaataattttttaaaaccccacttggctcaaagacattgtccagagctccagctttggacttttacctgtagtcagtcatacaattatctggggttatacttgttaagtcagtatttaaaaaaatgaaacaccctgattttgttcacttttgtttttatataaaagaatctttacagtcaacatgtacttctagatgctgtattgaaattgctggcagagtttattctatacaaaatgaacaatctggccccttgttttatttgtaaaggttcaatgtatctatgcctgcctacctcaatctgcaagggagtgtcagaaaggccccgcattcgccaagccgtgagttatcgctaacttttcagatgtgttaatgaatgtggaacaaaagcagttgtgtttaaaaggaaaaaggaccatcaaaataacttttattatagtagcaggcgtaaacactaaactgaatattccaaattgtgtcaaaaataacctactagagacgagcttctagaaaacctattgttgaactgctctgaagctatcattttaactataaattactgttgttaaaattttatataccctggttgcaaattagaatgttttaaaaatatctttaaccacgttaaaacaatttgaacaaaatcttaccccatctaaaaatgatagtgtttagttgaatttaagttaagctctttagtatatgaccatatgaaggggtaaagttttaatcttttttgttatttacatgtgaaaatacagaaactaagtgattgaatcacatcctacacgaaagtttttggagtgctccaggcatatcatgtgaaatacagaggtatttatatctcttttggcaccaatagttcttgcttcagtaattcaccagtaggttttcattcatcgataatatatcagtttaaggctaaaataaaacacctacatttcttagggcttatcattctatatagaaagaggaaacatcctaatgagttttttcttttgtttttccaaagagattctaagcaaaaaaattttaactaacatctatattttgttattggagctagttacctttctttttcttagattctttaacgttttgagtagatagccatatttgataagcaggttggatgcttctgttgcttaggaggtaggtgtattgtgttatatgaagacagaatgaatttaaatatacccagtttggcagtatgaaaaagctcagactacataaaacttggaggtatggaacctttggacgcattaaagttaac

SEQ ID NO: 39393 - DNA, 2300 bp, Homo sapien
tctacctgcctcagcctcccaaagtgctgggattacaggcatgagccaccgtgcccggccagagcattttgagaatacatggtctcataaacttttttggcttgcaggatcaaaaataaagatatgtgttgattttactcagataatatgacttgtaaagctggagtgcagtggcgcgatctcggctcactgcaagctccgcctcccaggttcacgccattctcctgcctcagcctcccgagtagctgggactgcaggcgcctgccaccacgcctggctattttttcgtatattcagtagagacacgattttaccatgttggccaggctggtcttgaactcctgctcaccttggccttccaaagtgctgggattacaggtgtgagccactgcgcctggctgaaaatttttattttatttatttattttttatacgagagctcttgtttcctgatggaaacaaaagaaacaaatggagaaaattttcgatgaagtgacatttgagatcgaatgtggagaagaaggtagtcatttctgagtgggaatcaacttgccattttgttcctacgcaaaacttgtggtggttctgtattgtttatacctgtactgaaaaatctaaaatacttacccaggctacttctcccttgaatgaataaatcgtataagttgttttttcttttccttttttttggagacagaatcttgctgtgtcatgcaggactgaagtgcagtagtgtcattatagctcactgaagcctgaaactcctggcctcaagtgatcctcctgctatggcctcacaaagtgttgggattgcaggcgtgagccaccatgtctggcctggttctcttgtttgaccaaactgatttacttattgtcgtctcactcctttctttccctcgcatgcttctcatttttgtttacactcttttcttctgcctgcaatattctttctcctctctacaaatttaaatcctatctggcttactatatgtgattgccttaccctgtaacaatttagcctctgaaccccagtatagcacctgctttctgtactattgaaaaaaaatttatctcatttgtgtatatattctcattctctctctctttccagttagatagtacaccatagtctttgtgtgataagacctcttgttttaactttttctagttttctttgcatatctagggtcagaaatggttataaaaatatttcctatgttcttaagaaaattacaaaaaggtagaaaaatatcatgatttatctttactttgggaaaaataggtttggagctggaacatatacaagtgggaagaggcagttaagaaattgggaagtggtagaaaagcagcagcgttatgtatgcacaatgtgccccatttctcttcaccctatactcatgtctaaggtatacttgttaacatgggggtcagactccgtgttcttgtgtaattcgttagagcatcttctggaaaaatgcttgagctgtaactatggggaggaatatgtataactttcatcctggaaaacttggataaagaaagcctgtagtgaatgtagtcatatatctgtatcatactagatgctgctacttagatttcctgttattacatcaaaatcatcttgtccagaacaagacattttccctcatagatcagttttcccatttgatttagtcagttctcttggtggcatcattgttttctcatgtttgaaatacttgaaaccctgaagagactcctgacttttttctttccacacttaatttccatttagctaatacctgtaggttgaaagttattgtgttattgaaagaatattgagctatattaaagacctgttgagatttttactctgctgccattagcttatgatcttaggcaaatattgatctgtctgagtcttgatttccatatttgtaagaaggtgtgatgggattcattattccagagacacttcacattttttaaatgattttttttttttttaattcttcggcactctggtttacctctgtcacctcctttcttttttctcttctaatttgaccccagtggctttattcctaggttcttgtaatatcttttcttgccctttgtctctttcttctggtcaatccatctagtgttaatggttctgaaacatggattttattgtgtcgtatttctgcctgagtagtcaagcattcttctttgcctacagaataaattctgcattttttttgactcattttcagactctttcaccatctagtcagaggctgtaaactagtggcctgtgggccagtataatcctacatccc

SEQ ID NO: 39394 - DNA, 2300 bp, Homo sapien
acatctttagatatttgggccagaaatttaatttctattcctctagtcctgttacctagataatatgtttgccttgtaactgggctccttagttctctgtgcttgcccaccccccttcttcacctcattctatttttcacacgtcagccaggatgagcctttaaataaatgaaatacatcacatcagccctctgattctccaaaggtttttcatctcattcatatgagaagttaacatctttaccaaagcttttacatagggtgacggtgtggcctggggtgtccaatcttttggcttacctgggccacacatcagatacactaatgataactgatgagctggaaaaaaaattgcaaagaaatctcataatattttaagaaagtttacaaatttgtgttgggctgtattcaaagccatcctgggcagcatgcggcttggaggccgcaggttggacaagcttggcatagcccaaactgccctgggatagttctggtttatgtcttttatcccagaatatgtattaatagcttctcattacattcagtaacttattcagagccttctagtttgaatgataaagtacctggtcatcctgcctgtaagaccctgatattacttccttttgctcacttcattccagccacactggtcttttccttcaacatgctgagctttttcccacctcagggactttgcatctgtgttccctcagcctgaagcactcctctctgagatgactgattcacttgttccctttcttctttcagctttgcttcagtgccaacctatcagaaaagccttccctgcttattccgtataaatatttccactcttttctctttttccactctacgtaataacatcttttaatttttttttgagacggagtcttgctctgttgcccaggctggagtgcagtggcaaaatgccagctcactgcaacctccgcctcccaggttcaagtgattcttctaccttaggctccctagtagctaggattataggcacgtgccaccatgccctgctaagtttttttttttttttttttttttttttttgtatttttagtagagtaggggtttcaccatgttggccaggctggtcttgaactcctgacctcaagtgatccgcctgcctcagccttccaaagtgttgggattacaggcatgagtcaccatgtccagcaatagatcttttttttttttcttaaccacctgacatatctttatttactgcctacaaacctgtatagatccctttctatagtataagcactaagtttagtgcaggaactttgttttacttgctactcaacctcccctagtatagaacagtgcaaaaatacctagtgaatattttttggatgaaaaaattacctagaatttttaaaaagatgaataaagttatacattggaagaaatggcattcataataactcaaaatgagtggttaaacgaagtatgatttgataaaacttacactgagagttttatattttttccctctgcttccttttggaattactcttttcagctgtggaaataacgctttttttttttttttttttttgagacagggtctcactctgtcctgagtagctgggaccacaggcgtgtgccaccatgtccagctaatttttaaaaatttattgtagatacggggtctccctatgttgctcaggctggtcttgaactcctcccgtttaaggattaagcagtcctcccattgtggcctccccaagtgctgggattacagacacaagctattgtgcccagccagaaatactctttttaagtgtggctaaagctacgtccatgtcatgtacctttctttgactataatgttgacataagctgaatgccttttagcatcgttcataacaatcagttgaagataaactgtatttgtaaactatctcatatgtataatatgattttgaacttgctgtatcaaattatgagcaaacctcacattcttaaagtgacttaaatttaagagttttattgaggtataaaatatatatatatatatatatatatatatatatatatatatatatatatatgatttactctgaagtcagtgattttttagcagatttaaagctgtgcaactatcaccataatccagttgagaacatttccatcattcttaaagtgactcttctaacaaagttgcattcctttgtttccccttgttttctgtcaaacgtttatgtcctctccatgccatttccaccctcaccatgcacccccacccaccccacaagttagtttgtgacctggtggaggctataaaa

SEQ ID NO: 39395 - DNA, 2300 bp, Homo sapien
caatggttttccatagagtggaaactttgctcaactttaatttttcagtcagaaaagtgtaagctgaaccaattgagacgtctttggtgttggctgttgtttgtgctgttaatcgttggtcctcttcatgagggcacaaataagattaattattttactcaaaaattgatgtggatggtctgccactgagggctttatcctcaacattgtctcatcccttctctttttttttttttttgagatggagtctccttctgtcacccaggctggagtacagtggcacaatctcggctcactgcaaactctgcctcccgagttcaagcaattctcctgcctcagcctcccgagtagctaggattacaggcacccactaccacgcccggctaattttttgtattttcaggcacccgagtagctgagactacaggcgcatgccaccatgccagctaattttttgtattttagtagagacggggtttcactgtgttgcccaggctggtcttgaactcttgagctcagtcaatccgcccacctcggcctcccaaagtgctgggattacaggcgtgagctgccgcgcccagcttaatttttgcttttttagtagagacaggatttcagcatgttggccaggctggtctcgaactccttacctcaagtgatccacctgcctcggcctcccaaagtgctgggattacaggctgagccaccacgcctggcctcatcccttcttaaaacgagttttccatttgcaaactgctggtttcttgggggcattgtccccatgagcttttcataaaaatatcaatgatgtcaccataaatgtgatgattattcttgcttcaaatttagcagaatccttgttgctctgacaggagctcttttcaaactgatgtcttatccttcttagtgcctcaaactagatcttgtcgagacatgtgataacaagttagtacaaatttattttggtgccaaaaaattttcaaatccatgcatagtttttttcatagtatgaattttccatgaaccttttgaagaccgcttgtatagaaaaaaacagtatatatagggtttggtgctatccaaagtttcaggcattcactgggaggtcttggaactatcccagtggataagggaggactactatgctaaaaactatcccttgtttaactgaaattcaaattaaactgagtggcctgcattttatctgccaaccctaccctgggggcacttaaaaataccagaggccaggcggggcgcggtggctcacgcctgtaaccccagcactttgggaggccgaggcgggcagatcacgaggtcaggagatcgagaccatcctggccaacatggtgaaaccccgtctctactaaaaatacaaaaattagccgggcgtggtggggtgggtgcctgtagtcccagctactcacgaggctgaggcaggagaatcgcttgaacctgggaggcggagattgcagtgagccgagatcgggccactgcactccagcctggcgacagagcaagactccgtctcaaaaaaaaaaaaaaaaagaagaattgcttatccacgccctgtttcttttctcttagcgttactcagtgggggagtcctcccaagtatgatggagagtcctttcgaaaccctgctggattgtcaggacaaccaactgggctacttttccacaggtcgccccaattcctttggattctgatttctctgaggtcccaggatccagacaggcttggccaatccttccccgcccaaactgtaactctcaaaaccaacaccccggcatagggctggaggggaaaatgggtgaggtcagagacaaagaagagggaagggtcaggcggggctccgggttccctgccacaagcctccgctggtgttctgcttttctcccgagagctcccgcccaccctgcaaccctcgcctggccccgctgccgttctcagctccctcccagtgcctggtggaggccggggctgtgtcccgaagggggtcggggcagcagaacctcagccacagccaatcacagcggggtccttcggggaggggcgtggcctgacaacttcggcgacgcggctggaccaatccggacggaggagagcgaagctcctctgcactgggcccaggtgcgctcctcagcgtctccgggtggcggggcgcgcgggatggaggagtcttgggaggctgcgcccggaggccaagccggggcagagctcccaatggagcccgtgggaagcctggtccccacgctggagcagccgcaggtgcccgcgaaggtgcgacaacctgaaggtcc

SEQ ID NO: 39396 - DNA, 2300 bp, Homo sapien
taagtgctaaggttaaaaaaaaaaagacgaatatgacactgtctcctctgtccaggggtaagtgcaataatagaggtattactgcccagtggcttcccagaaggaaaaaacatgtgcactgaaccctggagaatgaataggagttatccagagattaggaggtagagagtgctagggaggaaaaacttttcctgtgccctcttaagttcagtgtctgggggcctgtaaattgaactatcaaagacaaattagcaggagaaaaggtaaccaatgtttattaatatttatgttcatgggagttcacagataataagtgaaactcaaagaagaatttagactcaggggcttatatacctttttaacaaatgaaagagggtttgggtttcaagggctggtgaattgagggaagtgactaggaaacatatagaggaacaatgggagataaaggctattttggtaaggtttgcttgtgcaaactaatcctggtgttgattccttggcatgtttgatgatgagtcactcttccctccctggtttagggtgggcagtgggggtatgagaggggatggggtgagggatggggagtagggcagcaccctccccaaagggaaatttatgccctacttttagggagatgagagggcagagaacccttcctgttgattctgaattgccttcggcttaaaatgatccatatgtcaaagtggcatattttagggtggcatattctggaccccatcaaggaaatagaacatgctaagtggaagaggcctgagaaacatagagtgtgtgtggaactgaaagggttggataaatgaaaaaggtagaaactgcaactaagaacatgtgaggctatatgaacagggaatctgattacttttaagagattcaaatacaagtgtattgtaggttctgaagggtttgcaaaaatgattttagtgcctctgtctttaatctttgagaaatgccataagaccagaggtggaatccacaaaatggcggaaaagtccaccaatattatcagttcttaccaaaccctcccctatagggcttgtatgacaaggagaggggttctgagtgtttagaaatggatatggcagccgggtgcagtggctcaagcctgtaatcccagcacttcgggaggccaaggtgggtggatcacttgaggtcaggagttcaagaccagcctggccaacatggtgaaaccctgtctctactaaaaatacaaaaattagctgggcatggtggtgtgtacctgtagtcccagctactcgggaggctgaggaagaagaaccacttgaacctgggaagcagaggttgcaatgagctgagattgtgccacgcactccagcctgagtgacagaagagactctgtctcaaaaaaaaaaaaacaaaaaacaaaaaacaaaaaaaggtccgggcgtggtggctcacgcctgtaatcccagcactttgggaggtccaggtgggtggatcacaaggtcaggagttcgagaccagcctggccaatatggtgaaaccctgtctctactaaaaatacaaaaaaattagctgggcatggtggcacatgcctgtaatcccagctactcaggaggctgaggcgggagaattgcttgaatccgggaggcagaggttgcagtgagccgagatcgcgccactgcactccaggctgggtgacagagcgagactccatctcaaaaaaacaaaacaaaacaaaacaaacaaacaaacaaacaaaaaaggcaaccactgggcctagcttaaattcagctggagtaactcctacaaattaaatcagtttccttttcccctcttactaggttgggaggccagagaatgtgtagacatagctagtatgattttaataaagcacaacagtctcttaggagatccttatggaaaagcagttgaaatgtagccacaccatggtcagtactcccaggtggacttgcatctcattgaacagatatatatgccagggggtgtcgatgaatgaattggtgtctgtgtggctggagatccccaggggcttgagtaccagaggcctgttcttggctctgtcctggtctacattttaatcaatcacttgtatgaaaacaaacaaaaagtatgcttatggaatttgcagctgacaaaatccaaaaacacaatcccatatgacagatgggtgaaagaaatcaagattaaaatgtatcttgaataactcaaatgatgagccaaagtgaatgacataaatgtggaagaaataaatataaggttctgcatttggatttaagaagttattttcacatgttctgaca

SEQ ID NO: 39397 - DNA, 2300 bp, Homo sapien
gtctctttcccacatttcggaagagattttgattcttcaatgacctgcacacctgcaattcccttctctcttcatccacaccaacccatccctcctccttcctatgcacacgtgtcaggggctggctccgggtcaggtatggagcagtcttgctccataccacaggctgatcaaggtatgccacatcctcgatcagcttacagccttctctgagtctaaggaataaggcaagattccattgtggaaaagcaaagggctttcccatgcattttccaattttatttaataaacccttatgcacatagctcttgctacgtgccagacattgttctaaagcacatttattcatttaatagttttgacaaccacattaggtagcacagttactatccccattttccagatggggaaacaggaagagaaagctccaggcacttgccatggtcacatggccaataggtggcagctggccccagagtttgtggctgggctgcccctctattggtggctgagacacagacctacattccccaaatggctggagatactgctgtttccaattactatggatttctgtactcatccatgaggtaatccagaggtaattcgtcttcaaaatctcactcaaggacagcacacctggagcggcttaagtcctgggaacagctggacatgtgggactgaggctcttcaataaaacacaacagcaaactccagcctcaccctcctccaccggaggactctttttactggacctgaccttgacactcaccctcacagttgccaaatgccaggcctcccatcaatagcctgagtgcttgctcagttcccaaatctcttttctcagtcttttgtgactactggatatatattatctttaaaccatattaggatttggctgcagattccattaaaaaaacaaatccaaaacaacaacaaaacaaacacccacccaccctgctgcaaaaaaagaaatacctaaaatgaaacatatttaagactttattattttctttttaccaggaaaatactttgattttaattgctaggcacagatcaaagtgaaagcaaactatgtttctgttaaagtgaagcccctgcccccggagtttcaggtttatggttacttgtgtgaaccagacacctccctgggccttaggatattcccatgggctcaccaggcagcctcctttgcctggaacccctctccctaacccccatcaccccagccgccaccccacacttctatactgggcaaacccgcttcattcttccttttctttttttgagacacagtctcactctgtcgcccaggctggagtgcagtggcacaatctcagctcactgcaacctccgcctcccaggtgcaagtgattcacgtgcctcagcttcctgagtaggtgggattacaggagcatgccaccacgcccagctaatttttatacttttagtagagacggggtttcaccatgttggccaggctggtctcgaattcatgacctcaagtgatccacccgcctcagcctcccgaagtgctgggattacaggcgtgagccaccacgctccctcttcattctttagggcccagttcaaatgctcctccttgcccctctgctgcaggcagaattaaatgctccttcctcttggcacccacacccattcttgaccaggaacagggcccttactacagtgggcgggagcttgtggcacatggtcctgtctccctctggactgccagctctcaagggcagagtggggttcgtttctctccctagcacaaatcagacagtcatcaaggcttatcggattaaatcctgggagttcagcaatcataaggttggactctcacaggcggcgataggccaagggaaagaggggcttctgagcattcagattcagccataccatgtattaacaacagcacccccagtgccctcattttgctgactgaatcaaaagctccccactaatgggtctacggccctcttccctaagcgctgggccactgtgaggagtggaggagacgctcttcctaccttcagtctccacaaaggatatggtgagtccgtgtcacggttgaaaaacctagttgtctttgtcccggcgcttaataaatattcagcaggcaaaccctgtgtttgtgaaatataccgaatctgcaagaaaagataagaatgaggtcagggcttttcctgtcactatacatatggtatactaatggctctgctggctttgagaaaaatgaaaatgacaatttttgtagggaaagaagttaacaaaaaagagaaaaaagaaaaagg

SEQ ID NO: 39398 - DNA, 2300 bp, Homo sapien
ggattacagacctgcgccaccacgcctggctaatttttgtatttttagtagagacagggtttcaccatgttgaccaggctggtcttggactcctgacctcaagtgatcctcccaccttggcttcccaaagtgctgggattacaggcctgaaccactgcgcctaacccctttttttttttttaagaaacagggtctcactctgttgcccaggctggtctgaaactcctgggctcaagtgatcctcccatctcaccctcccaaagtgctgggattccaggcatgagccaccacacctggccaaactccattttacttgtgaaaaatcagaacttggtaataagacatttttgggttttgtttgttttcttcttttcaatactattatataaagaaaaaagattagcaatgagaacaaatttaaagggggaagaggaggtactttttcagtagagaaaaattcagctagaagatccaagaccagtgggggtgtttctgatcgccctcttcctccccactctcatgctaggtgtgtgaaaggtaaccaagagaaaggtctccccagctcccttcactcccactccaggctgcagaaagggtaggaaagtagcctcttctaccatctcttagtgaagtggaaaatttatagagaaaacaaaaatcaggctaatgcatttcattatcagcagaatgccttgagctactttctttcttttttttttttttttttttttttgagacagggtctatttctgtcgtccaggctggagtagagtggtgcaatctcagctcactgcaacctccacctcccgggtccaagcaatcctcccgcctcagcctcccaggtagctgggactataggcacacaccaccgcaccctgctaatttgggtttgtttgtttgtttgtttgtttttggtagagacagggttttgccatgttgcccaggctgctcttgaactcctgggttcaagcagtccacctgcctcagcttcccaaagtgctgggataacaggcatgagccaccgtgcctggccttgagacatatttttttaaaaaaacataagctgtgttcatatctcaaactttgagcctggttttgtccaaaacatacccctacctaatcatgacagattcttagaaaagaagatgtacctgggtggtctctttagtgttgattaccaactccctgtgaaatgttctcttggggtttaggtgatttccttgaagggacagaactcctgcattcaggaacaggttgttcatggagtttacgctggaatcctggttgataccagactctgtattcatgaatggggttctataattgtaatattaggtaacttctaagaagattagctttttagaagctaataaaaaatagcaatgtttccttaagaaagtgtgatgtaaattcttaagaaaggataattggcataaacagatattggacttaatcccgttattttgggaaggggacagcttgttttacatcttcctgaagatagaatacctcgagttaggtgtggttgtgcattcctatagacccagctactcaggaggctgaggcagaaggattgtttgagttcagaagttcaagactatagcgagctatgatcatgcctgtgaatagccactgcactccagcctaggcaacatagtgagttcccatctctagatagacagaagaaaatagaagacctgcgtttcagaactcctttgtaaaaaccaggcattctctgaagattagtttcccagactttcagctacaaaagataacttcagaatatctctaaaatggttgttagctcatctgattggcgtgtgaaggtaatgaagtcagtagacgtggttctctgtaggtgtgttctaaacacacagacttatccttcatctcagccaaccttccaagtgggccctccactaatggaggggaccaagccaaagaatggaaggattgttgtagcacagcgcctctcctgagagccacaggcccttcagaggaggagtcagtaatggcaccccaggtttgaaagatagtattcatatagaaacagcttcctgcatttccaacttgctaatggtttcttccattcttccttttcagggcccctgagatcatccttggtttaccattttgtgaggcaattgacatgtggtccctgggctgtgttattgcagaattgttcctgggttggccgttatatccaggagcttcggagtatgatcaggtgggtccagatgacacagatattcacaagacctcattcttcatctggaaaatagcctggattagcatttcat

SEQ ID NO: 39399 - DNA, 2300 bp, Homo sapien
tcttatacaccaataatagacaaacagagagccaaatcatgagtgaactcccagtcacaattgctataaagagaataaaatacctaggaatccaacttacaagggatgtgaaggacctcttcaaggagaactacaaaccactgctcaatgaaatagaagaggatacaaacaaatggaagaacattccatgctcatggataggaagaataaatattgtaaaaatggccatactgcccaaagtaatttatagattcagtgctatccccatcaagctaccactgactttcttcacagaattaaatttcatatggaaccaaaaaagagcctgtatagccaagacaatcctaagcaaaaagaacaaagctagcggcatcatgctacctgacttcaaactatactacaaggctacagtaaccaaaacagcatggtactggtaccaaaacagttatatagaccaatggaacaaaacagaggcctcagaaataatgccacacatctgcaaccatctgatctccgacagacctgtcaaaaactagcagtggggaaggattccctatttaataaatgatgttgggaaaactggctagccatatgcagaaaactgaaactggaccccttccttataccttatacaaaaatataaaaaccctagaagaaaacctaggcaataccattcaggacataggcatggcaaagacttcatgactaaaacaccaaaagcaatggcaacaaaagccaaaattgacaaatgggatctaattaaactaaagagcttctgcacagcaaaagaaactatcatcacagtgagcaggcaacctacagaatgggagaaaaattttgcaatctatccatctgacaaagggctaatatccagaatctacaaagaacttaaacaaatttacaagaaaaaaacaaacaaccccatcaaaaagtggccgaaggatatgaacagacacttctcgaaagaagacatctatgcagccaacaaacatatgaaaaaaagctcatcatcactggtcatcagagaaatgcaaatcaaaaccacaatgagataccatctcacaccagttagaatggcgatcattaaaaagtcaggaaacaacagatgctggagaggatgtggagaaataggaacactttcacactgttgttgggagtgtaaattagttcaaccattgtggaagacagtgtggtgattcctcaaggatctagaaccaggaataccatttgacccagcaattccattactgtggcgggctaggggagggatagcattaggggaaatacctaatgtagataactggttgatgggtgcagcaaaccatcatagcacatgtatacctatgtaccaaacctgcacgttctgcacatgtatcccagaacttaaagtataatttaaaaaaaataatagaaaagtggcttcatgtagctgttagcttagcttgctctcttgaccttctgccttccgctgtgtgagggctcagcaagaaggccctccccagacaccaaatgccggcaccttgatcttgaacttcccagccaccagaactgtgagaaataaactttataaattacccaatgttgggtgttgttttatagtagcacaaacgaactaagacattttctcactaaatgaagtcactttacccagctagaaggatggtcacaggatcattattgttgtttaaaaaatgtgtatatatgtgtgtgtgtgtgtgtgtgtctccatatatatatataatatatataatatcagcccctctctctctacatacacacacacacacatacacacacatcccacattagaaatactatggtttggccgggcgtggtggctcacgcctgtaatcccagcactttggaaggccgaggtgggtggatcacctgaggtcaggagttcgagaccagcctggccaacatggtgaaaccccatctccactaaaaatgcaaaattagccaggtgtggtggtgcatgcctgtaatcccagctactcgggaggctgaagcagtagaatcacttgaacccaggaggcggaggttgcagtgagccgagatcatgccattgcactccagcctgggcaacaagagcaaaactatctcaaaaaaaaaaaaaagaaaaagaaaaaaagaaatactatggttctaatacttgtgttcatttgtcaattagatgtatggcactattaatttcagtttaattcagtttagtacatgtttttcgagtacctactgtgtacaaggaactgtgtggggtaccttctgagcacttcacctgctctccagagatgcctactgag

SEQ ID NO: 39400 - DNA, 2300 bp, Homo sapien
gtggtggagtgatcagaaatttcgttttgttttgtcgaatggttaaatggaccttgtgttcttcagaatcaaagaggaaagcccctggaataacatctctctgttgccttctaaacagcccctttgtttctaagagagtctgaaaaaaaaatatttacagtctataggttatttacagcctcgttatccagggcctgactggtaactttattccggccagaaacctaattcatttggagccctgaaactaataacagattttcttttaagtttttttttttttaatcagcctcttataacagagataaaactattaatgccttccctgtctcactggccacaactgttctccggatttacaggaggattacattcccccctcgtgccctcctctgtgccacacaaaccctgtcccctctcatttgcgatttcatccacagaatatctgaacaaaaccgaaagaaagccgggggacccacgctaaaagtatgtgaaggctgcgatttcaatgatttcatgagacaaacatttacacgatgaaacgactgaaaaatcagacacacttgggtttaaaatttctcctactacaagcacacaaaaacacatcgaagtgtaaaaacttagttgattctgggttgctttctggctggaagctgacagaacggactgaagagaaacgaaagacagtgtgcgaggcagacctactgcttttctgccttgcgttcttttctttcttgctaaaggcagtcaaatggggaaaaataccccgatgccaggtgaaggtgcacaacacagatcgacccagaccgagccagaaaaacgtctccgccgctcccccggctggaaaacccaaagtccacgtccccttccacacgctaatgaggggagattttcgcctatttcattgttctgcctggctctgacatggacttttcatctctctcctctctccccacctagccccgtgcattccgattccacagcccccccaaaatcggaggctcgcggagaataaaggagcgtggggtgggcgcggaaagaaatgggaaggggcgcggggcggagagcgaagtggaaaggaggtgctccgaaaggtaatgtgggggggcggtggaagctaagccgcatcaccttcatttatcgcaaataaataaaaagcacagtcaccggtccgccttccccggcgtccctgccctccccgggcagccgcccaccctcgcacacgccccctcccctcctgcgcccccggcccctctccccgccctggaagcaagaccctgccggcgccgggtcccggtcatcttccgggcgagggagggggtcgcggccccctcgggccccgggtgggggctggggcaggcgccgggggctgcgggcgcggggccgcgggcagaacaaagctgcgggggccgcggagggcggcgggcgcggggtcggcggggccgggcgccccttaccttcgtacacgggggccatcggggccggggtgtccgcggttcatggcaacggggacgggaaagcggcgcgcgagctcggcccccccagcctcagtcggaatctgccatcttgagcctgtgtctccgctctcggcgcagccgaggccgcccgcgcccgcatcaccgcctcccgtggccggcgccgggggagggggccgggcgcgccgccgccgccgccgccgccgctgccgcccgggcccggcgcggggggctcggggctcggggctcggggcggccgggcgggcggagcggccgaggccgaggcgccgagcggccgcggcccccgagcggatccgcggaggggcgggagccgggggcagcgcgcggccagggccggcggggctcagctcagcatggctgggcgcgggggctccgcaaaagttgctggcggaggggggcggcgggcgggggcgggggcggggcgcggggccgggagagccacagggagtccgcgcgcaatcgagcgccgatggcacggatgcgaggcggggaaggccgaaccgaagggcagagccgcgccggcggcccgaggggaccgcgctgggaggggctgccgcgcagcgcggggggactgggcgcagggcgggccccgggtagtgggtgagagggccggcctggacccggcgggcgcacggctccgagcccagcgcagccgagccggtctgcagaggggcccccagaactttgtgtgtgtgtgtgcacgcgcgcgcgtgtgtgcccaggtgcgagggttcgcgcgtgtgctggcggggagggaaccgacccgaaagagagccccacgctggcaaagtggctcgcccatct

SEQ ID NO: 39401 - DNA, 2300 bp, Homo sapien
gtgaagctggcactgggctacaagtaaaccagtttggctagagaagcagtgacttgctgaactcatgtccttagaaagctaagtcaggactcgcctgccttgatgaaaagccaaggcactcagccccacctgcagaggttgagtccttagaggatgttagccaggagcgtggcatggccagaaccacgtattatgaagatggcaatatttaggatgacctgggccaagactaaagttaaagattgcagggaggatagaagggaaggagataaatgaccggtgtggagcaaaaaacactagagtgggagccacgagacctattcctaagcttcaatactgtgtgacattgggcaacagattttacttctctggactccatttcttcaactctaaaagggcagggctggcccagatgacctctgaggtccttttagcaacagtagtctaggattctgcaaacgtgaatggcattaggttaagagaagggataggaagtgtagcattgattatgggggcaaggaagaccgcagagtacaagatcacacagaggaaggtgtcgtgatgtaccactaaaaaagtgtgaaagagcttgccttttttgggaaggactgaaggatgggaacggaggatggagaccggaaaggataagaagtagtgagaaaatcacgaggttgtttttaagaaagttatacagtgttagagatcattattttacacagatagcttttcaacttttttaaacccacgattcacagacggaaataaaattgacatcatggtccagtacacttgtccagtacctataatcgaaacaaaaggtttatgaaacaatagttgcccttactaagggcaatggactctaatattttctattggattccatttcgttctttttgaaagctggttgccttccgctgcatttattttatgatctattactgtgtcacgacccacagttttaaaaacagtgcctaagaggagactcaacaagtcttcctaagttggaggggatggcagggcatcctatccaagcatccgggaggcagctggagaagcaaacctggagaggctcccggctggggagagtctggagagtgtttagcggaagccctgataggagagagcgctgagaaaagcgaggacccagagagttgtgagctcccattcaagtgatggagtggcggccctcgggacagtgtagacgcgaggaggagaagatcagggtggcgtggaagccagactccggcaggaacccagcgaccaccccgggggctgcatttccgcggcgtgcacggcagggcttcggtgcctctgacctcgtgtggctttccgaagctcctccactcacccgccctcctccggagcacggcgcgcgcccactccttcattcattcattccactcctacctccgcgagcgccaaccggctgtgagatgggcgagccactttgccagcgtggggctctctttcgggtcggttccctccccgccagcacacgcgcgaaccctcgcacctgggcacacacgcgcgcgcgtgcacacacacacacaaagttctgggggcccctctgcagaccggctcggctgcgctgggctcggagccgtgcgcccgccgggtccaggccggccctctcacccactacccggggcccgccctgcgcccagtccccccgcgctgcgcggcagcccctcccagcgcggtcccctcgggccgccggcgcggctctgcccttcggttcggccttccccgcctcgcatccgtgccatcggcgctcgattgcgcgcggactccctgtggctctcccggccccgcgccccgcccccgcccccgcccgccgcccccctccgccagcaacttttgcggagcccccgcgcccagccatgctgagctgagccccgccggccctggccgcgcgctgcccccggctcccgcccctccgcggatccgctcgggggccgcggccgctcggcgcctcggcctcggccgctccgcccgcccggccgccccgagccccgagccccgagccccccgcgccgggcccgggcggcagcggcggcggcggcggcggcggcgcgcccggccccctcccccggcgccggccacgggaggcggtgatgcgggcgcgggcggcctcggctgcgccgagagcggagacacaggctcaagatggcagattccgactgaggctgggggggccgagctcgcgcgccgctttcccgtccccgttgccatgaaccgcggacaccccggccccgatggcccccgtgtacgaaggtaaggggcgcccggccccgccgacc

SEQ ID NO: 39402 - DNA, 2300 bp, Homo sapien
ccccaaaatatatttcaagtccatctacttcttcccacctccctctctcctctagccaagcatcccttctctctgggtgaaggcagcagccttctgtgtgccctccctgtcttttctctcactcctttccagggaatctgcacctgtgaccacagccttctgtaacaaatgtacctgtgaccatcctaagacctgtgggggcacagaaaaggaagcccatagctacccctgctggcttttggtgtccatttgcatgaagtgtctttttccacccctttactttaagtttacatgagtccttatgtgtcaggtgagtctcctgaaggcagcagatagttagttggtgagttcttatccattctgcagttctgtatcttttaagtgcagcatttaggccatttacattcagtgttaatattgaaatgtgaggtaccattgcattcatcgggctctttgttgcctgtgtacttctttgtttgttttttgcttttgttttttaacttgtatttttgttttataggtcctgtgtgatttatgctttaaagaggttctgttttgatgtgtttccaggatttgtttcaagatttagaactccttttaccagttcttgtagtggtggcttggtaatgacgaattctctcaggatttgtttgtctgaaaatgactgtatctttccttcatatatggtgcttagtttcactggatacaaaattcttggctgataattggtttgttgaggagccggaagacagggccccaatcccttccagcttgtaggttttctgctgagaaatctgctgttcatctgattggttttcctttacaggttacctggttcttctgtctcacagctcttaagattctttcctttgtctcaactctggataacctgatgacaatgtgctgaggcaaagatctttttacaatgaatttcccatgtgttctttgtacttcttgtatttggatgtctaggtctctagatggctgcagaagttttccttgattcttcccccaaatatgttttccaagcttttagaattctcttcttcctcaggaacaccaattattcttaggtttggtcatttaacataatcccagacttcttggaggctttgttcatattttcttattcttttttctttgtctttgttgaattgggttaatttgaagaccttgtctttgagctctgattttctttcttctacttgttcaattctattgctgagactttccagagcatttcacatttctaaaagtgtgtccaaagtttcctgaattttcaattattttttctttaagctatttcattgaatatttctcccattcaatattgggggattgtgttgggagaggagggtctccctttcccacttccgcaaatggggcactcacagtatttggagtgtcttctgggtcctgcaggagcagtctggttccttcagagagtctgtgggtccttttgggattgctggttttttcttgcagttgatctggagctaaaattcaccatggaagcctccagatgctgctctgtctgaagctgcaatctagtcctgccacccagccactatgatcccctccatctctctgtccactttagtcagataagctcaaagctagaacaaaggacccatatatgagcctacggatctgccttcaaacacttgagaagccctccaactcaccatgagaacactgaccccaatcgggatctttgctttgctccaacagccagacactcagacaggtcctcagacccagcaactaatggacttggtgggatggttgtcctcaaagcagccagcattttgatcaggctggcgtctggtcctgtatttttctgggatattcagaatctcttgacatgtatcttcacttaattgtgaatttaaaaaattatagatggatgtagatatagatatagatatagacatagagatagatatagatagacattttggagaagagtctctctttgaagacttcctctcagagtacaagtccgtggttacaaccattttgtttctcagcaaacatggggaagtttgcttttcttctctgaggaagttaatataaatgtttattgacagtgcagtcatcaaggaataaagttgctgattcattcctttacactgaaaccctttgttgtgccctcctcttccttcctctttatagggagacactctgagaaagagcacattgtgggggcccactccatgtgatgtttgcttggttgcctgttcccttttctacctgcagagcacggttcccataagggcggcgagatcagcctcctgtct

SEQ ID NO: 39403 - DNA, 2300 bp, Homo sapien
tgggaaagaagtggcattgagatgtgcctgaaagaatgcacacaattttagaaaattttaatttttttcaagtatcaaattagctagtttcattattattttgaaatacaaattaaaaatgtacaaaggacactcagtaagaaataagtcgccctcacaccagttttctccagaactcaagtcccctccaagaaacagccataattatccattctttgaatatcctttcatcgagactgtatacgtgtacaagggtatgtgtctgttcagtttccttacacaggcacgctagcatggctttctacctttttcacttaattagatgtataatttttggaatatattatatcttcttgtggttcaaagttcaaaacatgccaaaatgacagaagtctttgcttataactttgtctccagttaccaggttccctctgcaagaaataatatgtgcatgtgtgtgtgtttagttagaatatgtctaaacttacttttttttctattttttacccaaatagaggcattctgcaccttgttctctatcttcctgccttagagcaaatatctcagaggtagctagctgcatgtcacagtgcaaagagcttctcattctttttctctcctttctccctgtcctctcatgacacttctctgtgtggatatagcagaacctcacataggctgttgacaggtagggagagggtgtgggtggcgttcccggtggtggcaggcaccagcaaagacagggcaggcagcgtgtgcttggagtgatgagagaagtgaggatctggctgcccaggaggaacatggggttggtgaggggagcagctcaccggaacccataggtctgggccattgtgtggatgttggtgggagagtgtcagggaaggagtgagcatgttgttagccagaagagatgcaaggagcctgtaaccatgctgctgacctgccttcagttggacgtgttgggttgggatggatttctggtagggatgaatctggctccatctttgctgtgatctctgcccgtccacctgccacacagagagtgatattgaggagtcagactgccccctgcagtgatgagacctttgaccttcgcataatcagcttcttactctcattaaataaagttcatagatgatataaaccatcaacatacatatttctaaaaaattgccaggtgtggtggctcacacttgtaatcccagcactttgggaggccaagatgggtggatcacttgaggccagaagttcgagactagcctggccaacatggtgaaaccttgtctctacaaaaaatacaaaaattagctgtgtggtggtgcacacctgtaatcccagctactgaggaggctgagatgggaggatcacctgagcctgggaggttgaggctgcagtgagccgtgattgtgccactataccccagcctgggtgacagtgagaccctgtctcaaaaaaaaaagtaaggtcctgttaaaaagtgagacataaagaaggaagatgtatgtcttagtccattttgttgcttataacagagtacctgaaactggataatttataaagaaaaggaatttatgtcttacctatatggaggctgagaagtccaggttgtcaagggcctgcatctgatgagggccttcttgctggtggggactgcagagtcctgaggtgctgcagggcatcacatggcaagggggctgaccatgctagctcaggtctcgcttcctcttataaagccaccagttccactctcatgataacccatacacccattaatccatttatctatgacccagtcacctcttaaaggccttaccgctcaatactatcacattggcgattaagttgtaacaagagttttagaagggacagacatttaaatcatagcaatgtatataataaaatgcaaaaagtgtttctgtatctaaatgctcaggcatgccggcactgaaaaaacagactccaccacacatttcagaatgttcccaggtcagtgggcagcaccacacctgttgacaaccacaaggctagggcatgctgtgtattgcccagctatcttactcctttatgtttttatttcagataagtgccatagagttcatttccatttgccgtatcgatggcaattcttggatagaggcaaatgggaggatttggacaacatggaacttattgaagaggcatattgcaatcccaaaatagaaaggtaggaaatatgtcccttgtctctgctttgtgcctgggcttctgtgtgtgacacacacacacacacacacacacacacacacactgtgagcagc

SEQ ID NO: 39404 - DNA, 2300 bp, Homo sapien
ttaggctaggcgtggtggctcactgtaatcccagcactttaggaatctgaggtgggaggactgcttgaggccaggagttcaagatcagcctgggcaacaaatgagacagtgtctctacaaaaaaatataaaaattatctgggcatggtggcacgtgcctctaggcccagctacttgggaggctaaggtggaaggttcgcttgagcccagaagttccaggttgtagtgagctatgactgtaccattatactacagcctgggtgacagaccaagaccttgtctctaaaacaataacaaaaacaaaattaacattttatacaatgaaaacattaaaatcacaattaaaatccaagagaaaacccttcattcaatttcctaattaaataaattcattttcatttgtccatgttactatctagtctttatccatacacttattatttacatttttgtagtaatagtacaggtaattttttttttttttttaaagatggagtctcactctgtcgcccaggctggagtgcagtgtcatgatctccgctcactgcaatctctgcctcccggattcaagcgattctcctgcctgtctcccgagtagctgggattactggcgcccgttaccacgcccggctaatttttacgtttttagcagagacggggtttcaccacgttggccaggctggtctcaaactactgacctcaagtgatccgcccgccttgacctcccaaagtgctgggattacaggcgtgagccactgtgcctggcctatagttaagatttttatattcatttttagtgaatgttataccgtataccgtaagtactctccccccacaatccttctgcctctcatcttcccttttccattttcctaatacctcctactgcctcctctcaactacccttgtgtgtttcttcatctttctccgtgcttattcaaaaatatcctgccacacacacacacacaggcttctctttttgttattcagacatttaaaaaaattaattcttgatcattcaacttgattatttagacatttctgtacagccatcttttctcgtttaccaccacatcatggctgtctgcccctctacatccgcacacggagctctaacgcatgcttgttaaacagccttcgtaatagtctttaaagatcaaccacactgttcccacgtaaccctacctcccaggtagggttcccccagtaacactttcacacataacttatttactgttccttttacttctggaagattccgagaggaaagattgctgggtcaaaggtcacacgcgttttcaattttaatagctattcctggattacctcctcaaagggctctaacaactcgcattgctctcagcgtgtgagagggtcctttgctctgaagggtcttctaaaatatttgttcaatcgttacttagcaggggctgggagtaacggattttattttattttattttattttttgagacggagtctcgctctgtcgcccaggctggagtgcagtcgcgcaatctcggctcacggatttgctcttttaaaggacatacccttttatgtttaaatgaaggaactcattgatgcaccgaggcgaaaggaacctttaattaagtgcgtcttctatgcggagtgatcgcttttgtcacttgttcgaggggtgagagctcccgtcagttgtccctgtttctgtgagccgtctacgaagcccgggcttggcctgggcgacgctgagcggctttaaccggcggcgtccagccggctccgccagcgctgccgccgccctcgaggctccctctgactgaaggcgcgctgagcatcgcggcattaggggctcctggtccctcaaacatccagggaagccattttcagggactaggtactgacccccgcgagccgccacagccacagcccgcgctccgggccgaacgcccgagctcaagagctcccgagcttccgtcgggcggcggcctcacagctgggggccctgaggcggaaggcgcagccgctcagctgcggaccgggggcgtggcgagggcgcacaggttctgtttttcgccggcccggggccgctttcggtttcgtttcccgccggcgtctccaccctgcgagagccgcccgccagccagcgtccgccgccgtccgcgtcgcgccacccgcggtccgacgggagcaggcccagcggccatggcccaggccggcgtcgtcggtgaggtcacccaggtgctgtgcgcggccgggggcgccctggagttgcccgagctgcggcgccgcttgcggatgggcttgagcgccgacgcg

SEQ ID NO: 39405 - DNA, 2300 bp, Homo sapien
aataaagacaacccttttcaggatttttttccagggacccactagataggttaaataatgactcttctttgggaatgagactttgaagtagctccagccctgtctcctccctctggtacaggtactaggaacgtgggctgtaagttttcaaggctgccatggaactagagatgggggtgcgataggactagggtaaattaaaatactataaatattgctgttcttactgagagtttgctgtttttcctgactaaatgccagatgggttgctgcaaacctgtgactaatttctagggctctaagaaagttgattctgacaatttttgtcagttctttccttgcttcctttatggaagggcaaacttgctgggatacttaatccaccattttcactgacatcactcttcctttcttttttaaaaaatgttattttattgcaaaaaaatatggaaaccacaactaaaattaactttttttttgagacggagtcttgctctgttgcccaggctggagtgcaacggtgcgatcttgactcactgcaacctccgcctccctggttcaaacgattttcctgcctcagcctcccaggtagctgggattacaggcacacaccatcacacctggctaatttttgtatttttaggagagatggggtttcaccaagttggccaggctggtcttgaactcctgacctcaagtgatccacccacctcggcctcccaaaatgctgggattacatgcgtgagccactgcactctgcctaacattttaaattaaaaattaacattttaggctaggcgtggtggctcactgtaatcccagcactttaggaatctgaggtgggaggactgcttgaggccaggagttcaagatcagcctgggcaacaaatgagacagtgtctctacaaaaaaatataaaaattatctgggcatggtggcacgtgcctctaggcccagctacttgggaggctaaggtggaaggttcgcttgagcccagaagttccaggttgtagtgagctatgactgtaccattatactacagcctgggtgacagaccaagaccttgtctctaaaacaataacaaaaacaaaattaacattttatacaatgaaaacattaaaatcacaattaaaatccaagagaaaacccttcattcaatttcctaattaaataaattcattttcatttgtccatgttactatctagtctttatccatacacttattatttacatttttgtagtaatagtacaggtaattttttttttttttttaaagatggagtctcactctgtcgcccaggctggagtgcagtgtcatgatctccgctcactgcaatctctgcctcccggattcaagcgattctcctgcctgtctcccgagtagctgggattactggcgcccgttaccacgcccggctaatttttacgtttttagcagagacggggtttcaccacgttggccaggctggtctcaaactactgacctcaagtgatccgcccgccttgacctcccaaagtgctgggattacaggcgtgagccactgtgcctggcctatagttaagatttttatattcatttttagtgaatgttataccgtataccgtaagtactctccccccacaatccttctgcctctcatcttcccttttccattttcctaatacctcctactgcctcctctcaactacccttgtgtgtttcttcatctttctccgtgcttattcaaaaatatcctgccacacacacacacacaggcttctctttttgttattcagacatttaaaaaaattaattcttgatcattcaacttgattatttagacatttctgtacagccatcttttctcgtttaccaccacatcatggctgtctgcccctctacatccgcacacggagctctaacgcatgcttgttaaacagccttcgtaatagtctttaaagatcaaccacactgttcccacgtaaccctacctcccaggtagggttcccccagtaacactttcacacataacttatttactgttccttttacttctggaagattccgagaggaaagattgctgggtcaaaggtcacacgcgttttcaattttaatagctattcctggattacctcctcaaagggctctaacaactcgcattgctctcagcgtgtgagagggtcctttgctctgaagggtcttctaaaatatttgttcaatcgttacttagcaggggctgggagtaacggattttattttattttattttattttttgagacggagtctcgctctgtcgcccaggctggagtgcagtcgc

SEQ ID NO: 39406 - DNA, 2300 bp, Homo sapien
aatacattgtctttttgctccatgtaaaacctctgtgagataattaaggcattactagccatattttttctttcaacagatcatcagtgatctagttcaggagaaatggagtgactggcccgaggtcacagattatagaaagcaggacctgagtgcatgggtctttccactccagcaatatgtgatgcctatgccaaaattacagtacctttttttctccagtagaaatatgtttcaagcttaatcagtgtgtggtcaactaatttccagcctttccttttcccgctatatatatgccaaacagtgatgtgatagaaaaacgaatagttgcagaattgagacacttaaaaacttcagttacagctctaatatatgagacttcagtcaagttactagctttcctcaactataaaaaggagattaggcaggacttggtggctcacgcctgtaatcccagcactttgagaggccgaggcgggcggatcacttgaggtcaggagttcaaacagcctggccaacatggtgaaaccccgtctctattaaaaatacaaaattacccgggtgcggtggcgtgcgcctgtaatcccagctacttgggaggctgaggcaggaggatccctcgaacccgggaggtggaagttgcaatgagccgagatcacagcactgcactgcactccagcgcgggcaacaagaacgaaactccgtttcaaagaaagaaaggaaagaaaggaaaggaaaggaaaggaaagggagggagggaaggaaggaaggaaggaaggaaggaaggaaggaaggaaggaaggaaagaaaggaaagaaagaaagaaatggagaattagatcagcgactctttgcctgggggtgggtgacagaacaacacttcttcctcccctaacaaaaattacctatggagctgtgagggctttccccactgatagaaatgccagcagaaattcagctacaaatactcaatccaataatccttaacatcacttccaatccacagttatgattccaacgcaatcttttctatacagtatttgtcagctgtttttattcttcagtttatcatcttatatttggctctcaatttcacccataaattattgatggcttattatacgccaagtaccctgcgctccgctttttgtggtatccctcttcggagcgagaagtcacttagaattttaccccatcttccccacttgggaatcggaagggttcatagctaagttttgttatttataagcacgccggctcttctctatccctctctccaccaaccccatttcaaggttggtccctcccagcggacgacagtgatgaattcctcttggggacagccctcccgcaactaacggtggctccatcgacgctctggtctccttgctgctcgctgggaattcgggtgggacgttttccaaagtttggattccacggcacattcctccctcggaaaggcacaaccggctcggcgtgtcagctcagctggactcacgccggtgcggggccgcagctccggttctcgctgggcggctgcggagggctgggcgattctctcagcgtcgcgaggcgacccgggcagcagcaaacttctccgcttcccctcttcgggacgcggcacctcttctgcccttgagcactccgcaggaacttcccccggcctcggctctcgctccgaaataaccgagccagctcctcgcacgctcccgccgtcctcctccggctgcggccgcgcgcccgccgccaccgccaccaccgcgcgtgtcctcacggggcctcagctccctccgcccccgcagccgcctgcgtgcccttcaacagctccctccgcccggccgtcgcggagaggagcggggagcgcgcgccggcgccagagacgtgcgcgagacgcacggccccgcgccgagcgccggaagcagccgagtctgggcctcgcgcgtcgcgcgcgcctcctccccctccgccagccgccgcggcctcgcgcgcgcgcactgaggcgccgccgccgccgcggctgctgcaggaggcggcgctggctggcggctgcgctcgctccagtcggcgagcggagtagcgagcgagcgtgtgtgtgttttttaaagatggccggagcggcggcggcggtggccgcgggagcagcagctggagccgccgcggcagccgtgtcggtggcggctcccggccgggcctcggcgcctccgccgcccccgcccgtgtactgtgtgtgccggcagccgtacgacgtgaaccgcttcatgatcgagtgcgatatctgcaaggactggttccacggcaggt

SEQ ID NO: 39407 - DNA, 2300 bp, Homo sapien
taggaggtcattaataaccttgaagattattgttacttgcttgatgggggtgaattgctgatgtctgattgctagtggttaatgagagataagtattgaggtaaagtaagccatgttaatactttgactacctagccgtattttaatagtctatatgcacttgttaatgtctgtctctcccactgtaacataagcttcctgagcgcagcattttgttgtatgttcttctgtcaccttagtacctagaacagtgcctggcacacagtagacattacttgtggaatgaatgactgatatgcttggcatatttgattataagactaaagggcaaaaaaccccaaagaaacaaaaaccttagcaaagccttgaaaaatacgcttacctgatcatgccctggagcgggaatcgaaaaatgctcccagccatcagttcagacgtcttcacctatggggtagagagtggctgcattgggcatccttttctgacattatattattttaagttatccttccttacgaatgttttcttcactaactaaatgggtgcattataatgagtatttcagagaatttgcttttattcagattgcctcacctgccagtatccagatccctcactgtgaacttgggtcctagactgaccttcatggttggggaagcacgtctggagtaaatcactgttagctttactcattcctcttccatgttgagttttgaatgatttcccattgcctaaggggtgaaatcccaaactctgtgacttagcgttaacctctatcagctctgtccttagccagtgtactaatttaccctgaataactttgttaccccgtctttccctgacttcccaagtaaagaattgtttcttcttcaggttgccatagcagttgatgcggttctgtagtaggcacctgtcacggtgtaaaggtgatgcaccgtgacaggtgctctgcttgtttccttcgtctttgtattcccaatgcttagtgcttttgttgacacatactaggggttcagtaagattaaattgcagtatctgcccaagagaaatgagaacaaatgtccacattaaaacttgtacatgaggctaggtgtggtggctcatgccagtaatcccagcacttcgggaggccaaggcaggagaattacttgaggccaagagttcaagaccagcccaagcaacatagtgagaccctcatctctacaaaaaataaaaagttagctgagcatggtggtatgtgcctgtcccaactacttaggaggctgagacaggaggatcgcttgagcctgggaagtcaaggctgcagtgagccatgatcacaccactccagtccagcctgggtgacagagccagaccctggctctctctctctattttttttttttgagacagcatctggctcttatgcccaggctggagtgcagtggcaggatcttggctcactgcaacctctgccttctgggactcaagcaattttcccactgcagcctcccaagtagcttggactgcaggtacccaccaccatgcccagctaatttttgtattttttttgtagagacagggtttcaccacattgcccagactggtctcaaactcctgggctcaagtgatcctcctgcctcagcctcccaaagtgctaggattacaggcatgagccacttgcctggacaagaccctgtctaaaaaaaaaaaaaaagacaaagttgcagtcagtttggagccccccatgcttcctgtagtggatgatgagacctctgcttttttgctacacatgatgtgatctaatataaatcacatagtcgttctgcattaatttttttcacttgtacatttcagtaataatgtgattgaagaatgctacccttttgtgtctgcggccaaattgatttttgacaagggtgccaggaccattcaatggggaaaggatggtctctcaataaatagtattgggaaaactggatatccacgtgaaaagaatgaagttggagctgaggagtgggagaggaaagaaaaaaaaaaaaaagaatgaggttggaccctaaccttacctcatatgcaaaaattacctcaaaatggattaaaggcctaacttgaagaacttaaaattatgaaactcatagaagaaaacagggacaaatcttcatgacaaatatgtacaaatgaccaataagcacatgaagagtctcagcatccttagtcattgggaaaatgcaaatcaaaaacacagtgagctgtgacttcatgcttactacgatggctgtaattaaaaaacaggaaagggccgggcgcggtggcttaag

SEQ ID NO: 39408 - DNA, 2300 bp, Homo sapien
gcaccaccacgcccagctaatttttgtatttttagtagagacatggtttcaccatgttgcccaggctggtctcaaactcctgacctcaggtgatccacctgccttggcctcccaaaatgctgggattacaggcgtgagccaccatccccagccagaaaaattacttattttaaactttctaattttatttttatttttgagaaggagtctcgctcttgtcacccagatgggagtgcagtggtgcgatctcagctaactgcaacctccacctcctgggttcaagtgattcttctgcctcagcttcccaagtagttgggattacaggcgcctgctaccatgcccagctaatttttgtatttttagtagagacagcgtttcaccatgttgcccaggctggtctcgaactcctgacttcaggtgatctgcccacctcagcctctcaaagtgctgagattacaggcataagccactgcgcccggccagaaaagttacttattttaaactttagatcatgcttgggagagtgagctgctcattctacttggggtacatggaactgattccagcagtgggaccagattcacctgggccatcgcatgcctgattcatgggcagcctcactgagagcagtggcagatagagtcacctgctccattgcagtggctttttcctctttgctcttttttttcaatattcctggttgaatttgtgtagtggaatgatcatatgatgcaactaccgtaatagaatttatttgacaagctagtgcaattagttattaatgaatgtaaacttcacaggattagaagggctatgtgtttcactatttttgtatctttgggttctacaaaatatactagagtgtcacataattcgagaagggatttcaggaacgtggatgttaactactaatagtttgaaaatgatactatctgggggtttccttttttttccacttctctccaacatattaagaaaactattcggatattattttgccttatgcagtagattgctagtggttgtgaattgtgttttaataagaacctgtttatgacttcaggattttttattggtggaccttctaatatgattagttctgctatttctgcggacttgggtcgccaggagctcatccaaaggagcagtgaagctttggccactgtcacaggaattgtggatggttcggggagcattggagctgcagtgggccaggtgagagaacaggagaggggctgggattctagtgtcttccctcaaaggcggctgaatgtgaacctgccctctgggcctcagtaggtggcactcttgtgctgtagaacgctgttcccagagcccaaggacttccgtctcccctcaggaccagctgatgcgtcctaatgtagaaggactctccattgtttttagttccttttttctacttatacttctagattcttcctgtctgcaaataagctaagacctcgtaagacagacagatccttctgccccagcccaccatccccttctttctttccaggctgaacttggtattccgtggtggggggtgcttcttgttatccccacctggcatgtggaccccaccattgctgtctcccgtctccctctcccagacactctactgcatacacgttccttcctgggccccgccagacatggccatggactctgcagctgcttctgaatcactcgctctgcttcctgtgtatccaaaaatctctgactgtatctcaaagagtggcccataagtgtctggtatcagaatcatctgggacactcattaaagtacagaacaccaagcatactacagacttgctgagttcgaacctacagatctgtattttcaacaaggcttcttggtgattcttccacactcagatgtttgagatccctacactaagattggcctactatacttagaattatttacattgaccttttttttttttgcataaattcaactttctctgggacagatatttcttttctggcagagtcatgagtcatgcctcttctaggatataccactacagattgtagagtactaattttgtagaaagatggatctgagagtcatctgtatggataaaaatagttgaacctgtggaagtgaatgaaacatttaatagggaaagagaatgttggccgagtctcagggaatgcccagtggtcaaagaaagaggaaggcagcagagtaacctgtagtcaagggaactgcgtttgagaaggcgttagtaaggtcatggatgtagagaggtcaggagaaagagaactgaaggatttgtcttttaggctcttag

SEQ ID NO: 39409 - DNA, 2300 bp, Homo sapien
aggatggtctccatctcctgaccttgtgatccacctgcctcagcctcccaaagagctgggattacaggtgtgagccaccgagcccggcccagccatattttttgatagactagtgtcaggctgctgctagtgagactagagggcaaatggggagcacgcctcaggtgagcgagctaaattagaagtgattttgattgctcgacactctgcttgaaggtggaactttgcaaggcttcatctctgatgtactacagaagagagcgccggttcttgccctgagtctgcttctggcagttgggtccctcatcgggtatagtcgtgagtattcttttgcaattactaattcctttgctcccctaatctggttggaataaggcatttgtttggagtcagtgaccagtgctggggagagcctggagaccagcttcaaggcccgatatgccacctttgcattgtcctgtgaatgcctgggaaacctgtcatcacatagttttatttgtcttgggaggaaactggcatctcttttgctttgttaatttgcttaaaagcttgcttgggagtgtatatgctttgtttgggggaggctccagaggcacagcattatagccaataaaacaataaaaagggaacaggtttcaaaagcggaaagatggtaattagtaggtttggtatattcccttaagatgctgctgagacaggagtagagcttttctttagcttttagaagtcttgttagcttgagcattagcaagaggcagacgttacaaatcagagttgaaagaggcagagagagttgtgtctctttgttgtctctgggagtgatttgtgaggtcacggagattcagatcttcgcgtacggttggcagaggcacgtggagtctgcttttcaagccaccatggtttgtctgtgtcttccctcacaggttctccaaatgataagtccatcaatgcccttctgatgactgttacaggtacggcacatggctctgctccaccatgcttctgttgctctgtaaattcagaggaaaagggaaactgttttctccctcaatttgagtagtaccgaaaccttaattacagagaattcaaattttaaaaggaaaaacgcctccttttccagattctttttctctgctgtttcttacatgacctcctcagtcctattgtgacagaagcggtccctattgacagagattttctacgatttttgattgctgccccagcttctgctcttacctctaaaagtgacttagaaaaatgccacatgggagaccaattcaccagctttcaaaaaaatccacaatagctcgtgtctcctcctgtgttggaattggtcagcattttgtcacttgagcactagataaaatagttgggtgcatttagggactatgttatagaaaaattacttactttatttattatttatttattgagacagaatcttgctctgttgcccaggctggagtgtagtggcacagtctcagctcactgcaacctacacctcttgggttcaagtgattctcctgcctcagcctcctgagtagctggtaatataggcgtgcaccaccacgcccagctaatttttgtatttttagtagagacatggtttcaccatgttgcccaggctggtctcaaactcctgacctcaggtgatccacctgccttggcctcccaaaatgctgggattacaggcgtgagccaccatccccagccagaaaaattacttattttaaactttctaattttatttttatttttgagaaggagtctcgctcttgtcacccagatgggagtgcagtggtgcgatctcagctaactgcaacctccacctcctgggttcaagtgattcttctgcctcagcttcccaagtagttgggattacaggcgcctgctaccatgcccagctaatttttgtatttttagtagagacagcgtttcaccatgttgcccaggctggtctcgaactcctgacttcaggtgatctgcccacctcagcctctcaaagtgctgagattacaggcataagccactgcgcccggccagaaaagttacttattttaaactttagatcatgcttgggagagtgagctgctcattctacttggggtacatggaactgattccagcagtgggaccagattcacctgggccatcgcatgcctgattcatgggcagcctcactgagagcagtggcagatagagtcacctgctccattgcagtggctttttcctctttgctcttttttttcaatattcctggttgaatttgtgtagtggaatgatcatatgatgcaactacc

SEQ ID NO: 39410 - DNA, 2300 bp, Homo sapien
tttttggcatcccaaacggaaactccatagccattaaacaacaatttctcatttccccttccctccagccatgggcaaccaccatgctactttctgactctatgaatttcactactctggctacctcatataagtggaactgtactgtactggtccttttatgtctgacttatttcacttagcataatgtttttgaaggttcgtctatgttgtagtatgtgtcagaatttgctaccttttttaggctgaaaaataaacgattcacaatatatttttaaaaataaaagtaacatatttggctcatttatttttgctcaccctgacatcatatttctccttggatgcctagagacaaaactaccactgtataagggctagaaacaaaactaccactgtataagggcaaataaaaatgaaaaataacaggcttaattcctctgctgaaaataaagagacttctcagccttctctctgttccttcaaaatttctttctctgtccttttcgaatgtacacaaatctttataacggcgaaatgagcctcttgccagtatcacaactcagaaatgtatcctcaaggacttgggggtcatctttttgaaattcagacgtgagttagtgcctgtatcttccagttcctacatgagggtaagagactaaattagtgggtatgggcgccttgctccaatttgtaaaactacctcctgctataaagatatgcgaactttggccggctgcggtggctcacacctgtaatgctagaactttgggaggccaaggagggcagatcacgaggtcaggagatcgagaccatcctggctaacacggtgaaaccccgtctctactaaaaatacaaaaaaattagccaggcgtggtggcgggcgcctgtagtcccagctattcgggaggctgaggcaggagaatcccttgaacccgggaggcggagcttgcagtgagctgagatcacgccactgcactccagcctgggtaacagagcaagactccgtctcaaaaacaaaaaacaaacaaacaaaaagatatgcgaagtttaaaaaacgaacaacaacaacaaaaagttatgcgaagtttgttttgcttctggataaagccaacatgagtggtctccccaattactactattaagtaaggaggaactatgtttgacaaaaggtgttgtcaagttctgttatttgaagactagtgattgtttatcttgagaacaggtatgtaatggttgttgtggagattttctggattaagagaagttttttttctttaaaattcgaacaagtgtctgtattttttccctttatttaagaaacggtggcggcggtggtggtggtggatggggggcggctctcactaccttgcccaggctggtctcaaactcttgttctcaaatgatgctcctacttcggcctcccaaagtgttaggattacaggtgtgagacacttgtgttggattttttttttttggaggcagggtctcgttctgttgcccaggctggtgcagtggagcaatcacagctgccagcctcaaacttttgggctcaagcgatcctcgcacctcggtcgccccagtagcagggaccacaggcacatgccactactcctggctaattttaacattttttgtagagatggggtctggctatgttgctaaggctggtcttgaactactgggttcaagtgatcctcccttctcgacctcctaaagtgttggattacaggcgtgagcccactgtgcccggcctgcatttaattagacacctaaaatttaggccggtcagtagcacacttagcagcacgttactttttataaaaacaaagaccgaataccgcttttttgaaaaaaaaaaaaaaaaaaaaaaaaaaaggatgcaccagttctccccatatcatttcttctctctacctctcgtcttttgcagctaacattactggccaggtccgcagcagcagagttctgtgggctcccagcctccgccctcctcgccctcctccgcgccggcaggtgaggccgcgtggcgggactacaactcccagcgtgccccgcgacgggagggtcacgtgggcgtccggaaaccctggtcgcaccgccaggggtgagctggcggcgggggaggcgggcagcggagccaagctgacccggcgagcggagccggggctggagagcggcgaccactgcggatctcgggtgcgcaagcggtgatgcgtggggccgaagacctgctggggcgggggcgggtccaatccgaggggcttcccgggtcgggagggcggtggggagatgtaggtggc

SEQ ID NO: 39411 - DNA, 2300 bp, Homo sapien
cgagtagctgggactatagacctgcactaccacacccaggtaatttttgtatttttagtagagacggggtttcaccatgttggtcaggctggtctcgaatgcctgacctcaagtgatttacctgcctcagtctcccaaagtgctgggattacaggcctgagccatcacgcgccgccagaaaattaaggtttctaatgacagtgtttcacaaactaactgattatcagaattatctgagagtatcattgaaaaatatatatttcctttttttttttttttttttttgagacagagtttcactcttcttgcccaggctggaatgcaatggtgtggtcttggctcactgcactgcaacctccgcctcctgggttcaagcgattctcttgcctcagcctcccaagtagctgggattacaggtgcctgccaccacgcctggctaatttttgtatttttagtcgatacagggttttgccatgttggccaggctggttaggaactcttgacctcaggtgatctgcccgccttgacctcccaaagtgttgggattacaggcatgagccaccatgcccggctggaaaataaaggtttttaatgacagtgtttcacaaactaactgattatcagaattatctgggaatatcattgaaaaaatatatttttggagctcatcccagacttgctaaacatattttaccttgttcttttaaaaattatttcttagtattctttttttttttttttttttgagacagagtctcgctctgtcaccgaggctggagtgcagtggtatgatctcaaaactgcactgggccaggttttgtgttttgtgtttttaactttaaaatatgtttagtgcgccaggccgcagtcgctcatgcctgtaatcctagcactttggcaggccgaggcagaaggatcacttgacgccaggaggttgaaagtagtctaggcaatataatgagagccctgcgccccccctccccgcccatctctattaaaataataagaaataggccaggggcagtggctcacacctgtaatccaagcaatttgggaggctgaggcaggcggatcacttgaggtcaggagttcaagatcagcttggccaacatggtgaaaccccatctctactaaaaatacaaaaaattagccgggcgtggtggcatgcacctgtaatcccagctacttgggaggctaaggcaggagaatggcttgaacccagagggcagaggttgcagtgagccgagatcgcaccattgcagtccagcctgggcaacaagagcgaaactccgtttcaaaaaacaaacaaacaaacaaacaaaaacacaaaaccaaaaacctctgtctctcttccctcccctcccctcccctcttgctctgtctcttccccaggtgattctgatgatgagccaggtttggaaaacaccaatcgaccaagtcacctacctgaaacttactcccaccatcagcatccctggcttaaatgtccacctatgcttaaatatctctgatcacaaggaactgactacctcctgaaaaatttccattttgcactgggcagctctcacttctgtgggattgacacctccctccatgaggtttccatctgtctagctccgtgctatccttactctgccaagacacatcacattcctgttccacatgacagcccatcagatatttgaagcagcaagaatattcccccaaggagaatatccccatcctctttaactgttcttcctgagagtgtgttcggactcctcatccaattgctctaaaagtaactgaaacctgatcccacttaatgattacatttgatgtgctgcaaattgcccctgccttgtgacatccttcttcacctctccgttttactttggttttctctaaagtcatagacaaggacactctgtctcatcacacaaggtaaaatgcactcaaatgtccaatctgcatgcaaaaacccagggctttaaggcgatgaagaaggatcccatacctctcttggacctctctgaaatcacatatgggtagatgatccagcagacaacagacacaatcaaaccacttttttcctgtctgacttttcaactaaagacagccattccacttccggtgtcttggtcttatcactgtaacttgagctgagactttacttccatgtctccccccaccctcaggagtcctcagggtttccactaaagccccctttcattgagcctacaagccttgctgggaggcacaggcagcgtccaccccgatgatgtcctcccgccggcatcccgcagccttcgccttcctgg

SEQ ID NO: 39412 - DNA, 2300 bp, Homo sapien
gggcggggagggggggcgcagggctctcattatattgcctagactactttcaacctcctggcgtcaagtgatccttctgcctcggcctgccaaagtgctaggattacaggcatgagcgactgcggcctggcgcactaaacatattttaaagttaaaaacacaaaacacaaaacctggcccagtgcagttttgagatcataccactgcactccagcctcggtgacagagcgagactctgtctcaaaaaaaaaaaaaaaaaaagaatactaagaaataatttttaaaagaacaaggtaaaatatgtttagcaagtctgggatgagctccaaaaatatattttttcaatgatattcccagataattctgataatcagttagtttgtgaaacactgtcattaaaaacctttattttccagccgggcatggtggctcatgcctgtaatcccaacactttgggaggtcaaggcgggcagatcacctgaggtcaagagttcctaaccagcctggccaacatggcaaaaccctgtatcgactaaaaatacaaaaattagccaggcgtggtggcaggcacctgtaatcccagctacttgggaggctgaggcaagagaatcgcttgaacccaggaggcggaggttgcagtgcagtgagccaagaccacaccattgcattccagcctgggcaagaagagtgaaactctgtctcaaaaaaaaaaaaaaaaaaaaaggaaatatatatttttcaatgatactctcagataattctgataatcagttagtttgtgaaacactgtcattagaaaccttaattttctggcggcgcgtgatggctcaggcctgtaatcccagcactttgggagactgaggcaggtaaatcacttgaggtcaggcattcgagaccagcctgaccaacatggtgaaaccccgtctctactaaaaatacaaaaattacctgggtgtggtagtgcaggtctatagtcccagctactcgggaggctgaggcaggagaatcgtttgaactggaaggcagaggttgcagtgagctgagatcatgccattgcactccagcctgggcgacacagcgagactctttgtctcaaaaaaaaaagaaaaaaaaaaacctttggtaaaatatgccataaccagcctttggtaaaatatgccataacattatagccatggttttaattttgaatattctcaaaatcctaatttcctggtcaaaaaaattaggctccaaacagaacaaaaaggtcatgtcactcttccccaagctgacttaccaatcacctcttatcagtcctcgttgctagctacctggatggtcagtagttttttgttttttgggtgttttttttttgaggtggagtttcgctcttgttgcccaggctggagtgcaaaggcatgatctcggatcactgcaacttccgcctcccggattcaagtgattctctggcctcagcctcccgaatagctgagattataggcatgcgccaccacacccagctaactttgtatttttagtagagatggggtttctccacgttggtcaggctggtctcaaactcccaacctcaggtgatccacccaccttggccttccgaagagctgggattacaggcatgagccatcgtgcacggcctggatggtcagtcttacagcagttgggaatctttctccccaggtgaaattgacactagtgggacctccaatggcaggtgagtcactgctgtgggcatttcctctgccattctcctgctctccgggcactctgatggagcatgtggcacctcgtctccaggcctaggatatatcactgcttttatctgatggtgttgaccgtccactggacccaccagagaatggcagtagaacctctttattccaagagcacccctaaagtaagatcaacacacgtagggcagatgtcagcttatggggacaactcctctgtgcccgactagcatcattagcatcgtcctctcacaaggatgtagcactgtgaaggtaatgacctcccttcgtcttgtcttgtactggatccccagttcctggtgctgaattccatcctttcttcctagttctgttctaggtggcaagaaccatgcacttctccagctcagccagggcagcagatgagaactttgactatttgttcaagattatcctcattggggattccaatgtggggaagacgtgtgtggtgcagcatttcaagtctggagtctacactgagacacagcagaacacgattggagtggactttaccgtgcgttcccttgatattgacggcaaaaaagtgaa

SEQ ID NO: 39413 - DNA, 2300 bp, Homo sapien
aaatgtggttttagggtgtgaggcatgttataaggtagacataatttgatccctatcttcagcgtacttttgtgaatttaggcaggataaatctctatacgttatatctatatattgaggtagtagaacctacctctgaatatatgtatatatgttttttcttttaaaggtttaggaaaagacatgtttagtgatgatgtgagattatggatgacattgctcttctgcagtgttattttttttatttttatttttttttgagacagagtcttgctttgtcccccaggctggagtgtagcagtgcagtctcggctcactgcagcctctgcctcccgaatagctgggactacaggcatgcaccaccacgcctgcctcagttttgtatttttagtagagatggggtttcgccatgttgaccaggctggtctcgaactccaggcctcatgtgatccacccaaccttggccttccaaagtgctgggagttttctgcatttttatgtttcctataatcatgttttttataagttaaaatatgatgtccacacaaaaattggtacatgaatgttcttggcagcattatttataatagccccaaagtgggctaatctaacctaacctaagtgtgcatcagtctatcaagctgagtagttgaaaaatctcgatgaagttgtttttctttaaaggcataagagagtttacgtgcctgtcacccttattttccgacaggttttaactagggtcttaacctcatgtagaaaccagaaataacaaacagtatggaaaaccgtctttaatgtagttgagctccaggtttggggtagagaaaattgggtaatttttcagttcccgaagttgagtcctcatagtttgattttctagtattgttaagtaccaccgcaaaaacaaacaaacaaaaaaaaaacaccacacctgtgtttacttgtcagcaaagctaattttcgtgtcagcttgggaacattgttttttcagttgactatttgattctttgactgtgaatcattaactgttgctcaagtttttcagggttcaatgactggattccacttgttctctctccaccttctctagtcgtgcattgaggcccatgagaaggacatggagctctcatttgccgtgcagcgcagcaaggacatggtgtgtgggatctgcatggaggtggtctatgagaaagccaaccccagtgagcgccgcttcgggatcctctccaactgcaaccacacctactgtctcaagtgcattcgcaagtggaggagtgctaagcaatttgagagcaagatcataaagtgagactcctccccagtcttcatttgtgctttctcttttggggaagaatttagtaacttgtgccaactttcaaccagatggaccgcatttaaatgcatgcattttatcttgaaactgggatattctaatggggatttcttctttgtatttcagctagcttctaggttagttggtctatctacttttatttgaatgaggaaaccctgtgtatcagttagaatcttcgtgctttttctgaggagattgtgtttaatggattattagccagtttaggctcagtgaacaaactgatctagctctgaatgtatgtttcctgacgttttacatttccactttcctattccattcattaagctagccaacaatccaccatcctttaaagattgttctcataactgaacaaaaaccacataatctaaacagagcaaagctacaagaaataaatttatttaaacgaaagaaaaaggagtctgtgtgaaatgtcttcttttgtttttgttttttacctaagttatatttttcaaaaaaaaaaaaaaagaactggctagcccttgagttggatttataaaggaggttgccttgcttgaaagaaatggtcagttgtgtgacagtatgtggaaccctttcaggaaatgcccacgtgcctttcagttaagtctttaagtctggaggcgacacaccagggtgtgtccttgaagagtgggcctgtaaaaggggaatttgcattgcagcctgttcattgtttcccaggtcctgcccagaatgccggatcacatctaactttgtcattccaagtgagtactgggtggaggagaaagaagagaagcagaaactcattctgaaatacaaggaggcaatgaggtatgagcactgcagccttttctcaagcgaagagcccaacagagcttgggttcactttgaaaagaatggtgctgcattatacactcctacctccttcctacccttctttgacttcccaggacagtttattttg

SEQ ID NO: 39414 - DNA, 2300 bp, Homo sapien
ctttctttctttctttctttctttcttttttttttttttttgagacggagtttcgctgttgttgcccaggctagagtgcagtgatacaatcttggctcggtgcaatcgccatctcctgggttccagcgattttcctctctcagcctccagagtagctgggattacaggcttgtaccatcacactcggctaatttttgtatttttagtaggtaccgctttcaccatgttggtcaggctggtctcaaactcccaacctcaggtaatccacccgccttggcctcccaaagtgctgggattacaggcatgagccaccgaacccggctttctacctttttctaacaagtatatattatgtgcacagatagttggagataaaaaggggaataaaccagtctttacccatcaggaatttataatctagtttgataaatggtatactcactcattaaaagttaaatatcaaagtaagaagtgtcactgcagatgaattgattaaatgccttatctattctataatttgtagaaattcctaaagaggttgttaagatgcctagagatactctgagggtgctgtttggttctcttgtacccttacagggtaacttggcagtttcttgttctctatgttgggggccactattaggtttctaagaggcacagcagtagggggattctagtaaattttgtcttttactgcacagtgtctcatggagacagagtctgcacagtggaaggaacttcagaaataatatatggcccaggttttcaccgaaggcaaactcaacttggggtgaatctggatgatgtttttttttttttttttggtggtatcatttaaaaacaagacatatacttatattcattggtttttgtttggaggagaaattctttgacgtagactatatctttttttctttttctttttctttttctttttgagatggagtctctctgttgtccaggctggagcgcagtggctcaatggcacgatctcggctcactgcaatccctgcctcagcctcccgagtagttgggattacaggtgcctgccaccatgcccggctaattttttgtacttttagtagagatggggtttcaccatattagccaggatggtcttgatctcctgacctcgtgatccatccgccttggcctcccaaagtgctgggattacaggtgtgggccaccacgcctggccctttttttttctttttgttatgtaagttaaacagttttcataatctaaggcgtattattattacatttttttgagacagagtcatagtcgtgctccatcacccaggctggaatgtcaaaatagttcgttgtaacaatgcaaaaacaagggccaggcgcagtggctcacgcttgtaatctcagcactttgggaggccgaggtgggcagatcacaaggtcaggagatcgagaccatcctggctaacatggtgaaaccctgtctctactaaaaatacaagaaattagccgggcgtggtggcggcgcctgtagtcccagctacaaagcaaaaacacaatgcaaaaacggactaatacacttgctttactcctgttttcttatcaccttctttttattttttttttttgaaatggagtcttgctctgtctcccaggctggagtgcaatggcgcgatctcggctcattgaaacctcagcctcccacgtgtaagcagttctcctgcctcagcctcctgagtagctgggattaacatgtgtgccaccacaccagccaatttttgtatttttagtagagacggggtttcaccatgttgcccaggctggtctcgaaccgctggtcttagacccctgacctcaggtgagccactcacctcagcctcccaaaggtactgggattacaggcatgagccaccatgcctggccctttctttgtgtttatttcgtatgtttgtgtatttactggttgaatatattagtcatgaatactaattagttttaatattttcaaggattggttttaatccagttttgtggtctttcgtctcacaggtattttatgcatggggtttgtaaggaaggagacaactgtcgctactcgcatgacctctctgacagtccgtatagtgtagtgtgcaagtattttcagcgagggtactgtatttatggagaccgctgcaggtaagaatttgtttataaatttgttcaggggtgggttggaggaaaaaggtaaaagacatacttctgatagctttatatgtcactgattaaaaataatgctttgaaaatgactcttggctgggcagtggctcatgcctataatcccagca

SEQ ID NO: 39415 - DNA, 2300 bp, Homo sapien
ctgcagccctcgcggcccccgctgccgccgcgttcccccagtcactgcgtcaacccccgctgggccgcggagccctcagcgctgtccgcggaggcctggcggtgcgcgattactgcggagccgcggggctgcaccgccgcttacacttccctgagcgctgcctgagctggctgcgagcgcatcggggagaggtgggctggctcctcccctgccgctggaaggatgcccccgccgctgcctccggctcccggggctcgggaggtggtcacttgaggccggtctcccagcgatcctctccgggcctagacaccccgccgagggccccagcgagcttgcctggctcccggccctctcctctctccgtgccatccgtttgtaacgtcttttcacgtccctccgtccctccgccccccatcctccgcccaactgtgagaagaagcttttgtatttcttctttgtatgtttgtcgaggttggcggtgctgagctttgtcttagaagcaggcgttcgggggccggggtcgtcttctccacccgcggtttttttgagctgcagattattaccctcccccagcgctatgttcctcttttgaaatttacgcatcttccgaagggagtgaaagggctcttcgctcccggaagagagagaggtttggttttggtttgatatgcgagacgaaaatattagaaaaattaagggatggcggttgtatggatgtgtatggttgtaaaaaactacctagctctacgcagaagagggcatttaattgtacgttttttattttccggtttttaaatagtgatcagtagcgactgtaagcttttctttttctatcagttgaataaatcaactgaaatgccggttttcacctgggtggtataatttatatgcaagtatgtaaaaatgattcctaattagaacttgtagtattaagggtgaaatttgaaaccttcccagtctttgatgtgatacatttatcctggcgaccttcgaaggtctctcagcctttgatatgatacatttaaggtgtgaaggataagcttaattattttacataatgggatgtagaaagcataaacgcaatttcaggtcacttgtcttattcatcggtggattgtaaaagtggaatattgccaggaatgatgattttaaagtttctactcatggagcaaattatttgaatatctgtttcccttttacaatgctacagttgatctatatgtgctagttacatcttttaaaagattgaaaccggcctgtcggggtggctaggtcggcgtggtggctcacgcctgtaatcccagcattttgggaggctgaggcgggcggatcgcctgaggtaaggagttcgagaccagcctggccaacatggtgaaaccctgtctctactaagaatacaaaaattaggccgggcacagtggctcacacctgtaatcccagcactttgggaggccaaggcaggtggatcacgaggtcaggagctcaagaccagcctggccaagatggtgaaaccccgtctctactgaaaatacaaaaaacattagccgggcgtggtgacaggcgcttgtaatctcagctactccggaggctgaggcagggagttgcttgaacccaggaggcagaggttgcggtgagccaatatcacaccacttcactccagcctgggcgaaagtgaaactctgtcagaagaaaaacaaaaaagaaaaagaaagaaaagaaagagcttagatttactagtttttgggggttttttgtatagcttttgcttgagacagttttttattgttgtgcagattccttgataggtctggggttttagtgtttgacattgttttcggttgttctaggtaccaacatgatctcttacttaaaactattttctcctttagatagaggaatgtcaactatcatttttttttttttttttttgagacagagtttccctcttgtttcccaggttggagtgcaatggtgtgatctctacttaccacaacccccgcctcccaggtttaattgattctcctgcctcagtctctggcattacagatgccttagtagctgggattacaggcgtgcaccaccatgcccacctgactaattttgtatttttagtagagacgggctttctccgtgttggtcaggctggtcttgaactcccgacctcaggtgatctgccggcctcagcctcccaaagtgctgggattagaggcgtgagccaccgcacccggtctatgatccttatcgttcactttgagctctctgagaagagtagggccctattttatctgcagggctttctt

SEQ ID NO: 39416 - DNA, 2300 bp, Homo sapien
gaaataagccagacacaaagaacaatactacattatctcacttatacgtgaagatgtgaaaaagttgaatacatagcaacagagtagaacagtggtttaccaggagtggagtggggaatggggacatcaggtcaaaggggacaaagttgcagctgtgtaggatgaataagtctagagatctaatgtaccacatgaagactatgatttttttttttttttgagacggactctcgctcttgcccaggctggagggcagtggcgtgatctcagctcactgcaagcctcacctgccgggttcacgccattctcctgcctcagcctcccgagttgctgggacaacaggcacccaccactatgcccagctaattttttgtgttttttgagtagagacgggctttcaccgtgttagctaggatggtctcgatctcctgaccttgtgatccgcccgcctcggcccccaaagtgctgggattacaggtgtgagccaccgtgcccggcggaagactatgattaatgttaatagataatattgtattgtatactggaaaattgctaagagtagagcttgggtttttaccacaaacacatacacaaaatattcatgtgaggtgatatgctaaatctgcttgactgtagtaatcacttcactaggtacatgtatattaaaacaatgttttacaccttaaatacatacaattttaaagacgcattaaaaaaaaagctaggatattccagacatattttgttactcattatgtattcactgcagtgtgaaaagcacaatgcaaaggggtttttttttttttttttttgctttttgttttttttttttgagatggagtctagctttgtcgcccaggctgcagtgcagtggctagagtgcggtggcgcgatctcggctcactgcaagcttcgcctcccgggttcactccattctcctgcctcagcctcggagtagctgggactacaggcgcccgccatcatgaccggctaatttttttgtattttttagtagagacggggtttcaccgtgttagccaggatggtctcaatctcctgacctggtgatccgcccccctcggcctcccaaagtgctgggattacaggcgtgagccaccgcgcccggccagtacaaaggtttttaaacagattctcatttaactttcacagccatctctgaagtaggtactattatctattactattattattattttgagacggaatttcattctgtcgcccaagctggagtgcagtggcgcgatctcggctcactgcaacctccgcctcccgggttcaaggaattctcctgcctcagcctcctgagtaactgggactagccactacacccggctaatttttgtatttttagtaaagacggggtttcaccacgttggccaggctgatctcgaactcatgacctcaggtgattcgcctacctcagcctcccaaagtgctgggattacaggcgtgagccaccgcgcctggcctattattattattattgtcgtttttacagaggagaaagcaggagcaccaagaggtaggataatttgctagaagacccatggcttagaaagggaagcctggagataaggggaccagccctctagagcattgctcagccaaaatacttggccaagatcacatctctgataccaggaatgagataacctttattaagtgtttaccatgtaccaggcactaagctcagtgatttctaaggacatcatataatcctcacagcaaccatatgtgggtctgctgtcatccttattcgagagaggctgaaacggaggctcagatagaacaagtacctagctcaaatattactagagaaatgggaaagtgcagattcaaacccaggtcttccgactgcaagtccctagtccccagccccagctccactatatcagcctctgctaggaagaaagccgctaactatggactttcgtcgccggggtttcgagcctaggacacacctgtacagacccccgtttgccccgcccctttccggaggagacgtcccctccaccaatgagcggcgccgtgggcgggccgcgggcgcgcatgctctgggcccgcagttgaagtggcgagagcgctcagatacgcgacgcgtagcaggcggggaccgaacgggtgcctcagtgtccttcccctcccctcgcctggcctcgccgtcctctccccgcagccggaccggaactatgtgatcccggaagttccggggcctttgctgtgtgggataaacagtaatggcggaggctgcaactcccggaacaacagccacaacatca

SEQ ID NO: 39417 - DNA, 2300 bp, Homo sapien
tcagctactccggaggctgaaggacaaggattgcctgagcccaggaatttgaggtgcggtgagctgtggtggcaccactgcactccagcctgggcaacagagggagaacctgtttctaaaaataaatagagctctcgccatggcaaagcaaggcacagctacagcccctttctctctctcaaagaaaaggccaaactcagccagggtcgtgctgtaattctaggcagtcaaggctttacctgtaggtggtggttactaccctggccctgagagtgggagaaactgcctggcttccagtgaaatgaccccttcctgtcccccttttccctgtaagggttcatagcatctcctcatagcatagattacttactacttgagggaaacagagggtctgcctgggtatcgcacagtactgtgtaatgcagcaatgtaattatcactgtgtaatgcagttttgtatggaaaattagttcaggttcccaacagcaaactgttgaaattcagcctgttttagtttggagcctgtgaatgcagcttccctcctgacatgcctcacttaaataaatgctctccataatgccctgtgtcattaaaagcatcagtctccaaccagacttcctgcggtcagaccctaattccaccaccttttcccaatatacctggagcaatttatctaacccctctatgcctctgtcttctgataaataaaatgtgtataagaggccgggcacagtggctcacgcctgtaatgttagcactttgggaggctgaggcaggcagatcacctggggtcaggagttcgagaccagcctggccaacatggtgaaaccttgtctctactaaaaatacaaaaattagccagacatggtgatacatgcatgtaatcccagctcctcgggaggctgaggcaggagaatcgcttgaacccaggaggcagaggttgcagtgatccaagatcatgccactgcactccaggtctcaaaaaaaaaaaaaaaaagtgccaaaaaaagtggataagaatagtaattttgggttgggcacggtggctcccacctgtaatcccagcactttgggaggcccaggcaggaggatcacttgaggtcaggagtttgaaaccaacctgggcagcatgacaaaaccccgttctacaaaaaggtacaaaaattagcagggcgtgttgctgtgtatctatagtatacacagtcagggactgtctatactgtaataagacagtcagggactatctgtactataataaggactgttccatatccttagtcacaagccttttagacttggatgaactacataaatgggctgaaacttcgtgtcctgatttgtaaaatagtatagacagtccctgtctatactagtgagccactgctcccggcccccttttctattttctacgtctatgtttgtttacaaagttgggattttatttttttacatatactttattattttcacttagcataatagcatgaacattcttgcacataaaagccacatctcttattcatggattttcacaccttttacaataacagaagttgatttcaggccgggcacagtgtataatcccagcacttttggaggccaagacaggcagatcacctgaggtcaggagttcgagaccagcctggccaacacagtgaaactttgtctctactaaaaatacaaaaactagccaggcatggtggtgcatgcctatagtcccagcttctctggaggctgaggcagaagaattgcttgaacccaggaagcgcaggttgcagtgagccaagatggcgccgctgccctccagcctgggcaacggagcaagactttgtctcaaaaaatgaaataaaataaaagttgatttcggtaacaatttttctaagaaaaagaaaatttggccgaggggatatattaatatattctctgaaacagcctaatttgattcaaattctttgttttttcctcccatctggcacattccagaaagtcctatgagtttgaagatttactgcagtcttcctctgagagcagcagggtggactggtacgcgcagactaagctggggctgacacgcactttatcggaggagaacgtctatgaagacattctaggtaagaagccacagcgtctgtgtgcggatctgagtctgtctgggagaaaggggagggagaatggggctggctgctggaaacacacgtgcacacacatgtacacacacacacacttgaagacacctgtgcactcggatgaaaaagcaggcaggtggggtgggagagtgagccttgtgggatatatgacag

SEQ ID NO: 39418 - DNA, 2300 bp, Homo sapien
ttggctaacattacaacaggaacgttttttccatttaataatagtcttcttttttctttctagcttcagtttaaaattttctttttttatttttttgagacagagtcttactctgtcgctcaggctggagtgcagtgtcgcaatcttggctccatgcaacctccgcctcctgggttcaagcgattctcctgcctcagcctcctgagtagttgggactacaggcgcccgccaccatgcccgcctaatttttttggtatttttagtagagacggggtttcactatgtcggccaggctggttttgaactcctgacctcaggtgatccaccagccttggccttccaaagtgctggggttacaggcgtgagtcactgcacccagcctaaaattttctttttaaataatagcttgattgagatataattcacatgccatacaattcacccatttaaagtgtatagtttagtgtgtacacatttaaaatgtacagttttggctgggtgcagtggctcacacctgtaatcccagcactttgggaggccgaggcaggcagatcacttgaggtcaggagttcaagagcagcctggccaacatggcgaaaccccatctctactaaaaatacaaaaattagctgggcatggtggtgcacgcttgcaatcccagctagttgggaggctgaggcaggagaatctctcgaacccaggaggcggaggttgcagtgagctgagattgcaccactgcactccagcctgggcaacagagtgagtgagactccatctcaaaaaaaaaaaaagtgcagagtttttagtgtatttgtggagttgtgcaacccatcaccaccatcaattttagaacactttcatcaccctggaaagaaatgcaaacctgtcagcagtcactccttattcctcccacccacccactcctaacctcagcaatcaccagcctactttctgtctctatagaatcgtagtcttcttaaacataatttaatttacattataatattccattgaatagctgtattccactgaatagctaaattatagtctacattaccattacattgcttaacttttgagtagcttttaacttttcaatattataagtaacagctatgaatatttatgcaaacactttttacatccttaggattttgttaggatatattcccaaagtatagaaatatataatcaggccgggcgcggtggctcatgcctgtaatcccagcactttgggaggccgaggcgggcagatcacgaggtcaggagatcgagaccatcctggccaacacagtgaaaacccatctttacaaaaaatacaaaaaattagctgggcgtggaggcgggcgcctatagtcccagctactctggaggctgaggcaggagaatggcgtgaacccgggaggcagagcttgcagtgagattgtgccactgcactccagcctaagcgacagagcaagactccgtctcagaaaaagaaaaaaaaaaaggaaatatataatcatacaaccgtaaaaaaacagatccaaacacaccaaaaaactttctcccatcacacttaattaacaaatgtttctgaagtgtggtatggtgtagaagtataaaacagttgctgatcttgaagaggtgagcaagacagacattcgtaatgatgagctagagtctagttctagtctatattagatatgagaccacgggaatattgtcgaaggagcactagacttggattcaaaacatagacccattacttgtgagttattgtatgagcttaaacatgtgacctaactccctgaggctcaatttcttcatcacaaaaaaatgataggaacactaacattgatttctgtagagctgagaaacaaaaagggtttcttagctgggtttccggcctacctgagaacagagagaaggaagaccaagtttacatatttgaaagttgaaataagttggaacctgactcttccctgtttggcgatctgtaatacacaaaagaaacaaaaggaagtgtacttttttattcaaaaaatacatttatctgaattcagactattaaaccatattttacctgtattagcatatttcataacttttataactcatgctttaatgatttatggcaaactcatactagccttgatcagagaggtgaccctggcagttattgagcattaactctggaggactgacgccactgagtctttctacacactgtaatttagtgttcctatccaagatggccactaaattgcacttcttctattttcaccctctggagaatggtaaaaagcatgatttgcaaa

SEQ ID NO: 39419 - DNA, 2300 bp, Homo sapien
gcaaaagaatcgcttgaacccaggaggcaaaggttgcaagccaagattgcaccagtttgctttcttatatgttgtagcagccctgggaataattaaccctcaagaagccaagtcttggccaggcgtggtggctcacatctataatcccaacactttgggaggccaagtcaggaggatcacttgaggccaggagttcaagattagcctgggcaacatagcaagacctacaaaaaataaaaaagccgaccatgatagcatacatctgtagtcctagctaattgggaggctgaggtggggaaattgcttgagcccaggagttcgaggctgaagtgagctatgatagcaacactgcactccaccgcgggtgagagactgagactgcctcaatcaatcaatcaataaaaaagaagccaagcctgggaggctgaggcaggtgaatggcgtgaacccaggaggcggagcttgcagtgagccgaaatcgctccactgcactccagcctgggcgacagagcgagactccgtctcaaaaaaaaaaaaaaaaaaaagccaagcctctgatctttatttagaaagtgaaaaacttactgaataatgcttcaacaaacaaaacaataatttaaatgcttacactttaaaaaaaaagcttgcactttgcaaatgtgggctctaaaagttgactatgcttagttaaaatgggtatgtcatgaggagtttaaggaacttaagccctagaaaagcttcaaagagttcccagaaagcataaaaccctcagctgagaagaaaacagagatttttttcctgtgactttgaacaagtccctcaaatctcaagctcccagtctataggcactgcctgggcagtattacgtcattacacccatcttttatttttcactgtctccctcctgcctttctctcgcgcgcacactccttctgtggatttgtgaggctaagcctctcttctctcttcccccttgcttgaactttaggcctctttgctgtcccgcaggaccatggctcccagcccttctgagctaaagatgaggatgaccttcctctggtgtggagatggacctgaagcctgctcccaccgcgcgcaaatcaccccgccagacccccctcactctcatcagggcattcctctgctcaaaaactttccgtcccccgcttgaaatctggctaagcctacccatcagacctgattcaccacttggtcctcactcggctgtttctgaaatgcctagcctctgcttccggcctccactggtgctgttcccttcactcagaaccctttcctttcacccactttcctccacctatgcaaatgctattcaatgttcccggcccggtcaaagctccagggaacttcctcgaaggccccagcctgtattccagacccgccttccccgcagcccacggcatttccctgcggacttctgctgtgcagcctgtgttccttgacggtgtcctgcgtgagtgggggcagcgggtctatgaagtcacttctcctcttggaagcttttcctgaccacctcccttcccgcccggtctgggagcccttctgcagcgcgctcggccctgggccctccccggcccccatcacctgcatcgccggtctcatgactgtcattaccccggcccgacggcaagctgcctggggcaagggtggtgcctgactcactgcccgaggtgcccccggccccggcccggtgccgagagtgtgttaactgcctagagtaagcggggccgggcacgcggccgccgttccccaggcttggacgtccaggtctaagcctcaggccggaagcacctcgcgaatccgcccgggcctgggtggaatggagcccgcgcgcggcgggcgtcctcccaggaagggttaagccacctctcccccaccccgagaggcgagggggcgagtccggcagaaggtcctgtttaccgcagctccgcgcggggccgggccctgggagaggggttgccgtggcaaccggccgggcgcccgccagctgcggattagctcactgggccgggcgggatgggtcgggaggagggggcgcgcgtcgcgcagatcgtcgcggagccacggcaggaggaggcaggggccgcgggcgagcctgcgctgggccggccgagggaagcgcgccgctggggccgggggcggcggggaccccacgggagcgcgcgcggcggggacccccaggggcttgcgggcggccgggggaggctcggcggacaaaggggcggagggcggagggccatggcgtccccggcacccgccgccgcccgcccccgagccgcgcc

SEQ ID NO: 39420 - DNA, 2300 bp, Homo sapien
atgctatgtgtgcctctggtaatcttttttttttcatggcttttttttttttttttttttgacagagtctccctctgtcgcccaggctggagtgcagtggtgccatcctggctcactgcaacctctgcctcctgggttcaagccattctcctgcctcagcctcctgaataatctgggactacaggcatgcaccatcacacccagctaatttttgtatttttagtagagatgggattttaccacattggccaggctggtctcgaatgcctgacctcaagtgatccccccgcctcggcctcccaaagtgctgggattacaggtgtgagccaccgtgcccggtcatttcttgcatggctttgccacactttgaaactgcacattttgatttcttatcatgggtgtttttttaaaaaaaattgaaattgcacatttatatgttcccatgttgggtccccctcattacgtattcagccagtaagggcaggatatttgtgtccgctttcccagggtccagcacatgacctagcttgatcagtacatattattgagcctcgacaaatatgagattgggctcaagaaatatttattgggctcagtgagtattattgaatgaatgaatatggcctttccggagcctttccccaaggtccaacacaattgccgaattaatgcagccgaggacacagcatccagttcctactcctgcagcccagttacccccatccaacaccacccccctacccaacccccgctgaaaagcggacctgtgttcagaacctgccttcatacttttcagccatgctctttggaataatgaaagatacgaagaagtcagtgggaagatagacatggggagggggacatagagggtgcctttgcgttttgctacccaggacccaggactcaagggcagggtggtcttggcctggggtcgccgtcctctttaaggggcgggtcaagggaccctggctgcccgggcctctgccaccgaccctctgctccctccgaccctcaccgcccagcacccagccctctgcccccaccggccaccctgtaacagcccagcgggttcaccttgcctgctgcctagacagagccgatttatcaagacaggggcattgcaatagagaaggagtaattcacacagatcaggctgcgcgggacactgggcagagtttttaaggacaacttggtgggtgggggaaggccagtgagtcgagagtgctgattggttgggtcggaggtgaaatcttagggaactgaagctgtcctcttgtgctgagttagttccggagtgggggcctaagatcagatgacctggtttatcgatctggtaggtgtcagttgatccatcaagtgcagggtctgcaaaatatcttgagcactgatcttattagcagtttagggagggtcagaatactgtagccttgctgcctgactcctaaatcatactttctaatcttttggttaatttgttagtcctacaaagacagtctattccccaggcaagaaggaggtttgttttcagaaagggctgttatcatctttgttttaaactataaagtataaactaagttcctcccaaagttagttcagccaacgcccaggaatgaacaaggacagcttggaggttagaagcaagatggagttggttaggtcagatctctttcattatctgttataattttgcaatggcggtttcaacctagtggccgaacccgtcccatccatctcccgcgcccctccgctccaccacagccctcggtgcctcggttccctgcacctgcactcccgcccgcccccgacgctccgcccccgacgctccgcccgccctccacgctccgccccgccctcccggcccccgcctgcgcccgcgccctgggctggtgcccgccaccccagcgatctcatactggcccctgggcgcacggtgaccctgcggctgcccggcccctgcctccgcccgcgcggccccctcgctcaggtcgcgggcgcccggggcctggcttcgcgtgggtcctggctcctcccgttccgcagttggtgccgtctgacagccccttccgcgcggcgcggcgcggcgcggcgggtgtcgggcggggcgcgggcctccggcctgaggcccggcgaggtgctggagggagcggggcgcggatccggcccagatgggcagctccgtccgcggggtcagggccgggcttcggcttcaccgcagcctcgcctgagcgggcgcctctgaagtggagggcgggccgcctgggccgcgggcctcgggaggatggtggcgccctggcgcgtct

SEQ ID NO: 39421 - DNA, 2300 bp, Homo sapien
gtggacagcaaggtgattatccagaacacacgtccctgtatcagcatgttctgagatgaactgttctgtttttctgttccaggtaaagcttgagagcaactttgcctccattgtgtttgccatcatggtgttggaggggcttggccgctcactggaccccaaactggacatcctggaggcagcgaggcccttcctcctcacgggcccagtgtgccccccgtgatggggcagtggcctctgtgggcccttgtcaagagctggaggccactcccaagagcctctcctatggcagctgggacgttttaaaattgggacaccaatttcaaatgtaaccctccagtggtggaaggcacaccatggcttcctctgcttggtttgagggtctgttcaaaagctttgggccaattagggagtaaaaggagggaaggggcctatccattccattgtggaagctgggccaggtgccagggacactctccttcagggaaaatgttatgtggaggaggacgaataaatttattttgttttcctgtttttctcatttcttgacccgctatactccctggtcagatgggtactgctggtagttcccagactttgatattcaggttagaaaatgccatcaagtcctactgatctgtggcatgtgcacacacacacacacacacacacactctttatgtataaatatcatgcaggtgctacctgccagcataatatacacttagggcaaatttcattgtacttcaaattatcttcttggtaatttttaatagattttgctaactccttggtaacttttattacaaggtaaaacaaaactgatgaaagtggctgacataccggggacgtgagcagaacggcttggccacttccttaacatggccccgggttcacccgctagtccggaactacagtttctctgccacagtgtctgcgcctgtccacttgcaggcattaattttggtgaatatgaagagagttaatataaccagtgtgtcctcttctccatggcagcgcccagggacagacctgcagtgaccaccacctgcccctctctgccaggcccaaccacgggctttcttctcagagctgagctgatgtggccgtctggctgactaggaggggcccggggtcagcctggagggggggtatttgtaaagcttaatttctctttttttttttttttaggtaaaatcacagtttatccctgcaccttcatagattatgttgctcgtcttagagaccaccaggcagcgaatggagtcaagcccttgcgctctccgagagtcctgccctgactacaggactagtttctcccattctttccttctccaggataaagttcctcattcctgtcttttagtgagcagtatggtttaggtggacagagattcctttggtgcagtttttttcaaggaggtgatgttattttttccttcccaggtcttgaggggacattcaaagcaggcagagaggggttgggatggctccagatggctgggagggagaacaccagctggtcacgcagcccctcgtgccagtgcgcatcaggtacagtgtggaggcgggaaagggacaaaaagacggcagtctcttccctgagcctatgccaacccagccttaaagccagtggatcgaatcaagccatttgtggcattatctattgctgcgtacgaacttagcctggcacaatgcctgtaatcccagctactcgggaagttgaggcaggagaatcgcttgagcctgggaggcagaggttgcagtgagccgagatggtgtcactgcactccagcctgggtgacagagcaaggccttgtctcaaaaagaaaaaaaaaaaaaaaaaagaattatacaccactcagttttaggaggggcagaacacggggagagccctacaggatcagaggggcaaccaacaagctgtttcagaaggcatggggcagctcagcaaccataagttatgcgtgggctttgctctcgggagagaggtttcctgcagccgaaggactcacagctaatctgggtcaggagcggctgccggctcccccactcctggagatgagcgactctgtgacgtcacgggaggcgcgggcggagcgccggggaagcgaagtaggcaggggcgaggcggctggggaccgcggggcggacgggagcgagtatgtccgctctgactcggctggcgtctttcgctcgcgttggaggccgccttttcagaagcggctgcgcacggactgctggagatggtggagtccgtcagtgagtgtggggctggggatgggggcctcgccggcctg

SEQ ID NO: 39422 - DNA, 2300 bp, Homo sapien
atttttatttttatttttttgagacggggtctcactctgtcacccaggctggaatgcagtggcacgatctcggctcactgcaacctctgcctcctgggctcaagcaattctcctgcctcagcctccccagtagctgggattacaggcgcacactaccatgcccagctaatttttgtgtttttagtagagatggggtttcaccgtgttggccaggctggtctcgaactcctgacctcaggtgatccgcccgcctcagcctctcaaagtgctgggattacaggtgtgagccaccgcgcctggacaaagttacatttttaaaaaataaatcagaccacattactttcctgctttaaaactccaatggctccctgtgattcttagaataaaattccgagtcctccaaagccccctctaatccggcccccacacttgtccctgtgacctggtctctcccactcttcccctacgctccactccagcctggcctcctgccaaccctgcgggctctggcctctccacctgatgcctcctctgccctcttatgtccaccgggctcttcccttgaggtctctgcatggctgacttctcatccctcaggtcccgcttcaaatcacactcccaggcattcccacgccatccccaaatacaatatcccttctactcccacaccacgcattctccatattaatccccagctgtattctcttcataacccttaacagtactcaaaaaaggtctttcttttctactggtctctcctctccagaatgtacacttcattctctctcgtattctgctatatcctcagcacctagaaaggagcagccatatagaagatgctccataaacatttatgcacttaattatcacacactctgaaacaagtgtgtgttacgaacaagccagcacctcagggaagatcggcattcccccatctcctcatgcaggaccaagggctgtcgctcatggctctccatcactgtctttgcccaagtcacacagggctttgccttctgcccaccccacacctgccccagctccagattcttcatccatgtgggacttcaggcaagtcactcctttcatttcctgggcctcagttccttaataacaacaacagttaaagaatacttgtacggtccttagcaggcaccagcaattgttttaaacactttagtgagaccaagcgcagtggctcgcctgtattcccaacactttgggaggccgaggctggagaatcacttgagcccaggagttagaggctgcagtgagctaggatcgcgccactgcactccagcctgcctgacagagttagaccccatctcctaaaacacacaaacacgctttagataacagtaactcatttagttccttgcaaatggacgccaaatgggtgaggaaactgaggcattaagagaataagaaacttttccaaggtcccacagctggagtgtggcagaggtgggatttgaacccagccactgtgcggccagaatcccgcttggaatcacgaccccacactgcctcttggtaaagtgtagctgatgatctaagggacctggaatcatccatgactcttttccagtcctgctcttacggaatctctgcacaccactaactcggcttcggcagctgctccctacctcgcacccgctccctacctcgcacccccagccctccgccctccggtctgcgtctcgggccacctcgcgggcggctctgcctgtcactctcctaaacgccacggctgccccagcgttggcttccggctttctgctcctctcacccgacggcgctctctctgggcgacagcctccactccctgcagccagagtgatttttcagcattaaaaagcggccacgtgacgtctccgattaaaggctgccgaacagactctaccctaaattccgcagccaggcaccgggaccctggaccgcgccctccctaggcctcaccgccgccgccccccgcctcgctccaggagcgtccacacccgccgcgcacgctgcttcctccgcctggaccgcccgcgccggcgccgactggctcagcccgctccgcattcacgcgtgcgtctcccgagggcaggcggcccctactaccatgacggccctgcacacggtgtcccatctgcccagcgaagtctctccctctccctccggccagcggggtccctctcctcgagtcgcggcttcaggagacacgcggactacaggtcccagcatgcctcgggacgcggcctcttcaggcgccccagtcaaggtgagagcgtcccagggacccgcgctgtccgctacag

SEQ ID NO: 39423 - DNA, 2300 bp, Homo sapien
ggaggaagcttagcatttcagtttcttaaacaatattcagggtgatacactttttcttcccttgcattttagaataggctggtatctcatttgaacgggggagcagacttgatctcaaatgaagctgtgcccaggagccaggcttagcatattgagatttttatagataccttaaaaaataaaatatttaaacctctcttttcttcctttttctatgaaataggttttttctctagtttacaaatgacatgaaaataggttttatttgtgttttatctgctttattttttgatgcttagacaacagttagacttactgagctcctaaaaaaacgaggaagaagtccttatttgtgaaaagcactttatgagtaattgtatagacagtatgtggctgcgtcactgatcatcttgtaagggtgtaacagtcttgtctgtaaagtggctgcagtgccttctgtagtgtgttttatttttggtagggagaggtgaagccttctgaaaaatttgagagcaactacagaggattgtttgtaactgtgtagtattcctgatggacttttttcatcgttagagtcaaggacctagacttttgccactgaaataatattgaccaaaaaaatagtttataaaagggatttgtgaatagaaaattcagtgtgatcatttgttgttaatgtgcaccttaaaagaagattctgtctagctgtcaaattctggttcccgaatatctcacccctgattgtatttgagatctagtagggcatactggggcattttagaagataaaatcccatacaaatgatatatgctatatttatgttggtgttggagaagaaagagcagtatataaagaaataattcaagactgcagcactgtcaacctgaaactttgtaaatatttcctagcttctggtttggtgcggtgacagcactttcatcacaggatgttaccttgtattcaccaggcggagtgcgagctgctgcacatcctcctcagatctcacctgtccccactgtacatccacccgccagctgcttgcaaacctcatctctagctttagttcgaaaccacattgcagggttcaggtgacctctacaaaaaactacctcttcagaatgaggtaatgaatagttatttattttaaaatatgaaaagtcaggagctctagaacatgacgatgatttaagattttaacttttttgtgtacttgtatttgagcactctcattttgtcctaaagggcattatacatttaagcagtaatactgtaaaaaaatgtgttgctcggaatatctgaatgttgttgaaagtggtgccagaaccggtttaggggtacgtttcagaatcttaaccttgagtcaattgcatgaaattaaatagctgtggtatcacttcactaacagtgatgtaattttaattttcagtaggcttggcatgacagtacatcctcataatgagtttgctgcagctttgtcacatgcacaggcattcatagaaagaccacccagctaagagggtagaatgattactctttttgcaagattctcttctttgtccaagttggcattgttagtgctaggaataccagcaccttgagacgagcagattccaaccattaggctataaacaccatagccagagatggaaggtttactgtgagtatgaacagcaaatagcttacaggtcatgagttgaaatggtgtaggtgaggctctagaaaaataccttgacaatttgccaaatgatcttactgtgccttcatgatgcaataaaaaagctaacattttagcagaaatcagtgatttgtgaagagagcagccactctggtttaactcagctgtgttaataatttttagagtgcaatttagactgcataggtaaatgcactaaagagtttatagccaaaatcacatttaacaatgagaaaacacacaggtaaattttcagtgaacaaaattatttttttaaagcacataatccctagtatagtcagatatatttatcacatagagcaactaggttgcaaatatagttcagtgacatttctagagaaactttttctactcccataggctcttcaaagcatggaacttttatacaacagaaatgttgacagaaattgctgtagtttagggttgaagtactgtatgatgggcagcaatcatgtattaacttagaaggggaaattgaaatataggaccgaatttggttttatcagtttccagagtactgctgccaacctagacactgatttttcagagtttgaaatgtaaatttcttcccgggacttgattgcac

SEQ ID NO: 39424 - DNA, 2300 bp, Homo sapien
cattaactttgttttgtaggtaacaaataatctttgtttaataatgtaagcctccaggaaccaatgatactgaccaatatctcttaaatagtagagcatgtagtttaggattatatttgagtttagtgattaatatgaataagtcagatattttcaacattatggccattattagaaaatgtttccatctggggatttccttttttttaatattgattggctgttgaggtaatattaaataattaattaaaaatgtatttgttatataggcttttacatttattttgctttttgatttttttcatcaaagaaacagaaacttgggagtatttttagtatttctgtcttgttttagagagattgtttttctcctagattttgcaccagtaaataaagtatgtgtctatgtctatcatcagatatcttaaaggtcattaaattggccagaaaactaaaagaaattatagttgtaatcaccaaatgaggcccctttttggcccatcctttccaaaaggtctatatttaaacatgcactacattttaaaattaagtctaaatatcccccaaccttctacccctgataaattaacatacttgctcctccttaatgtatacatttttcttttcactaatttaggatcaaccacaggtttgtctgctaccccccctgcctcattacctggctcactaactaacgtgaaagccttacagaaatctccaggacctcagcgagaaaggaagtcatcttcatcctcagaagacaggaatcgaatggtaagagtatatgatatctttttttctctgaattctttcttcttagaagtcacagccaaatgtaatattatcctttagatatattatgtccatatgtgacacagaattcccataattaaataaatttaagaactgatagttttttgcttaaagcatatttctacggcactgctttttgctgtcatctataatataatttagtaaaaggcagttttggaagagtaacagtattctgttctaaagtaaggaaaaagagagaaagctaatattagaaggcacgaaaaggctggtccagaattcagatatttcagatatctactgaaggacattcttccctatttaaaaaatcaactttcttctgcaaaatgaatccaccatggcacatgtatacgtatgtaacaaacctgcacattctgcacatgtatcccagaacttaaagtaaaatttaaaaataaaaaacgaatactgtttagccgtagtattgctactaattgttgaataagaggatcttttaccctaccaaagtaattttatatgttgattttttttttttttttggaaagaccgaattagataagatacatgaagaaatttagcactgattgaaaaagactacctagatgaattgtcagtagttaccacaggttaacttaaaattttttgtgatttagagccaaaactattcacaaatatagcagcacttatcttgctccttaaagtcttccagatgataaaaacattttacttatttcagtaatatacattcctgctcataccccataaataatttatattttttaataaattgtttccatcctaaccatccttctgagcaaagtatcacaaggacagaaaaccaaacaccacatgttctcactcataggtgggaattgaacagtgagaacacttggacacagggcagggaacatcacacactgggacctgtcatggggtagggggaggggagagggacagcattaagagaaatacctaatgtaaatgacaagttaatgggtgcagcacaccaacatggcacatgtatacataagtaacaaacctgcaagttgtgcacatgtaccctagaacttaaagtataataaaataaaaaataaaaataaattttttccatcctaatattgacttcagtcttaaatttaagttttgtattttaagagtcatacttttaactactattcttccagagaatttttcttaaggggatctcttcctgtatccctctcaggcataaggtaatgtacttagggtgaaacataaggttttctttttctgtttggcttgacttgacttttttactgtttttatcaagaaaacacttggtagacgggactcgagtgatgattgggagattcctgatgggcagattacagtgggacaaagaattggatctggatcatttggaacagtctacaagggaaagtggcatggtaagtatgtaatgtggtgacattgtgacaagtcataataggatatgtttaacaacttttattttgtaaaaaatatcatca

SEQ ID NO: 39425 - DNA, 2300 bp, Homo sapien
aaacttttaatgttataaggaagtgttataatgatataacatttttagcagctaattttttaaaaatgaaataggacagttagagaattaacaaaaatcttgccagttgtgtttctgatgaaagggtgatgaaagggtgatgaaaggggaaaaggtgccatgactggctaatggtgctatttcagtctgcttctaagtatgtccttatagtaaagggtgcttcagattagtttagcttgatgacatcatcccttgtgatcatttactctacatttgccaagccactttttgatttaaatttatttcctcatagaaactttcctacttggaggagaatgtacaatgaagttaacaaagcataccatgttcatgtttttttttttttggagacagagtctggctctgttgcccaggctggagttcagtggtgcaatctcggctcactgcaacctctgcctcccaggttcaaatgattctcctgcctcaggctcctgagtagctgggattacaagtgtgcaccaccacaccaggctaattttttgtacttttaatagagatgaggtttcactacgttggccaggctggtctcaaactcctggcctcaggtgatccatccgcctcagactcccaaagtgttgggattacaggcgtgagccactgcgcccggcctacaatgttcatcttataggttatattttttcaatgcagaagaatgttagtattctcattcatcaagcagcctcacacagcatcctttacctgagagtaagcatcagctcccaggcttacggtgaccctaatcaatatgaagacaccctgtttcagaagtcagtaggacacctttctatttcttgaatcatccaaaatacagtaaggaggtcgctggtgacttcccccatgatgggaagtactaaaaggcagaatccacttagtttttcatgacttcatgtttaggttactttggtgattcactccaggccattgggagcccacagtaattgtttctcattcccgtttctctcttccttaaacttttcttttccaattatttattctttattagatccatgtatttttaataatgaattgaatttcattctgtaattgggcttctcaaagataattgacctcttctctcccaattgttttcatgcgtattttgcagagaatgcttggaatattctgttcatgaaaggcacaaagtacataaaatattttgagtgattttcttcaaaataaaaatgattagttttgatgcttcagatgtctagaatgctatgtgccttgtacaggccctacggcatggaaagtgctcaactgatatttgttaaatgaatgaatctggaaaacgaaaaatacacgaaatattttattcctcaacaatgaagaaaaagctttcagacttccatttagactcgttttaactggctgaattcttcaatgaaaagaaaacacgcgtcgcactgctaatttagctgttcctaaatatatttccatcaaattctgcttggctgtttcaaccttggggttgaagttcttattttgatgacacagagacgttcattgcagtggaaatagcaagtagtattggcttccccgccttcctccctctaggatttcaacttctcctcctcgaacaccagccctgctcttctagtaaatcccacattacagaacaggctgaggacggaggagacaagaggaaagtaggaaaccggagccatggaaacggcggagcggaggcaaagtgtgagagcgcgggtggttagaagggaaaaaaccctccccggacgacggcgcgaaggcgcgcctcagattacgtcacgcaccggggtgacgtcacgaccgtgacacgcgggtgacgccgttgccgcggcgacttctcgtcgtctccgcccccttcccccgctcccccccgcacccccgcctagcgtccttcccccaatcccctcaggctcggctgcgcccggggccgcgggccggtacctgaggtggcccaggcgccctccgcccgcggcgccgcccgggccgctcctccccgcgccccccgcgccccccgctcctccgcctccgcctccgcctccgcctcccccagctctccgcctcccttccccctccccgcccgacagcggccgctcgggccccggctctcggttataagatggcggcgctgagcggtggcggtggtggcggcgcggagccgggccaggctctgttcaacggggacatggagcccgaggccggcgccggcgccggcgccgcggcctcttcggctgcggaccctgccattccggaggagg

SEQ ID NO: 39426 - DNA, 2300 bp, Homo sapien
attttcctgaaaacactgtaacaaactgatagttcccataccagcttacagataactaactgtggaaatactgtgcaattacagcagaaatatattctgatgccacaatggtaattaagcaaacaaagcaaagttgatgaagcaactattgttttttaatctaatgtttggaaaaaggtaactttaaagggcaaaggaagagaaaaagcatgcaaagaaactaggtgactctggacatttgcaaggctttttagaggtttatggcactgatttgtttatacattaaactgctaaatgaatttttttcaccttgagactataaccctagtcctaacaaccccacccccaaccagagttggcaaagaagtgaatcaggaaactgagaatgctgaatggaaaaggaagaacaggcttgtaggtgatctgcagatggtggggagggaggggtggacgttggatctgacagttctaccgttgccagccttcaggtggcactattgacccaaaattgcttggttggtgttctgaatggttttgaggttgacagtggtttgagatcagcctctgctttttttttttttttttttttgacacacaatcttgctctgtcactcaggctatagagtacagtagtgcagtcataacttagtgtaacctcaaactcctgtgctcaagtgatgtccccctcctcagcctccacgagtagctggaactacaggtgtgcactaccatagcagactaattttcttattttcttttgttttttgtttttttttctgtaaaaacaagatttctccatgttgcctgggctggtcttgaagtcctgacctcaagcgatcctcccacctcagcctctcaaagtactgggattataggcatgagctaccatgcccagcctcctctgttaatggatcttgaaacaggcattaaaacttccttaatttaaacacggtttgttttcttacaagaactattttgaaattcacttggcaccatttttatgtaggagggtttttggtacatttctcccattggtttttcaaagtttatgcctttttcctgcttgaatatcagcaccttttcatctcagctgaactgtttcccaggatagtctctgagtcagcaaagattctcatctcactactaaaatttctcataaattggcatattctgccaacaataacccctacgtctggtctaaactgagttgagatagttattccaccagcagctttcttgatttttatgtatcccctgtatagttttttatgtctgttagctgtaattcgtgcatatcacggatatcattcttatacccatttcagtgttgtatgtctctgaagaaaaagctactgtttccagctgataagaacttaggtagtttgcattaaagcagaatatataagatggaggatacagcaagtaaccttacaattcatacgtgccttctatttagtaagaaaatggatcttttgagctattggatttatttttatagggctactgtctgtttttcccaaatggctctcagtctctaggcaaaattcagttcagtaacctagaagccaaatgacctcataactcattagcagctctcagagccttctggagcccttgaggagaacagtgttcaaaggactgatagtaaagacaacataattatgtctctgccatgattacaccttttgatggcaagcagtcagcatattaatgctgcagattgcttaggtgggtgttttctgaaggtataatgatgctggattaggataacttgtttccctgtcttcttcatccccagcctacaaataggtaaactgactgtcagtaaataacctggtgaatcacaaaatagttggttgcaaaggaggcaatacagcaaggaagtaatagcatgtaaacacgaagtgcaaaaatcgcagctgtaaagcatggaaaggaaatagccatttggactgtggatacttctccactccaaggcatatcctgccaacactgcactgatccatgagtggcttgctgtgtttgcattttctaacttattcattagctaatcttggaatttcttaccctaacctgtttaactttcttctcattttcaataggaactctaactccttgccactcaagaaatgtcctccctttcagaatatgccttccgcatgtctcgtctcagtgcccggctatttggtgaagtcaccaggcctactaattccaagtctatgaaagtggtgaaactgtttagtgaactgcccttggccaagaagaaggagacttatgattggtatccaaatcaccacact

SEQ ID NO: 39427 - DNA, 2300 bp, Homo sapien
agatacggggaaaaggcctttgaagatgtgactaaattaaggatcttcagattgagagagtattttggattagctccatgggccttaaatgcaattacacattcctaaaagggaggcaatgggaagtctgacacacatagtgaaggcaatgtgaaaagggagcagagatgtgaagatgttggccttgaagtctaaagtgatgtggccacaagccaatgaatgccagcagccaccagaagctggaagagtcaaagaactgattctcccctagagtctctggagggaacacagccctgtcaacatcttgattttggcccagtgatgctgattttgaatttatggcctctagaactgtaagataataaatttcagttgctctacaacaccaagtttgtggtattttattatagcagcctcaggaaactaatatgaacccccatgaaattgacttaataaaagtgatagtgcaaagtacctaaacagtcacctgaaactctatatacctagctatgtttcaagaaagatttatggtagcttatagtaattcacaaaacattgataacaccaataattcatacgtgaaaaggaaaaaacaggaaggatatacaaaacgaagccaacaaggtttatgcaaaaaatatatatatgtgtgtgtatatatatatatacacacacatatatatagctcttgcctcgagccaattaaaatttggctttaaaccagcagcttacacgtaaaggaagtcttcttgtttatatgattcagtggccattacataaaaacaagccaactccacagaaacaagtacaaaagacaagacgaaatttctcccaggagtttcgctccttaggacttcttttctggactgtagccatgtataggatactcattacccctttgtaaacttaaatgtagtcactagacccaactttataaggctgtttactatatcatataaggctgataacatgtcaaaacttaacttgataaaagcaaatcctatagcatagattgattagacgtcaaattctaacttaaaagtaaattctgtaggaggaaagagggtgtaaatacaatacccactaggtaggcaactcactaccgatattaattccagggtacattttgaaatatttataaaatgccttgaacgatactcagaaaacgagtacagtttcctcacccaaactatcaaacattgagtaagtgctgcatacaatgcctatgggatgtggcttgcttgaaaacagatttagtatggggtgaaatactcacaatgctttctactatctgcccagcgaggtctaagataactactgaggagacaaacgttccatcccctactccctgaagaagctcctgggtcaatgggggaaagcgctcctaacccagtagcaaggaaggcttgcagctagggatcctaattaactattagaagatgagcagatagatggaaggggagggggatggcgccgcaagtcggtcagaaagaccacacggcacacgcatcgccattgcttcagagcttttggaggcaggtctgtagccattcccaccaaaacatactaccgaaccgtgcatgcccttccaggagagccagacctttctaactctccccagcccaccacctccccgggtcctccgcacaggcggcggcgctagccttactgcgcaggcgccaggtacacctcggaggcctcaggagggggagccagtaactccgggtcgttcactagggctccgctctagctgccaagcttccgtttctctactgctccccgtaatagttgcctgcgcgagcttggagccgggtagagggcgggccttccgggacgagggcgcgtgggtgaggaaggtcaggtctaggtaaggctgtcggtgactttgggggtctgcagcaaggggcgatggctgcgaagtctacgggggtctccaaccttgtagagtcgccaggaatagggcgaatccacttcattagtgaccagctcgggcggttcacgtgcatcacacaaataacttggcctttttctgcctcagttgggggatttcttaaacgtagaatacccgcgtttccgctgccgtaatttcctctcaggcgcaattactctcttccatattggttaacagtagaaggctcagtttctctgctcatcacacggccttcggcactgtagctttgggtggtgggctgcagattaattttgtaaccaccttaagaaaaatacggtaaggtgatatttaagaaaaatatttgcgaaatgcgctcccgagtcaaacatcggttgacttgacaatacta

SEQ ID NO: 39428 - DNA, 2300 bp, Homo sapien
aaggaaatatctgatttatagagcaatctctgattataaaaagtgctcttaaaactgcattatcttggcggtgtaaatgggtaagccaaggtctggtgaagtcaatatccataggaggttcaattttattctattcatttcatttttccatccctaatattccaactttcctattgataagtaacagtctctgattggccaatttcaatggcttactccttctaatcctgtggtaggctaaaactgttccccaaagataacagagtctaatccctgggacctgcaaatgttaccagatacggggaaaaggcctttgaagatgtgactaaattaaggatcttcagattgagagagtattttggattagctccatgggccttaaatgcaattacacattcctaaaagggaggcaatgggaagtctgacacacatagtgaaggcaatgtgaaaagggagcagagatgtgaagatgttggccttgaagtctaaagtgatgtggccacaagccaatgaatgccagcagccaccagaagctggaagagtcaaagaactgattctcccctagagtctctggagggaacacagccctgtcaacatcttgattttggcccagtgatgctgattttgaatttatggcctctagaactgtaagataataaatttcagttgctctacaacaccaagtttgtggtattttattatagcagcctcaggaaactaatatgaacccccatgaaattgacttaataaaagtgatagtgcaaagtacctaaacagtcacctgaaactctatatacctagctatgtttcaagaaagatttatggtagcttatagtaattcacaaaacattgataacaccaataattcatacgtgaaaaggaaaaaacaggaaggatatacaaaacgaagccaacaaggtttatgcaaaaaatatatatatgtgtgtgtatatatatatatacacacacatatatatagctcttgcctcgagccaattaaaatttggctttaaaccagcagcttacacgtaaaggaagtcttcttgtttatatgattcagtggccattacataaaaacaagccaactccacagaaacaagtacaaaagacaagacgaaatttctcccaggagtttcgctccttaggacttcttttctggactgtagccatgtataggatactcattacccctttgtaaacttaaatgtagtcactagacccaactttataaggctgtttactatatcatataaggctgataacatgtcaaaacttaacttgataaaagcaaatcctatagcatagattgattagacgtcaaattctaacttaaaagtaaattctgtaggaggaaagagggtgtaaatacaatacccactaggtaggcaactcactaccgatattaattccagggtacattttgaaatatttataaaatgccttgaacgatactcagaaaacgagtacagtttcctcacccaaactatcaaacattgagtaagtgctgcatacaatgcctatgggatgtggcttgcttgaaaacagatttagtatggggtgaaatactcacaatgctttctactatctgcccagcgaggtctaagataactactgaggagacaaacgttccatcccctactccctgaagaagctcctgggtcaatgggggaaagcgctcctaacccagtagcaaggaaggcttgcagctagggatcctaattaactattagaagatgagcagatagatggaaggggagggggatggcgccgcaagtcggtcagaaagaccacacggcacacgcatcgccattgcttcagagcttttggaggcaggtctgtagccattcccaccaaaacatactaccgaaccgtgcatgcccttccaggagagccagacctttctaactctccccagcccaccacctccccgggtcctccgcacaggcggcggcgctagccttactgcgcaggcgccaggtacacctcggaggcctcaggagggggagccagtaactccgggtcgttcactagggctccgctctagctgccaagcttccgtttctctactgctccccgtaatagttgcctgcgcgagcttggagccgggtagagggcgggccttccgggacgagggcgcgtgggtgaggaaggtcaggtctaggtaaggctgtcggtgactttgggggtctgcagcaaggggcgatggctgcgaagtctacgggggtctccaaccttgtagagtcgccaggaatagggcgaatccacttcattagtgaccagctcgggcggttcacgtgcat

SEQ ID NO: 39429 - DNA, 2300 bp, Homo sapien
gtttaaagaccaatctcagcctccccaaagccatcctttatctataaatgtggcaaggacaagaagaccagcaggaagaacaagactcccagggacttgagaagaggccgaacctgtggacagggtcactctctgcctggagcccagctggggatgcctagatctcacgctgtcctctgagcactgggatctgctgacaagtgtggatggctgattggccaattctcaggcctctgcttggagatgcggtctgacttcctgccagcctgcatgccgaaagaacaagcctgcatgcttcagtaatgtcttggtcctgtgggtgacctcttgatgagtcactttctgttcttgaggaggcagacagggagcctgagagaatgaaggttaaatggaaatttaggattgtaaaaaaattagagatggagaggacaagggaaatgaggaagaggttgggcagggctttgataccttttgtgaactatttaaagatatttatatcccttgcttttctctgattttgtgaatgatgtcaccatgcatccagggactcagccatcttcagcggccccttcccaacctctcctgcctgcacccctgttctatccccatctgatggttgcttacatctcctcatctcctctttcttccctcttctctttccagggcctcatgatgaccttctagctgcagtagtctccctgcagtcactcttgctcccacaatctatcctatgtgttaccaagccagagggatggtttaaaaatccaaataaaatcatgttactcacctgctcaaaactgtcaaatgacctccagtttcacttagtttaaaatcccagctcctcgctctggaaaacagtatggtagctcccccaaaaattaaatatagaactactgtatgatccagcaattctacttctgggcatacaccccccagaattgaaagcagggtcttgaagagatgtttgtacacccatgttcataaatgcattattcacagtagccaaaaggcggaagcaacccacgtgttcaccgacagacaaatggataaacaaaatgtggcatattcatagagtggaatattattccatctcagaaacgagggaaattctgacgcacgctacaacacggatgaacctggaggacatcatgccaagcgaagtaagccagacacagtaagacaaatactgtaggatttcacttatatgagatagaatattctttctacttagaatggacaaattcatagagacagaaggtagaagggtggtcgtcagggggttgggggatggaggaatggggagttgtttaatgggtgtgaaatttcagtttgcataatgaaaataatcctggagtttggctgtgcaacaacatgaatgaactgaacactaccgagctgttaaaatggctaaggtggtgaattttaaaaaaattgttcaataatggggaagcattgtttattttatatatatatataattttaatatataatatatataatttagatatgtaatatataatcaatatataatatatatatataatttcaattgtttttggggaagaggtggtgtttggttacgcggatgttatttagtggtgatttctgaaattttgctgcacccatcacccgagcagtgtacgctgtacccaatgtgttgccttttatccctcaccccactcccacccctttccctgagtcctcaaaggccactgtatccttcttatgtgaggtgatgaatttcaagctgtctatatcttaccttctaactcaccagcctcccatgctgggccctggtacacagtgataccccggcaccagcttcacttctccttgaaggctccgagctcactggcttttgctgtcccactggcctgagcatctcctcccagaagagacttggtttggcaggtcactgcctcctccttgcccctccttccctctgccacatccccacctatcttggccttgctagtgtcgtcattctctaggatggatcacgttgctctctgcctccctaacctgctgtctgactgtgccttggtggccagaagagtgcttgccacatgacacatgctccataactgcttgttaagtggtgttttctgaggcctgtgtttgagtgactattgagagcgggcacatggggcatatgttctgcaccgttttccttatggtgggtctgagtcacctggaaccagccatgatctctggtacactgagcttgtgctcagtgatgggaactggtcggatgtgggattaacacaattaattggcctgcatagagattcaattattaa

SEQ ID NO: 39430 - DNA, 2300 bp, Homo sapien
accttcaactgcaatttgctgagtgctgattgtgtgccaggcattgtgctaatgataggaagcatggtttctactacagcatgttttttttcctgcgtggcccctactagatttataactagaagaggtcccctgtgaccttgtcaagggctcttttagtggaagtcaatttcattgggttactggggatgagtgggaggtaaggaagtgaaagtcactcctaactagtatgctttcaagtagcctggctggagagaagaggagggaaatggagcagcagtgagtgtggatggaacacagagtcagggaggacttctcttttttataaaggatgtaagacttaagtatatttctatgaagaggagaaagacttagcagagaggatgaacctaatacctgggacttaacctttcccatgctctgaatctcatccaagtcaatatagcagaccacaggcaaactgagggaagctcttcctggttctacttgataaacgtggacagcagagttcagcggtaaaggacactgctttggagtcagactgtctggacttaagctctggatctacctcttactagtcatgtgaccttaatatcattgggcctcagtttcctcagctctgagaaggtctaataatagtacctatctcacaagattgttatgagaattatacttgcatattacttagaggctggcacaaagtaactgctatgtaagtgctcaaaaaggcttagaaacagacacgcaatgtacaggtacacccacacaggcacattcagtggaaggcgctagtggagagtgaaacaagagagaacacagcttgctaggtggggggtagggagaaaagtggatgagtttacaggtgagaggcacctttcctcttcccaagtcactcccagctcctctagaatcacccgttctgtaagaagtgccaatcatgtagcatcaccgtgggtgggacccctcacttagtgcccattcattcattcattcactgactcattcatttgttcattcactgaggtctatctctcagtcaggtattattctaggccctgaagagacaaagatgggtaagacaccagcccttctgtcttgagaaggccgctggtccagaaagccttggggttctcttgttgtgttctttcctactgttctcccacatcttaggcagtcatccaattgtttggagaacagaggctgcatttttttcttctttgtgtctctcacagcatctaagacatagcagaagctctaaatctctatgggatgaaggaatccatctattccatttggtaggagcatgaatgactagcagcccacagtgtctctcctggatgatgaggtagcaagggaggaaggagctgacatttactcagcacttactatgtgccaggaaccgtcgacagtgcactgtacacagctcacttacaggcagatgatgagaaaggcttttctatttgttttgttcaaaagtgatgtctaatggctttgcttttatgttttccaacgctttccattttgcatggtttgctttctatgcttgaagcgtctcacatgactggaaacatttttcatgcttcacgtgtagtcagtcactgttgaattttgccggtgttttgctgttgggtcttttgttaagtaaatgctcgttatgtactctgtgtctggttctacaagagacaagcatccccaccccgttagccccatgtgtgccaatctctccctctgcccttgatgttgtctttgttctgtggcaggctatcgaagcctgcttgaataaggtgctcactaatgaggccaaggtcattggcagatatgtgaaaatccagaacaaaatgagaaacatttgggcaaagcctttgtttttcagttctcccaaaggaaacggtgtgtttgatttacctccaagttggaataaaactaaatggatcgtggattttttaaagtatgatgggtaaaatatttaaggcaagatgtttatatattgatagccagcctgttctgctctccaggtgattcctaaaggagcaagaggcaagatatttctctgaaactagctcatggagtctttatacttcctgtgtcctcctactcagtagcacaaaataattcccaagttcaagatttatttctgccttctggagacatggtctctgtcactggaaaagaaaaagagtcagggccttccgtgcttgtaggatttggatgtagaggtggtgggaatgtctctggacttgggacagcacctccgatgtctatgaataggacggactcactggtgtgtcctccacatgttc

SEQ ID NO: 39431 - DNA, 2300 bp, Homo sapien
ttcagggatcatggagtcacagagactggacaactcctccaaatctagacaaagactttcttaagcgccctgagcccaggtgcatatcttcccatcagggatgagtggtcccacctagcaatgcttgcctctcctgtgacaagagggtaggatatcctaggactctgagactgggccctatatctcaatattcatccacactcatgataagatgccggaaatgaatgcactgtgtgtagctgtcttgatttagtgggaggatgtgctgcttaggtctccaaagatgcccacctgggtcaaattcagaataatgaactcaggtacatcacccagaggcatttagaatggactctctcttcacctggattatgtgctgagtgttaagtgatttttcaaatatctgggggaaggagtgggaagagatacactctggtcatcctttggtgtggtttgtgggggatacttggttgattcttgtagttaaagtgaagttgcttttctgaaaatgttccctgtcttcaggggacttacccatcccaggggacacatccatcccaggggacacagccagccctttccagggaaatacgatgtttctgagtgagaggtgatttcagtgcagataggaagagctggtgcacaccagcagggttgccttccatgccatcttccagctggtgtgggatagactaagggggcagatttttaagaaccccaccagagttgacatacacacgtgattctcgtgtctgtctctcaaagctctcaatgtctggggctgtgtttgccctcttttcattgatgctgccatgatgcaaaatgtttcttaaacattattcctggttcttagaatatgtgattactgagtattggatttctttcctgaataataactgctcattgtagaaaataagaaaaataaaatacaaaaaagactacaagatttttcataatccagtcactctgaggcatctaccgcgggcccaatccaaatggtcatgacctcaaaacttccccaatgagtgcttgtctctgggttggcagctggggccatgtgagcagtgtacaccacagaaccgcactggtctgcgttgagttgaccctgtgttcctggcagcaagagtgcagggccctgagcccccagagatagcaaagaggcctaaaagtttaatgccagaccttaggggcaggatggagcagggctaaaagatgtctctttgggcctgtctgcctgctttccttccttccttttctttcctttttttttttggtcagttgccatctcaatctaatcatagatgtaagaatgcggaagccagagtaactcactcattaagctacacttgtgtaacagttactgtaaatttcactacagctctgcactgaaatgatttgtgactctgggcactgtgtcttctccatacttgaacttcctcatctacaaaatgaggataagtgataacaccttacctcatggtatattaagggtgacaaagaaattgcaaagtgatttgcaaacatgaagtgtcatatgagttatgtatgttctaattatccctcagaagaccccccgctggaatggaattctcacatcaagtgtctgtgcctcgctgctgaaggataacccagagtgcaaggtcatctttgttgctgaacagggctggacctgtcgcacttaagcacacttaaaggattctattcttcattcaggtcccccagagaaattggctccttatttttctttacctattcctagacttccttttgtctagagccagttttgcaaagggcacttttatccatctcagttattcccagaggtgacagaatgagtaaaccatatggggcaaatagcatatatgagctaaaccagttaactgttaaccaaggcacatggtcaatgccttagtatttttttttttaattctcctaacgttatttctagctgtacattcccaaaaggaatgggtggaagcaaatcagattctgaaaggtttcaatgatctttcaagtttaggatgagaccaagtctcaaggagctgggatcttctttctcttgtcagttgctgaagccagtagcttcgtcaaaaacatatgaattcatataaggaagccctttagatggtacattcactaagacgtgtctgggtgtgatcctgtttgggaaaaacagaatcctaggttctaaacaagaaaagaacgcccttcccaaagggtccgcacactttctgctttgcagcggatcaagtgtccttgtgagggtgagacttccttcaagggaagggaagccattgctctct

SEQ ID NO: 39432 - DNA, 2300 bp, Homo sapien
ctggtctcaaactcctgaccttaggcaatccacccatcttggcctcccaaagtgctgggattacaggcttgagccactgcgcccagcctaacagaagttcttggggctgcctaagtcagagtgtcaggtttctgttgggctgcaggaacccattcagggctggctagagcttgtgcctgattattctggaatctgaatgcatcctagtaaaatggtatttggaagagagtagaattggtataggtctccaaaactccaacctacacatctgcctgcaggtgtgtattcagattcccttaatctcctatatttccatccttcttcatccttcatcaaagctgaccttttcttatttggggaaccactttcatgctgaagccctaaagcatacgctgagtctgacccttggaacatcaaaatcaagtctcagatttttctagcctgcaggtgagcagttcagaagcttatttccaaacacaaacgctttagatagttggaaaagaggaactgaaaataatggtcttccataccctatgacaacattttagagctagaagggtttttttttaatagtaatgttctcagtcccctagtttacagatggagactcaggagagagggctagaaatttcttgctactaaacagtgtggcccaatggattggtgcaccctggcataaggaatatgtttactgcaccatagcctcattgaaggtccccgccccggccttttttttttgaagcattcacctagggagacataggtaggatgcatgtctacacgtaggaaatgtgcagactagatagcaagctccatggggcaggaaccatgaagggccttgtacctgagcatacccccagtgcctgatgcagggcctagtgcacactcaaatgttggttgactggccgggtgcgatggctcatgcctataatcgtagcactttgggaggccaaggcgggcagatcgcttgaggtcaggagttcgagaccagcctggccaacgtgacaaaacccccgtctttactaaaaatacaaaaaaatttagctgggcctggtggcacacacctgtaatcccagttactcgggaggctgaggcacaagaattgcttgaacccgggaagcagaggctgcagtgagctgagattgcaccactgcactagcgcctgagccacagagtgagaccctgtctaaaaaaaaaaaaaagttggcagactgaatgctggaaagaagaaggacctggctttgtccccacaccaatctggtgggcgagtacagaatgtaaactgtctggaggttggcattggcctagcttctccgttgctctcttgttctctagaatccaatcaagcacctgtggccagagagctgtgtgaaatggaaaccagtcccaccagcccctgattgcacccccgcaatgtcttctcgccctgtttaatgtcatgtccaaactcctggccgccgtggcctgtctccacctctccagcttcctcgcttggcctgtctccttagctctctctgtctcacccacactggcctgcaactcgccagagtgccccaggcttttcagcttttgcacgggcccttccctctccaggctctctcccctggatctttgcttcagctgctccttcttgacatccaggtctcagaccaatggccccttactcagaaggcctagcgcaggccgcctaatttcacacagttctcccccttcccgcactgccttccatcacctcgtttcattttcttcgtggcacggagcaccatctccaatggccttgttcatttagttaatttattttccgacttagttccaggtgctaaaacagtgttaccttggcaggcttcccatcaaatattgttgcgcaaaggatggatggatgaaaggaagagtgagccaataaacgagggaacgccgggaaaggcagcctcaagccggtgggccctgccacccccaccgtccctgagcatccgagccggttcccgcccccggcccgaactggcccgcgcgcgctcgcagccccgcggcggaacccgagggcggcggcagcggtttcccttgaacgagccggggaatctggagggagcacacaggaaaggcagagccgcgagctggaccagccgtggtgagtgcagcggcgcccaggcggggagcgcagtgcgggtcgctgggactgagcgcgcgagcggggtgggagtcgggatgggggcccggggcgctgggcggagcctctggagtcgcgctgggccgagagccgcggggacccaagcatcaggggtcgtgggtgcaggcggcggcgc

SEQ ID NO: 39433 - DNA, 2300 bp, Homo sapien
actccttcgttactttagtgatttcctcctcattattcaaggctcagggaagacttcattgactgtgcaccaccccctcagccctagaccaggttaggttcattcttgcagactctcacaaagccttgtgctgactcctcgacatttatcccactgtactgcaatcataattgtataattgtgttagcattgtgggtttgacagttgtgagcacttgagagaacgcatgagacccattcttctctgccctcacccccagcacagagcctaccatataggtgtttattaaagggctcttgaatgaaggagtgatttagggccagatggagaggagttcaagaattagttgggcctttggaatcatgtgtcagcctgacggtgtatgggattcacaggaagatggtctccctggcactggcttcactgctgcttttgataaggatgtttctacccttgagaggaattttaaccaatgggatttaaagggagtcataaaagaactggacttttaagtggaaacagttttttttttcttggtctatatacctcactaacagatagtcataaaaaaattttgcttaaatttttgtttatctagaaaataagttcattttcaaaaacttagaaagtacattgcaattttaaaaataaacatcacccaccattccacaacctagagggatctactttaaaatttcgtttttgagccaggtgcagtggctcacgtctgtaatcccagcaatttggatggccaaggcgggaggattgcttgaggccaggagtttgagaccagcctgggcaacatagtgagaccttgtctctaacaaaaaaaggaaagaaaaaaattagccaagtgtagtggtatgtgcctgtggtcccagctacttgggaggctgaggcaggagatttgtttgggcccagaagttatagtgagctatgattgtgccactggactccatcctaggtgacagagtgagaccctgtctaaaaaaaaaaaaaaaaaaattgtttttgtttaattgtattggttttctttttaaatttatactcatgtttgaacataattggtataatgccaattatatatggctttttatcctgctaattttacttaacattatgttttgggttttttcccccatcagtaaaaattttgggtaaaaaaatatttaattgctatttaacttattcattgaacaaatatttcttaaacagctattgtgtgccggatcttactttaggcatgggatacagcagtgaccagaattatgtccttactctcatggagtttacattccagtaggattaggctaataaatgagcaaatgaatataagcatcaccaaataataaatgtcatgaagaataaagatattctatagtgtcactctgttttttagtaaagtcttcctaatttaccttctttaaaggagtgtatgagtgtctatcattttgttatgtcatcagtgaatatgatcatttaaaaatttattttggtcaataatgatagttctttgtaatatgcatgtctgattattcaggaagttgaacatttttagatagccatgtacattgcctcttcattgagttttctatccatgttttctgtttcttttcctattgaggacctggtattttcttctattttgaactcgcccttcatattattattttttgggacacttacattatgatggatagacaaatgtatactcttaaacagtggtacagtgaggctgtaaggagttagaaaaaccagaggaagcctggaattcccttcctctctttctgcccctccctcttccttctattgcaatgaagaaatagtgatcagagagggaagaagtataggttaggtggaaatacgtgaaggaagaaagaaaggtggatggatgtgtgggtggatgagaagatgaagatgatggaaatagaagggagaagatgagctgaggccagaggagaagtggtaaggaggaagaggagtgagtgggaaaaaaaggagtgagagaggataaaagaatggaagacagagtaatagggacattacatgaagaccatggataaattatatttttttctctttccgcctctactaacctagcaaatctctagaagatgacggtgttctttaaaacgcttcgaaatcactggaagaaaactacagctgggctctgcctgctgacctggggaggccattggctctatggaaaacactggtaactatctgacagccccatcccacctttgcatctgcagcaaaacagccccaaagggcctcaggttaaaatcttgctcagctgt

SEQ ID NO: 39434 - DNA, 2300 bp, Homo sapien
ttcaccatgttgaccaggctggtcttgaactcctgaccttgtgatccacccacctcggcctcccaaagtgctgggattacaggcatgagtcacagcacccggcctcagattcatctttatgtcgaagcttcaacatcacttcccccaggaagtcttttctgtctctcctagagtgggatcaggcaccctccagtttgctccaccatgccccattcttctcccatcatggctctgtcaggctatattttaatcgctttctcccactagcctataaaatatacattgggcaagccccacctggcctctgtgtggtggaagaacaagttgggagcttgaagataaccagtgggaaagctgggaggaaccggcacgtgctttggcaccctttcctatctggttgctgttagactttgaagagaaatagcgattggagggatgcaaccagccttggtcacttggtgcctctcctcctcatgatttgggttgcggtggcagaggagtaggcgtgggtggcaaacaggacatgttcagttcagggtcgcctttatcctggcatggggtaggggaatggtatcagtgcaggagtgatgccttggaaagggaaatcctctccgggtagtgcagacacagcttcggagggtccaggacagccctggcttggacaggcagagtgcagaggctgccctgaggctcgggtataggtgcctctgaaggctggtggttgttaaaccctagcacgcagcccgagagtcggtgcctctctcagaagtgctcttgcctgcctccctgatgggtgatgagctctttcttctggcactttggcatggaaatgacctttcacaaagctcacaaggcccagggtttgaagcctttctgtttttcaaagcaacagtagtggccaccccatattggctatttttatgtgctatttcatgttttgtctcaggcggtccttaaagtaaccctacgaggtaggtgatgattccgtatttcacagttaaggatagtgaaccggaaacattagctaactttccccagatctccctgttagtaaatggcagggccaggattggaattcagctcttcctgggatcagagcttatgctcttaacccctatgatactccttggctcagtgttcctagaaggcaattcaggggttgccagttagtgacagaaggaagagtggggccagtcgtggtggctcacgcctgtaatcccagcactttgggaggccaaggtgggcgaatcagttgaggtcaggagttcaaagccagcctggccaacatggtgaaaccctgtctgtactaaaaatacaaaaattagccgggcatggtggtgcatgcctgtaattccagctacttgggaggctgaggtaggaaaatcaaacccaggaggtagaggttgcagtgagccaagatcacgccacagcactccaacctgggtgacagagtgagtcagactccatctcaaaaaaagaaggaagagtggtcagaggtgaagtgcagcaggggttatgccaggggctccttcctacctgtgacttctgcagacacctcactttgcacagtagcagcccccatagatttgggatctgactggggactgtttgctcatcatgttattacttaacagtgcttagtaatgttttcgagttgagttttcttattgaagcagatgcttttattctggtttttttaaatttaaatttagctttgtttcctttgcattgttctcctgagtaaaataatgatcactcaactcaaacatcagtgtatcagggagctgttgtattatagaaatccagtttaaaggtaagacttttaaagtgaaaaacatcattgtgtgtggaaataagcatcctttaatgtatctgtttggatggactttagaatttcagagaaggagattagataccttttgctatatttctaagaagctgttcctcactctttctcctccctattcccctcaattttttcagatcacacacccagctggctgcatgtctcagtttataaagttctttggagaacagatcctcatcctctggaaatttgccttacttcgaaagcgcattttgatattttctcccccacctgtgggcgtggtgtgctatagaggtaaccagaagccagagtcaggagtgctgcttaaatccctggagcagaaactgcttgagtctttctgtcactgaccaagtttggaagagcttgggccacatccaggggatggggttttaagcccgggagtgaactgattggctgtgaacactgttgacaatgtagaagatgggttgga

SEQ ID NO: 39435 - DNA, 2300 bp, Homo sapien
ccacaatcattatcttctgagtaacaatacatgaaaaggtgaatggtgcaagtttctaacagtattactgccgataacataagacctcaaccattgcaatggcatagctgcctccctaggcaaacaatgtagtcataaataagggtaatcaagaattatagcaagggagagagaaaaagcagcaggtgatagaaaaaaaaaaagaaaacctggtctacttgggtaatacctaataaaccagcccctgtgccctgtctacaggacaataatatagccagtgttttgagtcagtcctgttttactgagagcaaagccagcctctagctgcctggagaggcaggaatgacaagccatggcatgtgaggggaaattcatcaacaccaaggctatagaaaagaaatctatcatctggcttgctgatttgtaaacaagacactcctaggctgagaatcccagttgataataattgcattactggtaacctatgagttctcctttttctttgatgattctgtttttactggcccctgtaggatactgaatctctgacaaaggtgggcagtgagttactgcattttgtgagcaatattttaccccctgttgaattatctgggatagtttgtgtgggtgggaggctgtagggaagggccaaggaaggatgaattggtgtgcccacctacaaagggctggagcatgagaaggctttgagctgaaaaaacactttgaagtctccccagttagttttcatttggattaccctcctcaggagttctggctgggaatggggaaggaattaggagaaagtggtggagagatctgtgaaaagagggaaatggaagaggggtgacaggtagcaaagactataaagagaagggaaataacatttgtttcaaactcatcaagctggccttggttcctgtctctctttgggcccatgtttatcatgtaaataattccctatttgcagtccctctgaagcctccttgaggggcatgagtgtatcattttcctttttcatggactgcctctcacatagttttcttctataatgtgatatcagtgaggcctttttcctttgatatacctatacattgtgtaatgattaccaaaaatttaccacacccatatgcacccatgctgtacatcaggtccccagaattgttcatcttatacctgaaagtgtgtaccctttgatcagcatctccccatttcccctgcctttccagatcctggtaaccaccattctactccctccctctaggagatcaactgtttttgattccacatataagtaagatcatgtagtatctgtctttctgtgcctggcttatttcacttaatatccccctggttcatccatgttatcacaaatggcagcctttccttttttatgactgagtaatattctattgtgtgtgtgtgtgtgtgtgtgtgtgtgtgtgtgtgtgtattcaccacattttctttattcatctgtccatggctatttaggtggtttccatatcttggctgttgaggataatgctgcaatgaatatgggtgtgttggtatttttttgagatagtgattttatttcctttggctatataactggaagagaagagggacagcttgattgtataatagttgtttttttcttcaaagagttttccatccttctcataggggcttctctgagaaagaaattaaataatgtgtactaaagatattaaaaagcattttacaatataaggcatttttggcagaagccattgctgttttccagtgatcaatatctgtttctatggtttgttgatctttctagcctttcttttgtcagtttaaatttttgttcaattccctagaagctttaactgctaacagctaacagctgcaggagggagatgcctgaattagggcaggtgtgtttggcacagagctaagctgtgtctctgtcagggatacaaactccagtcaagatatgttagaggctgtttaaggatcattatgatagccaggtgatgctaaattgtaattacctgctgttagctattgggtgggtggggaggagaagggaggagagggtgatatttataaatggcaggtgtaaggagtgaaaataatttcttttcaatattagcttattcccaaattggctaatgggtatttttaaagccatgctaaattaaaggaattcaattttctcactagtatttggtaacacatgggagactatgtgtcatatccagaagagttctgtacatgaactgcatttaattgctccgagagtcactggagctttctttaatcagaatggaaat

SEQ ID NO: 39436 - DNA, 2300 bp, Homo sapien
aattattgactatagtcaacctattgtgccatcgaaaatagtaggtcttattcgttctatttttttgtacccattaaccatccccaccttccctccagccccccactaaccttcctagccccaatttttaaaaatacataagtacacatatacacaggggtgcatattcttccttgtgcctcaggctccagtctggcttggatcctgtattcagttaaaattttaatacagtcatgcacttcataatgatgttttggaaaaagactgcatatacaacagtgcatatacaaaggtggtcccataagattacaatggagttgaaaaattcctatcgtctagtgacatcatacctgctaaaacatcagaatgcaatgtattactcatgtgttacttgatattaataatgactatgtcactggtttatgtatttactatactttttattatattattatttaacttattttttaaaagttaactgtaaaacagcctcaggcaggtccttcaggagggattccagaagaagacactgttataggagatgacagctccctgtgtgtcactgcttctgaaaaccttccagtgggacaagatgtggaagtggaaggctgagattgatcataatgaccctgtgtaggcctaggctaatgtgtgtgtttatgtcttagtttttttaaaaaatggctaaaaagttaaaaaaaaaaagaaaaaaagcaaaggtagaaaaaagcttgtagaataaggatataagaaaaatatttttgtacagtggtacagtgtgtgttttaagctaattgttattacaaaacagttaaaacgtaaaaaaatttggaagatttataaagttatagtgagtgaaagtttattaaaggaagaaaagtattttttataaactgagtgtagcctaagtgtacagtgtttatgaagtgtttagtgggtacaataatgtcctagaccttcatgttgggccaccactcactcatttactcacccacagcaacttccagttccgcaagctccattcatggtaagcgccccatacaggtgtgccatttttatcttttataccgcatttgtactgtaccttttccatgtttacatatgtttagacacacagatacttaccatgaattacaatggtctgcggtattcagtacagccccatgctgtcaggtttgcagcctggaagcagcaggccacaccacagagccgaggtgtgtccaggctccaccatctaggtcgtcaaagtacattctgtggtgttcgtacagcaacaaaatcgcctaatgacgcaatcctcagaccttaccctgttgttaaggtacacatgactcttattttgttcctcccggatttcctgcattaatttttactttttaaaatattacattaatatattatttgattgccagtttttctggtgctcccttaaattgcacagcctgccagcccttccctggctcccctttctttttctgcttttcttagtgcttcaacagacctgggacgttctttttctttctttttttttttaattttcttctttttttctttttcttgttttgttttgttttgttttgagatagagttcgctctgttgcccaggctggaatgcagtggtgcgttcacggctcaatgcagcaacgacctccagggctcaggcgatcccccgacctcagcctccggagaagcttggaccacaggcgcgcgccaccacgcccagctaattatatattttttgtagagacaggtctcactatgtcgcctaggctggtcacaaatgttgcttttttttccctccaggcagagctagtctctgttttgcctacctcgccccctcctgggcccagttagaaacctcatcacataatttcatttctttccaaacttgaaaccttctaaacttgaaaccttctaaacttgaaaccttccaaactcaccacttggcggcgttgatccatccgcccgcgcacaaagagaagatcgcggaacttcagagttaaggggagccgtttcccgcagcgctagccggcagtatttccaaggcgcaagttgcggagtttctgtttcctttttcctctggcgagctttgcgttccctgtgcgccggaagtgatcccctgcgtggctgggctgctcgggttagatcgtcaggtgagggaggaagggatagccagcgcgaaggaagtgctggagtcgtgtgttttggctgcgcgtgatcctgcgtgggtcgggaggtgtttctgtgtaggtgtctggccctttcatcagtcgtgcggaggaccgcgtgatttccttcca

SEQ ID NO: 39437 - DNA, 2300 bp, Homo sapien
tgttttggaaaaagactgcatatacaacagtgcatatacaaaggtggtcccataagattacaatggagttgaaaaattcctatcgtctagtgacatcatacctgctaaaacatcagaatgcaatgtattactcatgtgttacttgatattaataatgactatgtcactggtttatgtatttactatactttttattatattattatttaacttattttttaaaagttaactgtaaaacagcctcaggcaggtccttcaggagggattccagaagaagacactgttataggagatgacagctccctgtgtgtcactgcttctgaaaaccttccagtgggacaagatgtggaagtggaaggctgagattgatcataatgaccctgtgtaggcctaggctaatgtgtgtgtttatgtcttagtttttttaaaaaatggctaaaaagttaaaaaaaaaaagaaaaaaagcaaaggtagaaaaaagcttgtagaataaggatataagaaaaatatttttgtacagtggtacagtgtgtgttttaagctaattgttattacaaaacagttaaaacgtaaaaaaatttggaagatttataaagttatagtgagtgaaagtttattaaaggaagaaaagtattttttataaactgagtgtagcctaagtgtacagtgtttatgaagtgtttagtgggtacaataatgtcctagaccttcatgttgggccaccactcactcatttactcacccacagcaacttccagttccgcaagctccattcatggtaagcgccccatacaggtgtgccatttttatcttttataccgcatttgtactgtaccttttccatgtttacatatgtttagacacacagatacttaccatgaattacaatggtctgcggtattcagtacagccccatgctgtcaggtttgcagcctggaagcagcaggccacaccacagagccgaggtgtgtccaggctccaccatctaggtcgtcaaagtacattctgtggtgttcgtacagcaacaaaatcgcctaatgacgcaatcctcagaccttaccctgttgttaaggtacacatgactcttattttgttcctcccggatttcctgcattaatttttactttttaaaatattacattaatatattatttgattgccagtttttctggtgctcccttaaattgcacagcctgccagcccttccctggctcccctttctttttctgcttttcttagtgcttcaacagacctgggacgttctttttctttctttttttttttaattttcttctttttttctttttcttgttttgttttgttttgttttgagatagagttcgctctgttgcccaggctggaatgcagtggtgcgttcacggctcaatgcagcaacgacctccagggctcaggcgatcccccgacctcagcctccggagaagcttggaccacaggcgcgcgccaccacgcccagctaattatatattttttgtagagacaggtctcactatgtcgcctaggctggtcacaaatgttgcttttttttccctccaggcagagctagtctctgttttgcctacctcgccccctcctgggcccagttagaaacctcatcacataatttcatttctttccaaacttgaaaccttctaaacttgaaaccttctaaacttgaaaccttccaaactcaccacttggcggcgttgatccatccgcccgcgcacaaagagaagatcgcggaacttcagagttaaggggagccgtttcccgcagcgctagccggcagtatttccaaggcgcaagttgcggagtttctgtttcctttttcctctggcgagctttgcgttccctgtgcgccggaagtgatcccctgcgtggctgggctgctcgggttagatcgtcaggtgagggaggaagggatagccagcgcgaaggaagtgctggagtcgtgtgttttggctgcgcgtgatcctgcgtgggtcgggaggtgtttctgtgtaggtgtctggccctttcatcagtcgtgcggaggaccgcgtgatttccttccagttctcctcggttttcaggtggtggcgccatcttcggtaaagggtgtccacctctccctatggtgtggctggctagcccgggggtctctacgctgcttggtctttgttaacggagatgaaggcagtaatttttcagtaacaggtttcagatataagtcccttggtgatgctaatatttatggaggccttactatgcattaagaacttttttagaagtttagaaaatggcagtgaataaagcagatacaa

SEQ ID NO: 39438 - DNA, 2300 bp, Homo sapien
ttttgaagtggcagtactgttaatataaaaagcagaagtccaccaatcaaataaacaccaatccccagggtgctgttggctatctaatcctatcactaaacttaggagcagagggcagataagaaaataaagatatgagtacaacatactatagaatcaaactgctaatgagaacctgtgtcatgattctggaaatgtcatttgagtgctcagacaagctagacctcataaatcttacacagagatttataataacaatgtctcatttggggcacacaaaaatctactggagaagattaggaaaggattatttaacttggataattttttaaattaaacttttaactcttatttaaagacattttaatactgtaacgttagtgttaagaagcaataactttttcatgtttcacatttcaatacagaaaaaaatagattaaagatacatacaggttaaagtggggatccaagaatataggattaaggtggggaaaatgacagagtcatggaggaactggttcttcattggtcttcacaggaggatggggagtaggagagccaaagaagaatctacaggagctggtgcccgaatgtggtaagtgaggaaaaatggtagtctaagctggctcaaggtgggctagtgtctggaaaagtgaggacccatactaagtggaatgagaaggcattttctacatagtgaaatctctggtgaccactgagacttgagatgctctcttcagtgtggaaagatgggggaagaggaacgtttagcaacacaggaggtagatggtcaaaaaagcaactacatgccttaagaaaaaagttggaacaatgattcctacagtctttaggtcactaaagacctttaatgtcctctcactggttaaattcaagcaacacacacacattttaaaaattaatgattcctattacgtgtgaataaacctgaactttttttttgttttagtgaacataatttacactggcaaaatcgtccccaatcctccatatcaaatgagtatagaggtgggtgggtgagctcaaaggtcttttgcccctgtagttaaaagcctaaagaagtcttctgatcactgtggctgatagtaatacatctcagtattaatacagacaagtgactacctgtaatacaggtcttcgaaacatggcttctattttcttttcttacagtctaatctttaggcttttcctgaaggaaaaaaacaaaataagaaaaaaacattacctcttatggcaaaagtacaactcaccagtcctaaattcctaactatattcataatttttatgcactccaattttgtgaccacaacgtaccaacattcctgcacatctgatgaggattccttcctccctcccaaataaactcacacctgtatgtctttttggtcccaaataacttcctcttcctccaacccatcgacaaaattttgattctgagttaatcccacttccaatccactgtcttctcaaatttcattactatgcaagctcccttagagcagagatttgtatctgctttattcactgccattttctaaacttctaaaaaagttcttaatgcatagtaaggcctccataaatattagcatcaccaagggacttatatctgaaacctgttactgaaaaattactgccttcatctccgttaacaaagaccaagcagcgtagagacccccgggctagccagccacaccatagggagaggtggacaccctttaccgaagatggcgccaccacctgaaaaccgaggagaactggaaggaaatcacgcggtcctccgcacgactgatgaaagggccagacacctacacagaaacacctcccgacccacgcaggatcacgcgcagccaaaacacacgactccagcacttccttcgcgctggctatcccttcctccctcacctgacgatctaacccgagcagcccagccacgcaggggatcacttccggcgcacagggaacgcaaagctcgccagaggaaaaaggaaacagaaactccgcaacttgcgccttggaaatactgccggctagcgctgcgggaaacggctccccttaactctgaagttccgcgatcttctctttgtgcgcgggcggatggatcaacgccgccaagtggtgagtttggaaggtttcaagtttagaaggtttcaagtttagaaggtttcaagtttggaaagaaatgaaattatgtgatgaggtttctaactgggcccaggagggggcgaggtaggcaaaacagagactagctctgcctggagggaaaaaaaagcaacatttgtgac

SEQ ID NO: 39439 - DNA, 2300 bp, Homo sapien
aaccgtattgtggaaaagatttccagttgcctacctgttttaagatgtacctgggacttgccttaatcatgtatggtaggagacaactgctttaatcatgtcacggagacagctgctttaatcatgtcacacagacaactgctttgaaagaagagtcttttatttcacagttcccaataggaggttgcatgctatgccatgcaaggccactcagggatgcactggagttggtcaggaggaagaaggaggggggaaaacataagccagaggctttgttgtgtttttcatagggaagcaatgagtaaggcaccagtggaaagctaagcaaggttaggattgggtagtttgaataatttcagcaggctgcaggttctcaagatggtccctagttatcaggtgcctggccctggggtgattgaaggcaaggtcatagtgtcctgggctcgttttctacctaagcaaaggaggtagatgggaggggcagtgtggattcaggattggctggtttgcttatcaaaggagttttctcaggcaagttggctaactccaggaattagctaaccttgggagggcatgccctctctgggtctgcaaggcccaaaagtgtcaaagcataaaatacagaaaataaacatgattaatgcactacccagtatctattgtcccttctgtatttatagaacccagatgtgacagggtgcacagcacatgtactgcattcctgttcttttcagttaggggttgccaaggggctataggcagaagtcacttggtgatgctctcagggaactttctatatgagttactcttgggaggcgtatcctgtgtgcttccccagactctcgtcctacagcattttcttttttgtctgaaatgtggacatttcatggctggatttccagttgccatcttggaccatgaggcagtcttcagaatggaaggtagaagaagctgggatctgcaatcactatgcaaccaccataccagcctggacagtttgcctctggactgctttgggagacaaaaatatacctctcctctaagccatttacttgtgttgtgtacttaaacctaattctttcttattcatatattgttgactttatctccgtatacatgagcaactctttactcttatctttctcttacatgacctttcacggcaagtagaagtaaaatcttttctttattcccacaatcctttaggttttaaactaatgtctcattaaatttagggaagggagtaggacataaaaagtatacaaaccttagcaattagctttaaaaagagtcaacataagcatactttaatacaaactacgtactgcttaattctgcatatagtcctgaatgaagatccttaattaatagccgcttgttaaatagaggagctcttaggttaagaacagaagtattgttcttatgcctccctggacagtattatagcagactagcaatccagagtgggtctgagacttcccactgcaagtccaagttcgggatgtaagcttggccactttctggtgaggcttctcttgctagcttatagcttacagccatctctctgcatgtaagccaggctccaaggggcatgccttttaattctaatccatgatcaatggcactgaacttttacaattttatgcacttaaacctcactccaggtggatagtggctcctagtggaattccttttctgtatctctgagtcctccctcctgaggaatgagactttttactcttctgagtaattctgagccgcctccatttggtgccgctcatctttctgttttgggtaactcagagccctacaccctttgaaactgagtccaagtcctccatcatctttgtgacctagatctcttccttctctatgtgacactggacactactcatttgcattttagcaaagagctgcaaagtttaggttcattgatggaatatgacaatccatatcatctgtgaagaggacagactaacctgaaagagccagagaggatttcctaaattgtgctctacgacagactaaattgggcagagacaagagacaggtacagtgaagcaacaggtagaggagtagattaacgagaaaaatatcacatcagtgaggagattctatgtatcaacagaaagaacaaagatcagggctgcctaattgctgacatgatgggactcaccgagggggtgttcctgattctgtctggcactcagttcacactgggaattctggtcaattgtttcattgagttggtcaatggtagcagctggttcaagaccaagagaatgtctttgtctgacttc

SEQ ID NO: 39440 - DNA, 2300 bp, Homo sapien
tttgcagagtttttggtgcaggccatacagttcaggtacagtaataagagacccacagtagggtaagggtgggagctgctgcaaattaaaagcttcgtgtcccaaaagatccaatttattttgtggtaattttgtagacaaagcttctagggttgagtcaaggtacaggtacatgggaaggaagcccaatgcatgtagactccataagatacttattacagttcacttatagttccttccagtcaagatgcaattttccaatcaagagtcttttttttttttgttctagaaacatagttgatgttcttacccttatcatataaggataagattatccttatcatccttatcatcatgataaggaaaacagctaggaagtttaaccataggtcaaattctcatgcatagggagaaagggttctgctaacacttttcctatactgacccttgtggaaataacttctaactgaatgagctcattcattgattgtgctagccaaccttatcacatcttaattatagcacttcctcctacagagaacccaacaatttggtatagtacattctagatagagtttgttactatctaattctgggattcctgctcttttggccacatttatctgttatggcttactctatatcatttattctatttaaatgtgatgttagtaatatttcaacttcaccactttaatgcagccatctatggataagtaattggaaatctgtgctataattttccttttagtcatagtcttcctggctcattctgtttgcctgcttacctgatgtgggcatgcctctatcagtgcctgttagttttgaataaaaagcttctgtaagcacctgggcaccaggtcagagaatttctccaggctaggcttcctgtcatctgtcttaaagggcctcatgaatgtattcccctcttctggacctgattattattaaatcttagctcctttttcttgtctgtttctatttggacttggcagtaggactttgtgctgtaccttgatgctactttggtaacatctgtggctgcatccaggattgcaccttggtttcattcagctgctagagaagataagagatgccatactcttacattcacctatgggcctccataatatcatttgccagggatattttgccatttcccatctgagcaagtacagagaaatccagcaatgagatgcctagctgtttggctcacaaaactacaactaatgcattactgtgtatctcattccagggtacctggattgacagttaaatgcctaagagaaaatagccacatatgatctaaacataaacccagatttataaaggaaacacctacaagggctgacttaattttttctaaggaaaaccagaacatagcaaatggttatggcacaaatctatgtatgtagatagagaaggcaaagcaaagggcatcagaaagaatgggattaattgagaaaggttttctcaaggaggtattgggtctttgaacttgatctattagatcactgtaaatcgctataggtgaatcactgaggttgaaagagtggcattggcatggccaattggtgaaacttgttgtggcagcaacagattagaggggagagagaaattggattctggtcatccatgaatatgtggctaggaggtgggtgggtaggagtgaggaattaggatttccaccatattctggcatttttatgaagaaaaactttaccgtaaaacattgacagaaacattgctggactcaagctctctggtttggattctaagtttttggagcctgctgtgactcttccctctcgccctcctgctcttggaggagtggactcccagcatcacctaggcttgctgtaattaggcatttctaaggagaacaggatactaatgaagaaatagtaatgtaatccttggaagatttgcatctcagtaaaatcaggtggcccttgatcatgaatggctcatttgccatgctgggaaaaattaaaaaggagatgtccttcctggctggatactggtgtctgcttatacattttggtatttcttctgcctccactatcagcaccacaactgctgaatcctcaatgagtaaagatgcttcggttattctatttctctgctattattgcctcagttattttaaattttgtaggaatcattatgaatctgtttattacagtggtcaattgcaaaacttgggtcaaaagccatagaatctcctcttctgataggattctgttcagcctgggcatcaccaggtttcttatgctgggactatttctggtgaacaccat

SEQ ID NO: 39441 - DNA, 2300 bp, Homo sapien
tgcatggagatcatgacctttgtcccgctgacttcttgtagctgaaaagactgggtttttgttttttgctagtgtctttcaagatcactttttatttctcagctcttgttggctggaccctttaaaaacccttaacaggaaacagcaacatcctgcatcccattttaaatctgttatttttatagattgctgtccagtgaaggagactgattgctatttgtgatgtttctgttccacttgtctttttgtaaagacatcacaggaagatggaggaccacacagctgtcaggaggaggctcaaaccaaggtgctcatcgctctgaacttccccctttacatggtttctgccttggccagacacttttccatgaccttctaatctccctctgatctcaccattcttgccatctctgcaacactcatggctgtttatacttcatttccgtctattgtaatggttatgaggaatcagacttgtcagagaattctgtaggagatgatatgtacatggaaatcctagaggccatgacttggaagaaggatctaatcaggcccttaactgtatcactgacaacagtaaaaataactgtagattttagaaaaatgaaatttttattctcaattctcctcatttcttctttgattttgaaacaaaatgaaagggtaacatgaaaaacaggctagaaactggagcttattgctctctaagcaatgcaaatcacatcattttaataaactacagaagtcaaaaccgagttttcatattttgcatgggaagtatcacatttttaaaaattactgcagataatcaagttttctttgccaatatgctatgtttttgataaaaggaagtagaaaatagctatagtttgaaaataatatattttaaaaagaggtgagcctgtatattttttaggcaagcacttttcttaggggaattagctaaattattatctcaattttctatgtagtttagcctctcaacaccggtagtaaagtagtcaaaaacctacctttatatttctggatactttggtttttttgatgccagactagctttctggaaacgtgtcagttggctaccaggatcggtggcaaattccactgccaggctagattggggcaggtggggagagagaggcactatgtctctatcagaaagtcactgaagaaacactgtttttggacgagttcaagcctcatctagatttttagtccagtagaagatcgcgaccacctctgcccctccatagcctacagccagagttttagagtaccaggccttgcagcttggtggagatgatgtacaatggatgctacctggaggcagggactgtgtattataatggcgccgtcccctgtgcctagtacaccgtagtttgacacaaaataagcactttgtaaatttagtccgaaggaatggaaatctcatcctacaatccattcagttattaatagagcaactgaggcccagagacgggcagtggcctgcctgcctacagcttcgtagagagttctcagcatgcttactttttttttttgagatggagtcttgctctgtcgcccaggctggagtgcagtggcgcgatcttggcccactgcagcttccatctcctgggttcaagtggttctcctgcctcagcctcccgagtagctgggactacaggcagccaccaccacgcccagataatttttgtatttttagtagagatggggcttcaccatgttggccagggtggtctcgaactcctggcttcaggtgatccacccgccttggcctctcaaagtgttgggattacaggtgtgagccaccatgcctggcccagtgttcttttcatgaaaataaaatttctttttttatatagcatatgagctcataactggcactgtatagcacctgagcatgttttgatttggtctttcttgttgaggggccttgttacgttataccctggtgtctagactttggcccaaaacctttgagatggagagccggtgtctgtggtactgtttgcaatctctggttctacactcagggttcattcatgtagatgcaaatacagatggtatcataacttccaacctctctgttcctcatcacagctgttcagtctcgcttgaagacagattacggaaggacgaggccaaatccagattttgtggtgtgaaaatttaccctggtgtgttatcactaccaggggatctgacctcagccaggagcagtgagagcctcctctccccagccatgctgagcgctggcctaggactgctgatgctggtggcagtggttgaatttctca

SEQ ID NO: 39442 - DNA, 2300 bp, Homo sapien
aatttatgagtacgtatttacttataagctattcggtaccatgctagatataacacatagcataatacatgcacatacacataacacatttaaacatgtttatacatatacatgcaagatccgatagcttttaccaatagcttttggaattctagcttcacaaactcattactatataaaagacagctggatccagattatttttgataaaattgggacctgttcacatggctaaactttatttgccccaataggtaacccaaggaaagcagtggatcaataatttgggtaaagcagtttctatggcagtttgatttttaaaaacctcctttatccattttttttcagttccaaatgagtttaattctttacattttagctagaactggctgaaccatatgaggaaaaaaaaaatctcaaattgaccttgaattagtgagttttatctcaataccagtaacttattaacagtagattcaaagcaggcagaaaaggaaagagaaatagagagctttagaagactctacttaactctatagttgtagattaaacatttgagctctgaatttttcttgttgtaatttgcccgtcagttttaaaatgtacacaagaaagggccataatatgtaaccagctggaggattagaaaaccatgccttttagcttctgctggagtttctaccctttctccctttcctgctctaatgatttgtgattagccagccttattgcaataacaccacatttactatcattatcatactttaatatcttggcttcttggcaataggtattcagtccttgcccatgttttccaagcatccctgtactcatgcagtggcccacaaaagttgtgcagttgggcaactccactccacatggacattgccgactgcccagggattccccaccatagacactcattcctggctcgaagtttggtctctctgaccccatttgtgatgccaattgtaacaagaaaaatccagaatcatatttttaaaaaaacctttcccccaaactaggagggagccaagagaccaaagaatgactcagacaagtccagcttggccagtggataagtttattaggacttacatatgagacactcctagatagcagaggacacctttagagacctgccctgctttccatctctaagctgcttttaagctaattttctggctctttgcctactgtgtgtgcatgatgggactgttttccttgataggttctcaggtattctctgggatgtttgggtactcaaggacacctgctcctcagctggacaccatggcgttgactcaccacttggccatcaaggatacctgcttcttggctgggcaccgtgtccttgactcactacttagccattaaggttcaagcagtggtcatacacccttaagtatcctggtgggggacctgcaaccctacaccagtgacaaggcctatttctcattgtccacgacatgtgactttgggaaaactacttagattctctctgcttcagttctgccacccacagaccagaaatagataccagacccagccctatctcttctttctagggttgttgtgacatttggaaagagattatgggtttaagaaactttaaagggttagagtgatacaaagtgtagtgaattttacatctcagactaacctgatataaaatctctactgacaagtccgtaaagatcttagctcagtgcctaggattcagtaaatgcttagaggatatcagctattagtgttaccgctcattttcttgttagactatgctcccaattatccaaggatgactttggtagtctaatattggtctaagtctttaagtattagaggtactgccttctgaattgtcaccaggcctaatgtcatctagactgtaaacaattccccaactatcaagataactgttctatgaatgcttttcatttccatattttcttggctcaatgctgttgctcaggacaaaaaacaccaagttggtgatgatgactgagtgatgaaacagtgatcagagggacatatgaagctagtgtaacaaagatgggaggggctggggaaagtataagtaactattaggaggttcagagcaaacctcaggacacttactccctgagctaaggtaaagaatattgtccctcatagccctggtctcagaaactctgtggggaagataagtcctgagcctagagctgccatttccacagacaactgaactaccttcaaacagatgtgtttttaggggcagcagatagaaggagctgaatccaggagtttccttccctgaaatg

SEQ ID NO: 39443 - DNA, 2300 bp, Homo sapien
gtgtctaataacaatgtagcacagtaatgactgtacatgtcattgtatgtataccaaacaagattgttgtaaatcatattttttattacaacactaagttctgcttctgcattcctaggtttcatcatttttggctccttagcatggccacttacaattttttaacatgagataacacatcaggtgtcagaacttgcttgaagggaattaccagaagtaatttgtgtttgagatggggtggaaattggaattatattagtagccggtggagatacaagttctctgactgtgttgggaaaggataagtgctaccgttgagaagggaagaaaggctgagtctaggtggagaaaaatatcaacagaactctagccaaaggcaagccccagaactcagacaacagaaaggaaatcctaatccttctgttttgagaagagagaactgtagttgcttcacttcctatttcatgacagaataactgcaaacttttaagatcaggaaatgtagacatctagtgatttctttagtagacagtttaatttcccccaagattaggagacacttctgtgcaggttctaaaaggagcccaatggcctggggtgggagtggggagtagatagggaatatgtgggatttggtttaagttcatcattggaagagttcctggatccttgcaagcttagataaatgtgatctttattagatagcagtggcatgctttaaaaaaaaaaaaggcaatgaaaatttagcaagccactgaatttgagttttcactttgtttctaatatgctgtgtgaatcagtacagttttcttaccctttcttggtcttaatttccttactgataaaatggggtagtaatacctatctcaaaaaattattgcacatattaaataacattcctctatgtatctcaatggcattagacattaggagaagcattttgtggaggatttgaagttgagatcttcatccaagaagtagcttttcaatttgctagaagcttaatgtaggcaagccacttcatttttcagaacttgtttactcatttataatatgggaataaaaatttgtgcaagtcagagaagggtgccttaaaaatgttgtggccaagccacatgagatcaaagacacacttttcatgacctcaaatgtgggcccagcctaggtcagccaacccccatccaacccttagactcacgaacaaatccacctgagatcagcagagccaccctagatcagctgaaactctaagcacaaaaataaaaacttatcactgtataccactggagttttctggttatctctcgtatagcaaaatctaactgatgcaatctccatctggccttcatccttctccctttattgtcctttcgtgtattgttcatccagcaaccaggatgatcttgttaaaacattaaacagattctgtcactcttcttcagccccctgtgatggttttccaatgtgcttctggaaagagcaaacatccttaaaaggctcagtgtggcgattcctcaaggatctagaactagaaataccatttgacccagtgatcccattactgggtatatacccaaaggattataaatcacgctactataaagacacatgcacacgtatgtttattgtggcactattcacaatagcaaagacttggaaccaacccaaatgtccatcagtgatagactggattaagaaaatgtggcacatatacaccatggaatactatgcagccacaaaaaaggatgagagttcatgtcctttgtagggacatggatgaagctggaaaccatcattctgagcaagctatcgcaaagacagaaaaccaaacaccacatattctcactcataggtgggaattgaataatgagagcacttggacaccaggcagggaacatcacacaccagggcctgtcgtggggtgtgaggagaggggagggacagcattaggagaaatacctaatataaatgataagttagtgggtgcagcacaccaacatggcacatgtatacatatgtaacaaacctgcacattgtgcacatgtaccctaggacttaaagtataattttaaaaaaaagagagggaggagccaagatggccgaataggaacagctccggtctacaactcccagcgtgagcgacgcagaagacggtgatttctgcatttccatctgaggtaccgggttcatctcactagggagtgccagacagtgggcgcaggccagtgtgtgtgcgcaccgtgcgcgagccgaagcagggcgaggcattgcctcacctgggaagcgcaaggggtcaggga

SEQ ID NO: 39444 - DNA, 2300 bp, Homo sapien
aacaaaacacaactttaatgttccaaagccctccaaatgtacatgtcttttgatccagcatttatatttctgataacttagcccaagaaagttattaaggacatgtaaaaggatgcatgcacttagctgttcactgtgcattgggaagatagttagaagagttttagaaaatagttagaatactaaggatttatgtttaagatgctgagtatcacgctattgaaattacaagcattatcttgctcatttctcggaacaatcctatgtggtatttactataattactcctatttatagataaagaaatggaaggtaaagagactcagtaacttaatcaaggatgttcagctagtgaaggtcagctccaggaatcaaaagcaggactgatttttaaaactttgttcttgtccaccacactttactagaagatttgtggttatgcaattgttaaagaaataatatacttttacacctgaataaataaatcatatagttttacacctgaatgctatgcacatattaaataatacattatcaaaatctatattttgacatgaaaagatatatataacatagtgttagcttaatcttgagcagatagattgcaaaacaatatgtacaatatgttcccattgttctttgtgaaccagtgtttttctgtctatctatctatctatccatctatctttctatctacctactcatctcgaaaggatacaccctgaggtgctagcaatgactataactaaatgtacaaggttataaatggttttgttttctcaattttccttgttaatattttccagccatttttttgtcatgagcacagtagttttcatagtagggaaaataaaagcaaattttcaaatttaacacgaaattaaaaactccttgacaataggacttgagtattgttcaccccagcccactgctgtatccagcagagtgccatgttcaagaaacactgaagagccaccatgaggtctggaaggtgagcaggtggtgccagagaggagtccatgataaaggggaatgagcagagctccagcaaatggagcaaatggaacagcaagaacctgctcattcatattagtgtcttcaactggatttcttaacatttttaacttgacataatttcagacttgcagaaatgttgtaaggaaagtacaaataacttccagctaccttttatccagattcaatgtttgttaaaattttactacatttctcttcccactgtatttcaaggagatttagacacagaggaagggtgaatctgtgttgaggtattttgttttccaaattgtccttaaaatgttcctctgcattagaactctcctggcaggaagtctgctcttgccaccactagggctagagagtctcttcccttctttgccccgcctgctccctttgccaagaaccccactgaacaggaagaggtatttcttggggatgctaccaaggcagagactgtgaagaaggaagaacgttgcttgggcaaaaggagcatattctcaggagacggggcccctgcctgccacaccaagcattaggccaccaggaagacccccatctgcaagcaagcctagccttccagggagaaagaggtgagtctgtctgtctgtcttggctgcatggactgttgaccaatgccaagaccttcagggatgcctgtcctgtctgtcacctacccctggtatttggaagactgaggcttctgacaacttaagtcagtatggtgaaggctacagactaaggtccttgggaacaagggtcatttcaaggataagggttctcaaaatacaggagagggtttaattattagacagaatttaggaggccacaaatagggcaaggctgaggcctggagtagggaatgagtgaaggagaggcagtatgccaagttccaaggctccaatcaatacatgattctttctgtgttcgcggcccacgctgggtcacctcctggtacctgtcaatgtcatgcctgtcttccaagcctgccttgctttgggtactctgagcgagaggctgggatatgtcctagtgaaaagcagccttgtacccgaattctgatgctgctgtgctctaatcttcacaggcccctgcagctccttcatcatgaactggcacatgatcatctctgggcttattgtggtagtgcttaaagttgttggaatgaccttatttctactttattgtgagtatttgagcaacctcttgccccagacttcatgttgtcttgctcattgactcttctctcagaatgcatggttgtgtgtaaaggttacatatccaag

SEQ ID NO: 39445 - DNA, 2300 bp, Homo sapien
gattaaaaattagtgatctcatggttttttccccaaaaaacaatgtgtgggtatttccttacaattgtgtgactagaagcccctttcttattattttcccaaagcaatgggcatgggcccccaatgctattgacttcatctctagtaacccctcagttgcatttgccattgcagatattggcttttttttagcaaggtttctgataatgtcgagtttaagagaagcattgcagtgcgaagccttgaacaagaatttagatttttctttagattttctagcagagcagaggtgtcccacaatgcatcagtcagagtactacccccaaaacttctgtggacatccttttatactatgacattttcttctcttttgatgatatttgaaagatctcttatacctctttgttataaaagattcacttgctatccaagtgtatagattttattaagttattcagaaagtctctgttaaaaactttctaaataataataaccaagtctcctgattcccatacttcctaacatagctggcataattggccatatttattgtccaataaatatatggatccttctggacagcaatctagggtctagaagtaattaccttgtgaccagataaatcaggttcaatgagatttttcaaaaacacagaggactatccaagtagaacaaaacacaactttaatgttccaaagccctccaaatgtacatgtcttttgatccagcatttatatttctgataacttagcccaagaaagttattaaggacatgtaaaaggatgcatgcacttagctgttcactgtgcattgggaagatagttagaagagttttagaaaatagttagaatactaaggatttatgtttaagatgctgagtatcacgctattgaaattacaagcattatcttgctcatttctcggaacaatcctatgtggtatttactataattactcctatttatagataaagaaatggaaggtaaagagactcagtaacttaatcaaggatgttcagctagtgaaggtcagctccaggaatcaaaagcaggactgatttttaaaactttgttcttgtccaccacactttactagaagatttgtggttatgcaattgttaaagaaataatatacttttacacctgaataaataaatcatatagttttacacctgaatgctatgcacatattaaataatacattatcaaaatctatattttgacatgaaaagatatatataacatagtgttagcttaatcttgagcagatagattgcaaaacaatatgtacaatatgttcccattgttctttgtgaaccagtgtttttctgtctatctatctatctatccatctatctttctatctacctactcatctcgaaaggatacaccctgaggtgctagcaatgactataactaaatgtacaaggttataaatggttttgttttctcaattttccttgttaatattttccagccatttttttgtcatgagcacagtagttttcatagtagggaaaataaaagcaaattttcaaatttaacacgaaattaaaaactccttgacaataggacttgagtattgttcaccccagcccactgctgtatccagcagagtgccatgttcaagaaacactgaagagccaccatgaggtctggaaggtgagcaggtggtgccagagaggagtccatgataaaggggaatgagcagagctccagcaaatggagcaaatggaacagcaagaacctgctcattcatattagtgtcttcaactggatttcttaacatttttaacttgacataatttcagacttgcagaaatgttgtaaggaaagtacaaataacttccagctaccttttatccagattcaatgtttgttaaaattttactacatttctcttcccactgtatttcaaggagatttagacacagaggaagggtgaatctgtgttgaggtattttgttttccaaattgtccttaaaatgttcctctgcattagaactctcctggcaggaagtctgctcttgccaccactagggctagagagtctcttcccttctttgccccgcctgctccctttgccaagaaccccactgaacaggaagaggtatttcttggggatgctaccaaggcagagactgtgaagaaggaagaacgttgcttgggcaaaaggagcatattctcaggagacggggcccctgcctgccacaccaagcattaggccaccaggaagacccccatctgcaagcaagcctagccttccagggagaaagaggtgagtctgtctgtctgtcttgg

SEQ ID NO: 39446 - DNA, 2300 bp, Homo sapien
tttaaaacaatctcaagatattgtttacgcttatcatgtttttgaaattgcaatcgctattagacatatcgctttattgttagtatgtcattaaagaggcacaaactataatttaaaaaatattatagtaactgtgtttcaatgtaattgattttctttgtatctcagctcactacaacctccgcctcctgggttcaagtgattctcttgccgcagcctcatgagtagctgggattacaggcacgcaccgccatgcccggctaattttcgtacttttagtagagacgcggtttcaccatgttggccaggctggtcttgaactcctggcctcaggtgatctgtccacctcagcctcccaaagtgctgggattacaggcgtgagccactgcacctggcctaagaattaattctaagaggggtttataagcatgtctcagctccataagttcttcttgcccactgccctccaaaaagatcaatgagaacagcaggcattgcagtaaataaagagttgaataatcacagtgttggccaaacaagagcaggcaaaaacttctcaatcccctctccctcaggattcaaaggctaaggtttgtaaagggtactttggtgggcatggggctggggaacttgtataattgattggcagggaatgaaatcacaggagcacctaaaactgtctttgtgcaactgagtcagttcccaggaggggtgtgtgtgttggcctcaagactaggtggtgtctgttggtctactgaaatgctaacaaatatctaaaagaccagttatttaggtttcacaatagtgattgatatggttaggctttgtgtcagaacccaaatcttatcttgaattgtaatccccataatccccatgtgtcaagggagggaccaggtgggatgtgattggatcatgggggcggatccccctatgctgttctcatgatagtgggtgagttctcatgagatctgatggttttgcaaagcagttttccctgctcttgctcactctctctggcctgccgccatgttaagaagtccctgcttccccttccaccatgattgtttcctgaggccttcccacccttgcggaactgagtcaacgaaacctcttttctttataaattacccagtctcaggcatgtctttatagaagtgtgaaaacagaccaatacagtgatgttatctttggtagttggggaagttatgaattttgtgacactggttgtgtgactggggcagtaagcaacttatagaaaaacaaactaagccatggcaggacattgtttatgcctattctttagcaaagtctaagcccctaccataattccaaccttgccttatgaatgcgcctttaagctccaggcaaggagggggatcattttcccttgactccaagtttaactataaactaaatccctctcataggtttcttggcctttgtactagaataagcaaaaagccaaccaaaaaaaaaaaaaatcccctagaaaacataatttagcctgggaggttagaagcaagatggagtcagtcttgttagatttctcttatttatagttctgcaaaggcagttcaagagtcaccagactgttaaaggatttccatactgcaaacaagcttaaggacaccttaaagaagaaagaagaaaactatttttaaaacatttttaaaacaacttccttccatcacaatcatcagattgtgctactaaacgtcagtgagttcctgagagattcggagtcagtgcaagagaccagggctcttttggaatactggggtcatttattttttgctctttatcatctacaaattgtgtctgtgttctcttaccagacatacagggtgtcctcaccaccgattaaacattcagtgcctggaggggatggagtgggtcatgggagctggcttttccttccaaaagtcttaaggatgtccttcttagagcaagaccacgattactaattaactaaaaattctgatcctggaaataaaagctggccattcatttgcatttgaaagccattaacattttcttgataggtcggtaaatagttaccagatctttggttgctttggtggactgtgctcctctgcttttattgctaagccatccttcagacagagagggagcggctgcaagaggtaatgaggtatgtttgtgaaccttgtattcttttacggttacagatgtgtgtctacaagtgtgtgtgaatttgagttgatctcttttagtcaaaatgcccttgttggccgggtgcagtggctcacacttgtaatcccagcactttgggaggccga

SEQ ID NO: 39447 - DNA, 2300 bp, Homo sapien
taatcctaagcgatgatccagtagtccctagcctgagggtgggtcactgttagagggtcacacgcctgtgtatgttatttttggccttttctatttgggctctgaggtcagaagctctccttttctcaatcaatatttgttgatacagttaataacttttaagtaatataatgtgttacggaattcacttctcttttacatcaatcctacatgataatcaaagtattgctcctaggaacatggtttatataataatttctttggaaatactatgtaagggaaattgtctagtgcatcgctactgaacatgtttctctccataggtctggcctgattttcctgatgttgttgtgaatgggtctctagactgggacagtcaagtggaggtaaagggtctttgtaaatttgggtggagtcagggtttctaggaaggggcagccgttcctgggaatgtggacatgcctgtactgtggacatgggcttggcaagggagaaacacttagggcatgtgtgttggatgtcagtctgtgtgcccattactttataggtagtcatactttactggccactgggatgtagacatgtattattatccttgggatttaagaccagagagctcagatgacttgtccacggttttaggtgacagagtgttgatttcaattccaaggctgtcagattacaaaggcccaagaaattcccactgggcgatacctcctagcagtgccatcttttctctgaactggtatacttaactgttgttgccttggttatcccttttaaacagtcttctaacctcaaagactgtttaggtctttttttggtgtatcttttttttttccatgaacacgtttctccctttccacacttataattcctcctctgagcccaatccttccttgggtttctcaactttgcttttacctctcagtttccagccttactgtaaaacttgctctcttctggggatggtttgttgcttgtaatggatccaagtagcccatgcttctgtacctgaatttttttccagattcactaagcgtttcttgcttgaatgatacatggctccttacaggtctaggaaggctacggccccatcctctggccaagatgtgtgtctcctgaactgaggcagcctgtgtgctttactatcaattgttgtgacagtacccacaggcaggattcttagtgcgggtccaagggcttcctggagaccaagtaccttgccctacctctggagctgttcttcaataatgcctattctttctgggcaggaattgtagcagggcatgtgtagcctatgtgacccccacagaaaagctggggagacaaggaaaaggcctcttttctagaacatctgccaggaattgaagggacaaagaagctgacttgtgcagtcagcaatgcggtatatgttgtagtgtctagatactctctcaggatcaagtattaatcagacaaatatccatgttgtgggcacaaatcccagcagctgtaattctgttagcagccactcagaagtccaggggcaaagacctcttttgggagttctttctacgtaatgtaagattgtatcccatggacagaggtgcaggagaaacattgatcaccaggaatgtgactggtgatcaccaggaatattggagttaggccaaatattcatgccttatccagataagctggttttcagggcaagtggtgagtcctagagggaaaggcagatattagacagaaccacacaatctggagccagggactgaggcctggcacagctctgatagggtagggagaacagatggtactgcaaacacgtgatgcatacttctctgttgtcagtctctggcctcctggatcccagagccagttggcagcagtagcactattgatttaaaatgagacacacttggcaccaggctgcttggctattggactgcatgtctttatttactgtcagtagatgcagtaaaacaaaacaaacaaaacagaagctggggctggttttgaagattggcaagaacgagtcagactcagttcaaggctgttttccttatgtctactactgaacaagtatctatctatctatctatgtatatccatgtacccatctatgtatgtatgtatgtatgtatgtacgtatctatctatctacctatctcagtctatcatatctatgtatctaccgatcaatgtattaattcatccacccactctatctatccatccatcctctatctatctatctatcatctacctcatctatctatatctatctatctatctatccactctatctactcagg

SEQ ID NO: 39448 - DNA, 2300 bp, Homo sapien
tgacccatgattccactcctaggtatattccaggcagaattttaaaacgtgtcagctcatagcagcatcgttcataacaggcaaaaagtatcaacaacctagatgtatatcagctgatacatgcctaaacaaaatgtggtctatccacgcagtggatactatccagacatggaaaggaacagacactgatacctgaaatggtgtggatgaactttgaaaatatcatgccaagtaaaagaagccagacacagatggccacatattgtattactgcatttatatgaaatgttcacaataggcaaatccataaggacagaaagtaggttagtggctgcagaaacagggggagatgggaatggggagtgaccactaattatttttgggggtggcaaaaatgttctggaattagatagtggtgatagtttcagaattttgtaaatatatttttaaaaacactgaattgtatactttaaaagagtgaatcttatggtttggaaattatatgtcaatttaaaaatccactttagctggcttaagaaaaattttaaaaagatattggtgactcattgaaactccggtaggactagagagtcaggtttgtaggccatgtggctagggacaagccccaggttaccctgtagcggtttctactgccactgccctgagcacatatctggcagctcgcaaccccaaatactgagcataggatgccactaggtctcttgtccctgctgcctctgaaacgagctatgcttccaacatcctggattttacatggtacctccttatctacaccttcttctggatgtaagtcactcacaggaatatctcattcacaaagctccagccacttgcctctaccttggatgaaagaaaggctgtgaaagagaatttctagctgtttctttggggaggcagaatttggagaaaaagtccttaagttgatttaagtaagaggttttctttttctttttaaagaaagatcctccgtttttaaatttttttcaacttttattttagattcagggtctaagattcagggtgcatatacaggttcatttcaagggtatattgtgtgatgctgaggtttggggtgtgattgaacctgtcacctaggtagtgagtatagtacccaataggtagtgttactacctttgtctccctccccacctcccccatcttagcaagaggttttgaaagatgctgagccatcgaagaacatgacaaatgtccactagaggcatcttcccactttaggtttgtatacattctttctcttttattttttttgagatggagttttgctctcgttgtccaggctggagtgcaatagggcaatctcaactcactgccagctccacctcctgagttcaagcgattctcctgcctcagcctcctgggtagctgggattacagccgcctgccaccatgcctggctgtgcagatggggtttcaccacgttggccaggctggtctcaaactcctgacctcaggtgatccgcccacctcggcctcccaacgtgctgggattacaggtgtgagccactgcacctggacgggtttgtataattgctactttaatggtacttcactatttagaataattggtggaaaggatcatttgaattaatgaaaagctgagttataccaagagaactctggaggatgaaaatggagaaaagaacaaagtgatgaactaagagctaatccttctttcacttacttattaaataaatagctatatatttaaaaagaactatggatattgggcagagtgctaagcacaggagatacaacagtgaagaagatagacaagaccctagctcttgagccctttaggctacatgtatagatgaggaaacataacgtgacaagtaatcagatatgaacagggatacagaagagggacaatgagtagaaaaaaaaccaccttccccttttattaacaaaaggagctttcattctgtgtcacatggagaacaagcgttcttttatgacctattggaatatgcactcccctcctccagttgctgtcaactttataaggcaataaattaattgtggcagaagctggctacctcagcccagttacctttgctcagtgctccctatgaattgctgagggagagatacagcatagaaaaaaacaaggtgatgcggtgagtacgcttctccatgcaagcagggctttgaacaagggcaggaaggtccctttctttttgtgtgattttctgtctgctgctctgttaagtgatctggatgcccatgttttccttctggacttaatattttcttccttt

SEQ ID NO: 39449 - DNA, 2300 bp, Homo sapien
taacaagctcccaggcaatgctgctgctttgggtctaagaaacataatttccaagcaggactttagaaaaccttcacctggcaaggtgtggtggctcacacctgtaatcccaacactatgggaggccgaggcaggtgaggtcaggagatcaaaaccatcctggccaacatggtaaaaccccgtccctactaaaatacaaaaaattagccaggcctggtggtgcgcacctgtagttctagctactcaggaggctgaagcatgggaatcacttgaacctgggtggtggagatcgcagtaagccgagatcgcaccactgcactccgagctggcgacagagtgagaatccatctaaaaataaaaataaaaaaaaagaaagaagaaaaccttcacctaagcacaaatttgggactaataatatgacaaagaggatagtcactcataatgttgtaactccttgtccttccataacatttttcactccttttattcttcccacacttcagtcctgttacataagtaggaacaaggggtggatacagaagagaaactttaggaatgggaaagctgtacaacatctggaagctcaaacagtgaggagatctcagagtccatatgaaaactcaattccctaattcctaacatgcatgcacacacacacacacaaatttacacatttctatgcacatacatgtctgcatgccacacacttacaaacatatacacacacattctatttatgaaattctatccccttctatcacagattctttagaagaagagccctccttggctttgaatgggttttactgaggcaatttttgaacttcagcatctgtatggggcacagtgggcaggcaggcctcacatccattcgcttggggatgtttgatgcctactgatatggtgcaaactggtcaaaaacatggaaactgaattatatggggtggcatgaggggttttaggtctgagaccctaacagaaagttttcttctctcttcttgccagatctatgaccccactaataaaaggtatgaggttccagtaccactgaacacccctccccaaccagttggtgaccctgaaaaccgtctgtatgatgtcaggattcagaacaatccttttggaatccagattcaacgcaaaaactccagcactgtgatgtaagcactatttatttgattctaattagagtagttctagatttaattacagcagttacaattaattcaagtgaaatattaatctcagagactctatggaaataggtgtgcatttgttagagtatatctatttttcccatgctttaatggataatttgtttttggttagtcattaacaaaaataatcaatcaaagtttaaagaaatgaagtattgtttgatttcagagaaagaaaaatacatgttctacttactgttcttaagtagaacagaaaactctaataagtacagcagataacctaagatacaaatgagttccatattatgtctcattaagaaataataagaggcaggagagaggggcaaaggttaaaaaggagaaagaaatagcttcttgtaacgtttgcttctgtggacacagaagccttcaagccttttcacaatgttaagcataaaaggaattgtcatctcccatctcttgtcctgctgctgaatagaatgaagtgaaagtctggattttgcctggggtgaggttccctatcccagtagaagctgtcacctgtgtgtgcacctttgccttcctgtgtatgtcttctctcttgggctgtgtgagtgatttcctctctgttgccctctttggtaagaagtcctttggccaactcaagagaagttgttctaagagtttcatgcttttctattggaaagtttgcttaaactctatttgtttatttatatatttactcaagctgatattccaggcactgagaacttgaaataaatagaagaatgagttatggcccttgcccacaaggacccagaaaaggagctctcagtctgacaaaccacagaacagaaatctaacatggaactttggtcctgagtcagggccattgttatgacctgggtcatgtcacagtatttgaacctggatctaaatgtgcaataattaaggaggctttggaatcaactagacattccaaacacgttccaagtagctctggccagtggtctccagctcagcgtgatctgcttttgtgttgcagttgggattctcaactccctggcttcatcttcaatgacatgtttctctccatttctacgcgtctgccgtcccagtacatctatggctttggggaaactg

SEQ ID NO: 39450 - DNA, 2300 bp, Homo sapien
attggcttagacgaagactttatgaccaagaacccaaaagcaaatgcaacaaaaagataaatagatggtacttaattaaatgagaaatcttctgcacaacaaaagaaataatctgcagagtaaacagacaaccctgagaaaatctttgcaatctgtatagctgccaaagcgctaacattcagaatctacaaggtactcaaacaaatcagcaagaaaaaaaaaaacaatcccatcaaaaagtgggctaaggacatgaatagataattcttaaaaaaatacttacaactggccaaaaaacatatgaaaaaaaaatcaaaaccacaatgtgataccaccttactcctgcaagaatggccataatcaaaaaaaaaaatagatgttggaatggatgtggtgaaaagggaacacttttacactgttggtgggattgtaaactagtacaaccactatagaaaacagtgtggagattccttagagaactgaaagtagatctaccatttgatccagcaatcccactccttggaatctatccggaggaaaagaagtcattataggaaaaaagttcttgcacatacatatgtctccatagctttgcctttcccagaatgtcatataattggaattatatggtatataatcttttcagactagctcttttcacttagcaatatgcatataggtttactccatgtcttttcatggcttgagagttaagttttttaaatcataaaatctctgaataacatttcattatatggatgaatcacactttgtttatccatttatctattgaaggacatgttggttgcttccaagatttggcaactttgaacaaagctgctataaacatttatgtgtaggatttttgtgaacacaagttttcaaatcttttggtgtatcaagaagtgtaattgctgtatcatatagtaaggttatgttgagcttaataagaaacttccaagctattttctaaagtgactgtaccattttgcactctcatcagcaataaattctcaccagcatcagttcttgatacttcatatcctcactagcatctgttgttgtcagtgtttgaattttagcccttccacagggtatgtagtggtatcccattgttgttgtaattccctaatgacatattatgttaagaattttttcatatgccatttaccatctgtatatattctctggtgttatcttccccatcactgcaaaatatatctgtttgaaggcctaaacctcaatgcaactgtattgaagatagggcctaaaaggaagcaattaaggctaaattaggttagaagggtggagccctgatccaataggatttatgtccttataaaaagagtcaccagagagctttctttccctctttatctctgtgtgcacagaggaaaggccatgtgaggaagcagtaagaaggtgatcatccacaagccagggagagaggcctcaccagaaactgaatttgacaacaccttgatcatggacttctgaccttcagaactataagaaagtaagtgtctgtcgtgtaagacacctagactgtggttttttttatggcagtccaagcagactaaaacatttggtaaggatctttggcccacttttaggttgtgttgtttgttttcttaatgtcgaattttactatttccttatacatgaattatttagcagatatgtgttttgcaaatatttttatctagtctgtggcatatctcaatttttagccctgaatactttgtttcataaccatcaacttaagtatcattcccactagtctgtaagctcttggaaggtaggaaagaaatccttcagttgaggcaaccccaacagcaagcacagatcctagcacaagttagatacataagataaataattagcaggttggttcacagaataaatggataaacagtgacatgaaggaaaaggttaatgtatttcaaagaggagtttaatgtcaggcagaggaagcaatgtcagctccagagggctacattatgtccactggagaaaaatagcatcacacagtgggggatagcatcacacagacaggaggggcagcagcccacacatagtttagaggggaacctgcctaccaaggctggcaaaaaggagaccagacaggaggcgtctgtagagatatcatgaacttcaacttagctttggtactttcttccctgaagacagagggcagaactctgagttccagaaccattttcaactgtattggggaccaatcacttgactctattcttgtctctctgacagatgacgctacactctcctctgaataatgg

SEQ ID NO: 39451 - DNA, 2300 bp, Homo sapien
gtgactataatctcttatatccattaaataaattgtatcgtctcacttctttacaaagcaaatagttgtatttagcctattctttccatgagaaaagaaaagaaaaagacattttaaaagaaaggaaactaacaatagtcgccttcatattctcattggtgaggctttgtgggagggaggcagagattgagaatagagagagaaaatatggatttctcaatgtaagatagtaacaaaaattttcagttctcctccgatagcttaaaagggtagatgtttgtctctctctacttggggcttctgggcagcagaaatgtgagctgactaaagacatgaagaaaacaagaaaataaaaaaggaattcagggtaggttccagcaatgtggcagaaaccaggttataggttaacagactccgtggactgtaggtgattcataaacattcacaaagtgatttctgatatactatttaaagatgttttcaggctggtgccaaaatttcctgtaatatctccaaagcttcagtaaaagtctgaaacccaccctagaattaggttagtggtgaattaagaaataaaatgaagacagctgttttcatgtgctgggacaaagaagtctggagataagcaaagaacttagcagaaataaggcccagtcctaccagataaataattggaacaagtagagggatgctggatttcctaaaatgttgggggtcgtgggcttcaacagtatggttgtgagcaaggtttttaaccatacagagcttcagcttgaaaatggataataacgatatttaatgtataggcctgtgataaaggataaattaggtcacacatgctgggcatatagcacagtatttgtcacatggtacaaaacaaatactgactttattattttaataattattattttaaaacctttgggtactaaagaaatattgtccccaaaagtttagagtacatgggaacatactgatgaggttttaagttaataattaaattttaggagaactaagtctgcctataatttttacagatataggaatgttatgtttatggacttttataactgatcagctccttaattactctgataaagatcagtttgatactatatagtttgcatttttccagtctactctatataaaatgtgggattgaacctactgttattacccgtctctgtgggacaggctggaagttaccatatacgggtagctaataaaaagaaaaaatgggatgcattttgagagtaatcagcatagaagacaaaaagtgaactagtaaggagattggttgcattcagatcatccaataggagagcatccaagatctgaagattatgaagtatcttggcagggtggttttgccctggaatttttatagggagaaaaagataagtttgaggtggggagatttatagtgggggttgttttacaatcagggggaagcctcagttagttggctgaataggaaatgtttattttttaatgtagctagtttcgaagagacaaaccattctaatctcagctaatcatttttgaaacaaaaaatggggagttggatggtccatgtctggccatgtcagcaagtccgggcaaaagaggaaaggtctgtatttgatgcatcacaggtaagcaagagaaccatgcaaaattttctgggagctgggagaaagaaggggcagagagtcttatttaagtcatataggaaaggtagctctttgtggtaattcatttctaagaacacaaaacgatggagggatttcttaaccattgctcttttctgggaacacaggctaagatagagttcagccttgacacagagaatatggagactgagttctgagtcctgactttgccactaacttccaagagaaccatagcttcctcatcactaaaattacaaggaatgaaaaaagcaatgatttattaagtgcatttcataccccaatcctctggaagtctctggaagaggtgagatggcagcaagatgggcagggagagcggtttaagtcacagagggagaaggagacaacaaagaaaggttgtgtcatagagaggagaaggaaaatcagcaggtacataataactccaggcaagatttgtaggataggaaaggaggcaccaggacctcggcttggtctgtgccactctctttcacccacatcagagacggctcccagcaatgccgtatatatttgggtcttgataaggactcatgtgaagactgctctcctctcatctgtcttctgcccataatctccacagctgttcttggcaaggacacttggactaaa

SEQ ID NO: 39452 - DNA, 2300 bp, Homo sapien
tgacaccaacaggagcagagacttcccaagcagcccctgtctcagggccagggaagcacacccagacgacaaggacacagagcagggagacacagggtccccctgcctgtgccccgggtgaccctgccatgggctgaagtctccactgtggtgtggtccattgtctcaggtgagtcctgggcacaggtgggacatttctgtccttaaattttttgcttttttcatggaactgcttcagaagattctgtcctaggcttagtctgaatttggcttcttattttcataggctccatggatactggaattacccagacaccaaaatacctggtcacagcaatggggagtaaaaggacaatgaaacgtgagcatctgggacatgattctatgtattggtacagacagaaagctaagaaatccctggagttcatgttttactacaactgtaaggaattcattgaaaacaagactgtgccaaatcacttcacacctgaatgccctgacagctctcgcttataccttcatgtggtcgcactgcagcaagaagactcagctgcgtatctctgcaccagcagccaagacacagccctgcagagtcaccgcctccctgtgcacaaacctcctggatctaatcagaaaaccgtgggggcaacgcatccagctgagcctcagcactcggttcagcattctgtaagacctcagcagacatctcagatcataatactgtcatttattggatgtggcaatgctaaattgcccagactcctgcagcctgtggcctgagtttgtcttgaatgagactgtgcctgaacttgaatgtaggacagatgccgtcaagtttaagtttttccaagtatctttcagtcggtttgtgcctctgggaaatgttgtgtgaggtatttaacactctggcctcaccaatccaccttccaatatggactgttttttgactttcttttgactcaagttagacccggatctcagccctcatcccagctccaaatatgtatggtcagaccttttcttttcttttcctttctttttttttttttttcttttctttccctcccttcctccctccctccctcctttctttctctctctctctctctttctttctttctttctttctttctttctttctttctttgtttctttgtttctttctttccttctttcttttttgagacagagtctcactgtctggagtgcagtggcgcgatcttggctcacttccacctccatcttccagattcaagcgattctcctgcctcagcctcccgggtagctggaactacaggcgcccagcaccacgactggctaatttttgtatttttagtagagacagggtttcaccatgttggccaggatggtctcaatctcttaacttcttgatttgcccccctcgggctcccaaagtgctgggattacaggcgtgagccaccgcgcccggcaggtccttttctttttctttctttcttttttttttgaaaaactaaagaatacccaatcccctcctcaggtggctctatcactgcctcaccctgaggacagtatttccccatggggtttggatcactgttctctagttccctctccctggggcatgtgcagagtttcaacttcttgttggctgctctcttccactcaggatttaaaacattcacacttgattctttttccttctatctctgtaatcctaataccaagttttcttggcattcattatcagccgtggaatctgttgtacctgaattgttactcacagcaggtaataagagaacaagacctcctggaatttctgagccagactttgtactcagggttaccttgctgacccccatattttccagcattgctcttattaattaatggccctcagtcctgcacacaccatcagatcccaggggctgagcacagcctgcattgtcaggttctgcaacaacacaaaggctccctcctctctcctatagagggcgctccagggatggtgggtgttgccagagacaccagtaattctgccagaccttgcctgtggggccatgggagctcaaaatgcccctcctttcctccacaggaccagatgcctgagctaggaaaggcctcattcctgctgtgatcctgccatggatacctggctcgtatgctgggcaatttttagtctcttgaaagcaggtcgatgcttagactctaggaaattcttgctttgaacttacctaagacaattctaaaccattctcttaatcttcttcttttctcacaggactcacagaacctgaagtcacccagactcccagccatca

SEQ ID NO: 39453 - DNA, 2300 bp, Homo sapien
ccagctaattttttttttttttgtatttttagtagagacgggtttccccgttttagccaggatggtctcgatctcctgacctcgtgatccgcccaccttggcctcccaaagtgttgggtttacaggcgtgagccactgcacccggtctagacaattcttgatggacaatcaaacacttttgcttttcatatctcctgtaaaacacaaaacaaaacaacaaccagaactaacattgcctcatatgaggcgagtttctttctatcagtttcattccagtgcctctcccagacgctgtccgtctgatttggtaaaaagtcttgcgtaaaatagtgaaatacatatttatttaaagtctactctttaagaatggttacatctttacatagttatgatcatcaccattgaatgtagcctcttgtcatttcactatcttccctccccacccgttccttctttgaaaaggttcccatgtcagctgtgtggtgcaatgtggtaggtactgaataagacccacaactacgggggtacctggttatgttcacagaattgtagagctagacagagtgttgaaaattatttatttctgcccattgtttcatagatcaggaaatgggatgctttaaaaaaagtatttaaatgtaaatagtaactattttgctggcctccatgtaatatgtatttcatattcttagtctacaagtaatgtgtgaatgtgtttttgctcctattggattataagcatcatgagagtgagaatattgtttactcatgctttgcactaagtagccattcagtgactataaacaaataaagcatgcttgaagttccaagaaggatggtggtcatttttcttttgtttagttcaagttctgtgtttagtaaatcacaaatgaaccatcaaggtctgtctttgcaggggattcaccagtagatgacaacactaccaaagtgtgtgtgtgtgtgtgtgtgtgtgtgtgtgtgtgtgtgtgatacctttctggcagtgctggtctctggttttcctcctggaggttcctgccctggggccattgactgaggcactgaggtctgagtgctggaccttgctgacaagagcaggaggagctgcagccctgccacacccccgaggttgggtggttgatggctggcagaggagaggagtaccatgggcaagaataaaggggactgtggtcctcaacattagataattcacaaaacgcgaaggcattttctgtcgtcacattgccatcaggtgggtagggcccaaggatgccgccaagcatcctccctacacaggacagctccccacaacaaacaatcacctgatccaacatggcagtagtgctgaaattgagaaaccccgcaataagcttcggttgtaaactttgtaccaagaaggagaattctctgcagacaactcaaggggcaataccgtcaactacttttgttttctctgactgccgtgttgttgaccttcatcgccattctttcccagcacatggtgtctgcatattttccagcagcctcctgtttcctcataaatctgccccttggacagataagaacatcacagggagcagggctgcagttcactcccaataataacgcctcagcagggtttgctctgcagtagcatcacagtcatgtggagtaggtggctatggctggtattcaggtgaaatctcaggccaatctctcctgaatcaaggggaccactgatcattaatgagaccttcaagtgagcaaagattcaagagagcaaattaatgtcctgcgctattgtgaagggacgcaaaggatccagagaggaaaccagctgactctgagagaagggcctgaaaaggagaggaagggaggaggtggtcagatccccgggaaggagcagggagggagggggctgctggcccaggaatgactgtcagagacacatcctggaggtcacaattccaccctctcaattattcccagaaattccaaaaactcctttaaaggagcaagtgcagggcatgaaagggaggagccatgctagaggagaccctgggaatgggggaatgattacaggctgtgacctcactggcgcagcacctctcagcggcagtggaaaccacagcctagtcctctcaccactgcagaccagaatcctgccctgggccttgcctggtctgcctcactctgccatgggctgcaggctcctctgctgtgtggtcttctgcctcctccaagcaggtgagtcccgggcccaggtgacatgatcctattggagtccctaagccttttcaccatgacaacaacagcaggcc

SEQ ID NO: 39454 - DNA, 2300 bp, Homo sapien
tgctttacattttttgtttgtttgttttatgggccacattgaaaatctgatgaaatttttgcattagaagaatgctacaattttcctcctgactgagaacatccccaggttaaaacaaatctaaattataaatccttgacttaaatcatggataagtatcttccctcagccccatgtagatttacatataacatagatttacgaccctaatctcatgcctacaattataattatcatcatgaaaaggtaacactgatgtaatacaacaataaatagatggtaaaaatcactttgaaagtatgaatcatctcatttttgtgtttatttgtgttcatttgtatctccaaatgctctagaatgaaaagccaatattggcataaaagtaccttttaagaaaattgatgatattccaattcttaactggtcacaaagcataaatagcttatgcagtgaagtacagaagacccataggaagtcatccagctggttcctagttggaaagttctccacagaactgatgaactaatgtggtttctaacatcttagaaatggcagggctttagagatcatctcatttcagttctcctgatttaatatatgaggaaatatggcatcacatatatgaagtgattgaacaatgacatactgattacatttctcaaactttatgtaagatatatttttattctctagttgttttctgaatatgttgaattgccttacacaaatagaattctgggggtgaaaatgttggtgattttctgcttgctcctagctgttgctcaaggagtatttgttgaacaagtcagactggcccaagaactcaagagggctgggatactgtctgttctgcacattactagagatccaggcatagacaattttctgttcttttttcttttctttatttcatttcatttcatttcttttccttttttttttttcttttgaggtgtgtggtgggagcagggtcttgctctgtctggagtgcattgacacaatcatggctcactacagccttgacttccatggctcaagcaatcctcccacttcagcctcttgaatagctgggactacacacaggcaccactacattccgctaatttttgtagagataaggtgttgccatggtgcccagacacagacatagacaatttctgttgagtaaaaatttagaatgtcttatgtgtgtggatacctggcgttctggctgctgactctctgtgttgttgccaacacctccttcgtcttcattctcccctggcctttcaaacccttctctgctgctcagggttgtgagatgtggaacccatctggatgctgacactgggtcggtgagtggccaaatactgttttggccacaggcaggagctgtgctctggtgaaacctctaaggcagggacctggggaagggatagagaataagaggagagatgggccaggagggatcttgcccatggggagccaaccgtgcctcaactgagagcatggctgtactcagcccaagcacactaacatcagcttcaagctgatttccctttcctttgctccacacaccttgtgttgttctttttcagcatcctgtgtatgttagctctaagcccagccaagccccatgccctccacttcagggacagagggtggctcatcccttttgtgctccctcagctccctccccagtgcctggtggctggttggcaacacagtcatgcccttgaatgatgggagctggtgcacactgcatccgtgttcatgcagtcaccctccctccacagagccgggcagaaagggctccaccacacttagacattgagggaagggacgttttgaatggcactgttttatgtgatcccgcaggacagaaggagatttcttgaatgggagtggtctgttgttgagagggatcctgaaagacagggagacaaagatagagggaggatccacataattaggaagcagctgagagcaaaggagcccctgccagaggaatatccttggggggtaaaaagccagctctgccctttctccccagccgattcatcctagcccagcaaattcaaatctaccttctatcagaacttagaaaggatgtaaagcagtcaggaagaaacatcccctgggtctggggaaactatcaggagcagtgacatcacaagaaaaaccaccaaccagggccaaggagaccagagcccagcacctcgcccaaaggaccccagtcagaggccccatctcagacccgaggctagcatgggctgcaggctgctctgctgtgcggttctctgtctcctgggagcaggtga

SEQ ID NO: 39455 - DNA, 2300 bp, Homo sapien
atgacaatatctagatttactgtatatatgtaactattcttaaaatttgataacagatatgtcaaatgtagatatttaaagaaatttggattggaaatacactaaatcagaagtagcaagtgaaggatagcggttctgtaatggaatctttctcagattctgttttccctagtctcatgtttcttttttaaacccagtctggcctctccttcttagcttactaagtatagaaccacaaatagaaacttagaaatttaatcattttctgcacatatctttactcatatatgggaaaatgggcaagaggatattgtcagtgaactcaggcaaaaagaggatttctaaaagagagagtatagatgggaaagaaacaaattccccagcagcatgggaacagtgggtactgttttgtttatttttggataagctgattagttggcatgtagcacagagtggtctgaaaggtcttcttggagcaagctggctggagtcatcacagaaaaaagaactttaataataaatcatccacaaatccctgagagtctgcctgccgcaagggagacgggatgacttgatgtgattctggcacagttcttcctgcagcacacctacctgagctaggccaggtttgcatcatctccttcatcagcattttctcaaaggcaacatttcttttctatcacttttttcccttttacagtgcaaaaagtgatcttgaagaacataaattttaaaatgtgggggtttcttttagttcccctagagaaacagtataatagtcaagatggtgaaattgttcctaatttaaatatgtcccatgtctcttgcaccatgttagaaaggctgtatccatcagctcagacagccacagcaaatagcacagactgcatgggttaaatacaaatctttttttttcacaactccagagcatgaaatggggatgccagcatgtggggctctggtgagggccctcctcttggcttgcagagcaccctcttccagttgaatcctcacatggtggagagagaacaagctagccatcaagtgtctcatctcagagggcattaatcatactggatcagggctccacttttataaactcatgtaaacataattttctctataaagaccctattgtcaaatattgtctccctgggggttgtattttggagggacatcaatattcagtccactaacaatggcaaaatcttggttactgcacagtgggccacatgggggtgctgtggaaccactgagctccaaatgtctctggggcatgcacagagccaggagcctgggacagggagggttaaggagcagccttgcttgatgtttgtgctcactaaaaaatgtgatgacggatacataaaactgcaggtgtgcctctcatcagggagccatgcacttcagctatgcctgggttaggaagcctctgtgagccgaagagggagaatgaagatgggatgtcccatgctgggatgggacaacctgcatgtccagggcagggacagatagaggaacaactgcctggaaggaaaagcaaaggaactgtgggggggacatgcagcctaacctcagtccagccccacatggtatgtgagagtattaacagcacaaagcagaggtcctggatcgggtaagccaggggcctaacaaggaaggcaggatgcatgggaacccgcagagatgacatcagagtagtgatatcacagcctaacatccgatcagagatgcaatgcccaaaaccccagctctcagaggaccagtatccctcacagggtgacacctgaccagctctgtcccacctggccatgggctccaggtacctctgatgggaagacctttgtctcttgggaacaagtgaatccttggcacaggtgggatgtctctgaagcacgcctcatccaaggcaccctcaggctccctcctgtgttcttgccctagcctctgtctccctccctcacaggcccagtggattctgctgtgcagaacagagagcagtggacctcaggaggcctgcaaggggaggacataggacagtgacatcacagtatgcccctcccaccaggaaaagcaaggctgagaatttagctctttcccaggaggaccaagccctgagcacagacacagtgctgcctgcccctttgtgccatgggctccaggctgctctgttgggtgctgctttgtctcctgggagcaggtgagtccctgcagacaggatagcgccccattctgagcctgtcctcacccctgtgtcttccactttaccatggggaggcaccaccaggctgtctccggtg

SEQ ID NO: 39456 - DNA, 2300 bp, Homo sapien
tattattgatatataagttatataagcattacacattttaaataaacagatcggttatacgtaaccaaataattaacagaatgaggagctcctgaaaagttttatggttttaaaaggggttgaagccaggtgagctaccagatccacattagggacaattctatctggagatggatattgtgatgaaacaacctcagaaggtcttctaacctggtacagactgattttacgaagtttatttattcattttctttcatttcttttcttatctgctcattcactccaattattttgtaatgatattttggcgaaaattaatcatctttaagggaaatattttgagtttcatcagacacacatgcagctgagctttgtgttcacacactgagtgccctggggccaaacaaaatacggtaatagtgaccttgttgagagatgacgtcacattgggagaaaggttctctttgtgttgacactaagtgtccaattcataaaacctaagccttgagctaggaaatgcccttttctgccctgggaagcaggctcctacattgtgtgtttttctgtctcctggtctagcctggacacagacagtgtacccactcacgaacttgttatatcctggctgtgaatttcagcaccaggtggccctttgctctgacttcaatttctgtgtccttctctcctaaacaccatggatgctgagtgactcagactccagtcatgtgcttttgccaaaaggaaactagcacaagaggaggtgagcagaatatgaaacaaaaccatgtactcaggaccggcaatgtgacttactggcagctctttgctcaaatattgtaaggaagttgaagatcatgacaatgttacagtaacagggatctctttaagtgtggggctctgtgcactaaaatacgggtttttttttttcttttctttttttttttttttttttttgagacggagtcttgctctgttgcccaggctggagtgcagtggtgcaatcttggctcactgcaaccttgcctcctgggttcacgtgattctcctgcctcagcctcctgaagtagctgggattacaggtgcgcaccaccatgaccagctattttttttttttttttttttatttttagtagagacggggtttcaccatgtttgtcagactggtcttgaactcctgacctcatgatccgcccacctcagccttccaatgtgttgggattacaggcgtgatccactgcgcctggcctttttttttttttttttaattgttactgaattagtggtgagaatcctgaccaagggaatattccctatgaaatatgacacttcaaataaaatgagagcgctttttcttatcctggagcctgcctcttctctcctctccccacatccctcacatgtcaagacacctttgtgcccacagatcatgggcagcgttgggctgccactatcatccacacagagagggcagtcagcagcgtgaggtggttctgcctgctgcggtctcaccccaggcacagaaagcaagagccctgggtggagctgaaggtgctcagctgggcttgtcaggagtcccatctgtcggtgaattgaaaagaaacagagcaaaatgactcctccaatggtgatgagcctgcccctgggatttggaaacttggtaacagagaaaaccaatatagacaaaggattttaaacaggattatggtcaattaagcaaattagaaaaggatacttgaagggggatttgggacacaggagtcaaaaacaccgggaagacatgagaagtttccctaagagtctaaattagagaaatatttagataactgacaccagtgtatgaatgaggaattatatcatcacagggataagagttccattgagttacaaactgcttccaaaaaggttaagaaaaactcgtaaggctgtgtcaattcagacaaaggcattcttcccattcaaacggttcaccggtgcatgaatcttgaatttgaccatctggggaaggggcgtggcctctcctgacaggaaggctctggggcccaggcagggagaatgaagtctcagaatgacccccttgagagtcctgttcccctatcaccgatgcacagacccagaagacccctccatcctgtagcacctgccatgagcatcgggctcctgtgctgtgtggccttttctctcctgtgggcaagtaagtcctgggcagggccccatgtgtggatttcaaggcccagcctgtttccattgtggctgcagcatcagctttgttcttctctgcaggtccagtgaatgctggtgtc

SEQ ID NO: 39457 - DNA, 2300 bp, Homo sapien
cagatctgaagaagttacctagaatgcagcacagaaaattaaacaggaaacaagaaaaggtaagggataaggaataaaacacttgtgggttctagtgtattagtgtatatataatattttgttggaacttcccatttttcttacacatgattgaagtgtcacaaagagaaagtagagagaatgataggtgataattatgagacattagctgagaattttcaagacgtgtttcaggacctaaatcctctgtttcaacaagttaaatgaatatgaagtagatgaatacatatgttatggtgaaattgcggaacacaaatgacaaagagaagattttaaaagtagcccaaaagataactatctcccagcagaatagactgaaaggaacagtgaaagtcaagaaaggagattaaaaataagcatcaagtcagaattataattctcattcattaaatattgagattgaggtaaatatatttatagatagagaaagaaaaaacacggtgagtttgtcaccaaggtatcctttctgaattatagttaacaaagatgggaagtggtcccagaagaggggcatgaggtgccgctcgtgagggaacccatgtgatgggacagccccattgggcacgtgtgactggggggatggaggaggctggggcatcaatggggatggcacaggggactctgacttgcaggaaagacaatgagctcaccttttggtgctttgtgttggcggagctgttgacacatcctagagaacatgcccagcagacagaggagcggctgtgggatgaggagataaactcagagatgcagcgtgaggcctccgggtccagacagcatgagagcccaaagcgatgatacatgcattgatgttgttaaaaaggattttttttttttttttgagacagattctcgctctgtcgcccaggctggagtacagtggcgcaatctcggctcactgcaagctccgcctcccgggttcaagccattctcctgcctcagcctcccaagtagcttggactagaggcgcccgccacaacgcctggctcattttttgtatttttagaagagacagagtttcaccatattagccaggatggtctcgatctcctgacctcatgatccacctgcctccgcctcccaaagtgctgggctcacgcctgtaatcccagcactttgggagaccaaggtgggcggatcacttgaggtcaggagtttgagaccagccggggcaatgtggtgaaaccccgtctctactaaaaatacaaaaattagcctggtatggtggtgtgagtctgtaatcccagctactcaggaggctgaggcaggagaatcacttgaacttgggaggcagagtttgcagtgagccgagatcacactgctgcactccattctgggcaatggagcaaggctctgtctcaaagaacaaacaagcaaaaagcaaggaactcataaatatttaaaggagtcatttaagtaggtcctaaaataaatcctttgttcctgtcattgcgtggattgagagaggatgtgatgtcactatgggaccttctgtgtgggaacaaggacatccctcctcctctgctcctactcacagtgactctgatctggtaaagctcccatcctgccctgaccctgccatgggcacaaggctcctctgctgggcagccatatgtctcctgggggcaggtgattcctcagatgccaagcagtctcctgtgtgtgtgtgtgtgtgtgtgtgtatgtgtgtgagatgtgtgtgtgagagagagagagagagagctgactatagttgtttttctcattcagttcccaatttctgtctccacagatcacacaggtgctggagtctcccagtccctgagacacaaggtagcaaagaagggaaaggatgtagctctcagatatgatccaatttcaggtcataatgccctttattggtaccgacagagcctggggcagggcctggagtttccaatttacttccaaggcaaggatgcagcagacaaatcggggcttccccgtgatcggttctctgcacagaggtctgagggatccatctccactctgaagttccagcgcacacagcagggggacttggctgtgtatctctgtgccagcagctcagccacagcactactgctccagtgtcagcttggttccctaggaaatggggtttctagaacctgaatgctgacaaataagagttgtatatgtgtataccatgcaacctgcgtttaaaaatgtatgtacatagtgcaatgactaaatctagctagttaacatatgcagtacctcaa

SEQ ID NO: 39458 - DNA, 2300 bp, Homo sapien
aacaacatgatgaaactgatattgtgttacagtaacattggtagtagtacggatctgaaaggagatagatttttgggtggcatgaatgattaggagacttctaaatatcctccatgaaagattagaaagggtttatgtaaagcattgtggaagacataggcttgaggctctggattatgttatctcttggaaagagtgttgggttttattctggaagggttaaatgtaggacttgctaggttctatttgagctttgcccttcctcttagggagccccagcctgtggtcatcattgctagtgcatggccttcccagggtcttagtgggaatcacagtgtattcgccacatcactccactgcaactgggtctgaatgccctggctcttctgaaatctctgcccatgtcttcagccttccagaacttgttctctgctcagccttctggtctgccaccctctgcatacacaatttaggatctggctcaggaaaaaaaaaaggggggtttcttacatataatttttgggttcctttttactaccctgtgtcttaaatcccagctgtcttggagtcagttatgtcctatcttcaatcacataaactaacgatatttggtacagacatgtttactgactttacttcacgttaccattccactcttcactcttctttcttgcaattcagacagtcctgaggtcattctccttcttcagatccatctggaattcagatgacttcaactcacctgtcacccaccctatgctttgagacatgtttatgttagctactgacctcagggtagtcaagcctctcattgtcattgttattcaaggtaggttgaatcccactaaaaaacaaaaatccttgaaatttggtttccttattgagagccacacaatgcaatcaaattctttttaattcaatttttttttcttttttggtggaagggccaagaactgtttccttgctgaagcagactcctattataataatttgaatactaacaacattaacctttaaatcaggttgatgttaggttcttatctaagaatgaagtatatccaactgtagcaggttgaaggtctctcatatatgtaacctgttcaggacgagacaattcaaccacttttcttaaattctgatctacatgcctttacattctttgctttaagggccacataaaaatactctgaaacaatttacacatcagaaaaatgctaacactttcctcctggcccagcacatctccaagttaaaaaaatctctaaattatcaacccatagtttaatcatggtaactcccttctacccccaacatagatttttatgtaactgatttgtaactacaaccttaaccgtacaatcacaattgtcattataaaatactaacaaacatgtgctattaacaatggatggttaaaatcacttagggattatgaatcatttcatttttgtgtttatttattatgtcagtttcaacctgatttccctttcccttgttccacacaccttgggttgttctttttcagcatcctgtgtatgttagctctaagcccagccaaggctcatgtccctccacttcagggacagagggtggctcatccctttcgtgctccctcagctccctccccggtgcctggttgctggttggcatcacagccatgcccttgaaagatgggcgctggtccacactgcatccgtggtcatgtagccaccctccctccacagaaccgagcaaaaagggctccaccgcgcttaggcattgagggaatggacattttgaatggtgctgtcttgtgtgatccctcagaggagaaggagatttcttgaatgggagtggtctgttgctgagagggatcctgaaagacacggggacagagacaggggtaggatccacataatgaggaagcagctgagaacaaaggagcccctgccagaggaatatccttggggggtaaaaagctggctctgccctttctccccagcccattcatcccagcccagacaattcaaatctgccttctatcaggacctagaaaggatgtaaaacggccgggtataaatatcccctgggtctggggaaactgtcaggagcagtgacatcacaggaaaaaccaccaaccaaggccaaggagaccagagcccagcacctcacccagaggaccccagtcagaggccccatctcagacccgaggctagcatgggctgcaggctgctctgctgtgcggttctctgtctcctgggagcgggtgagttgggttcacatcagctgtccttgaattcgaaactttttccttgtgattt

SEQ ID NO: 39459 - DNA, 2300 bp, Homo sapien
cagatgctgagtgacccagaccctggtcatgctcttgtgctgaaaggaaaccagcacatggggaggtgagcagtatatgaaacaaaatcatgtatttacaaccagtggcaagacttactggcaggtgctttgttcaaacactgttaggaatttgaagatcatggcagtagaatgtgaaaccaagtgcagggtccttccaaatgcaggcctctgtgcaccaaagatagacttttggagctcattttttttaaacaaaaacggaaacaacactctatgttcatggctgtaggccatgcgagaatatttttttaaattttaatttaatttttatttttccatatattattggggtacaggtggtatttggttatatgagtaagtttttagtgatgacttgcaagactttggtgaacccaccagctgagcagtatacactgcaccatatttgtagtctgttatccctcaccccctcctgctgtttccccaacacttccccaaagtccgttgtatcattcttatgcctttgtgacctcatagcttcgctcccaaatatcggtgagaacatgctatgtttggttttacatttctgagttacttcacttagaataatagtctcccatctcatccaggtagatcattccaaatgctgtttattcattcctttttatggctgtgtagtatttcatcatacatatatgatatatatatgatatatatgatatatatgtgatatatatgatatatatcatatatatgatatgtatatgatatatatcatatatatgatatatagatgatatatatatcatatatatgatatatagatgatatatagatgatatatatatcatatatatgacatatatatgatatatatatatcacagtttctttatccactcgttgattgatgggcatttgggttggttcctttttctttatcactaaattaatggcagcaataaatccagaacattcctcattaccctaaagtcagccctgtctcccaaactcccttacacatcaggacacctttgtgcccatagatcatgggcagtgcttggcagccaccactgtccacacagagagggtagtcagtagcgttaggtggttctgcttgctggggtctcaccccaggcacagaaagcaggagccctgggtggagctgaaagtgctcatctgggtttgtcaggagtcccatctgtcagtgaattcacaagaaacagaacaaaacaactccttcaatgttgatgagactgcccctgggatttggaaagctaataacagagaaaaccaatatagacaaaggattttaaacaggactatcggattatgatcaattaagcaaattagaaaaggatacttgaaggagtatttgggacacaggaatcaaaaacaccaggaagacatgaggagtttttccaagattgtagactatagcaatacttagataaccaataccagtgtattaatgagtaattattagtattattattttgagatggagtcgcactctgtcatcaaggctagaatgcagtggcatgatctcggcttactgcaacctccgcctccctggttcaagaattctggtgcctccgtctcccgagtagctgggactataggtgcacgtcaggatgcctggataatttctatatttttagtacaggtgggatttcaccatgttggtcaggctggtctccaactcctggcctgaagtgatctgctctcttcagcctcccaaagggctaggattacaggcatgggccactatgcacagccaagtaatttgtatcatcatgggaataaaaaatatacattgagttacaaactaattaccaaaagatatttaaaaaatggtagacttgcatcgattcagacaaaggcattcttcccatccaaactgttcactggtgcattgatcttgaatttgaccatctggggaaggggcgtggcctctcctgacagcaaggctctggggcccaggcagggagaatgaggtctcagaatgacgcccttgaaagacgtgttcccttttcaccaatgcacagacccagaggacccctccatcctgcagttcctgccatgagcctcgggctcctgtgctgtggggccttttctctcctgtgggcaggtgggtcctgggcggggccccttgtgtggatttcaaggcccatcccctttccactggagcagtagcatcagctttgtccttctctgcaggtccagtgaatgctggtgtcactcagaccccaaaattccgggtcctgaagacaggacagagcatgacactgctgtgtgccc

SEQ ID NO: 39460 - DNA, 2300 bp, Homo sapien
gtgtgtatatatatatatacatacatgtatggtaatgtatatacatgtatataatatatactacatgtaatatacatgcatatattatatatacatgtatatatatacatgtgtatattatatatacatgtatatatatacatgtgtatattatatatactacgtgtaatatacatttatatatacatgtatttatatataccactaccaaatacatgtgtatatatatactaccatacatgtgtatatatatacactatttttatatataatatatactacgatacatgttctagcatattgcctgaagtaaaagtccagccaaatagtttaaaaggaaaaccatgagccttcctgtgaagattaattttgcatttcatcttgaaatggaacaaagaaatctactgaagatagtcaattcacttctatatacggaagtctacatttatcagctttctacagtatgagcgactttcaaatctcctaaaagttacacaaatcagaatatgcagaacacacatttctaagctcaatattaaatatgtaaagtgactaacttgaacgtaagagttggacgttcagggtcctcctgtgatttcttcattcccaccatcacaaaacatctacaccttcttctcagtaacaaaaatgagatgacataaaatcatttttcatagttaataaataatacctatgcatcatgacattgcattgattttttgttaatggttgttttcaaatgactataaattaaacatttataatctatacaatagaaataataaatgtaaatattttaagtggatacatgagattttagtagccaaacaggctcacacctgtaattccagcactttgggaggccaaagtgggaggatcacttgggcccaggagttcaagaccagcctgggcaatatagggagatcctgtctctgtattttaaaaaatagttatacagaaaagtaacatgaaatagtctgcaacaggatgtcctatctgggtttgatctgaatttccatttagaaaacagacaggcactggtccatctgcgggcataggttctcatgaattgatgtgcatgttgacttttgtattttgtcaaagttaaaggagatattttgatcagagtcagagccacaagtaactagcaggaaactgagtgggatggaggttatgccatggtccttgcttccttgcagagctaagaaaccagttgtgagcaccagcgaaaagagacaaagtcagatgaaactgaaatcttcatgggactctgtgcccaagaaaaccagcttgacaggattgggcacaagagctattccttccatcctacgctgccagagcacacagcacagtttcccccatgagctcttggggagctggaggagggagatagctgtgctgggcggagtcgtattcccatgggaagtccaaaaagtagaggcagggatggaggttttccttctagaaagagtggaagattttgtttacaaacgtacccatacacatgcctttctcccgaagacccaaactttggggaattgcttaaatataacaaggaggttaaatattggacagccaaaaataggaccgaagccaatctcttctgaagtaggtgtagtcactgtgcattagtcagatattcaaatgagcaaagattcaagaggaaaaaaaaaagcattattggaaaaggaagcaaaagatcaagagaagaaaaccagcctgactctgagaggagagcccaaaagggagaggaagggaggaggtcctcagatcccgggtagggagcagggagggaggggtacaggcacaggaatgactgtcagagacacatcctggaggccacaagtccactctctcaactattcccagaaattccaaaaactcctttaaagaagccagtgcagggcatgaaagggaggagccatgctagaggagatcctgggaatgggggaatgattacaggctgtgacctcaatggcacagcacctctcagaggcagtggaaaccacagcctagtcttctcaccactgcagaccagaatcctgccctgggccttgcctggtctgcctgactcggccatgggctgcaggctcctctgctatgtggccctctgcctcctgcaagcaggtgagtcctgggcccaagtgacaagatcctgttggagtccccgagccttttcaccatgacaacaacaggaggctacctcctgggatttgcctgaattctgcttctttcctttacagatccactggacacagccgtttcccagactccaaaatacctggtcacacagatgggaa

SEQ ID NO: 39461 - DNA, 2300 bp, Homo sapien
taccctccatgaaagactagaaatcgtttatgtaaagcattgtggacgacataggcttgaggctctggattatgttatctcttggaaagagtgttgggttttattctgggacggttgaatgtaggacttgctaagttctatttcagctttgcccttcctcttagggagccccagcctgtggtcatcattgctagtgcatggccttcccagggtcttagtgggaatcacagtgtattcgccacatcactccactgcaactgggtctgaatgccctggctcttctgaaatctctgcccatgtcttcagccttccagaacttgttctctgctcagccttctggtctcccacccttctgcatacacaatttaggatctgactcaggaaaaaaaagggggttttcttacatataatttttgggttcctttttagtactctgtgtcctaaatcccacgtgtcttggagtcagttatgtcctatcttcagtcacatatactactgctatttggtacagacatgtttacttgactttacttcacgtttgccattccactcttcactcttctttcttgcaattcagacagtcctgaggtcattttccttcttcagatccatcccatattcagatgacttaaaatcacctgtcacccatgctgtgctttgagaaatgtttatgttagctactgacatcagggcagtcaagcctctcattgtcattgttattcaaggtaggttgaattccattaaaaaataaaaatccttgaaatttggtttacttattgggaaccacacaatgatatcaaattctttttaattcaattttttttcttttgtggtggaagggccaagaattgtttccttgctgaagcagactcctatcataataatttgaatactaacaacgttattttaatactaacaacgttaacctttaaatcagattgatgttaggttcttatctaagaatgaaatatatccaaccgtagcaggttgaaggtctctcatatatgtaacctgttcaggacgagataattcaaccactttccttaaactctgatctaaatgcctttacattctttgttttaagggccacataaaaatactctgaaacaatttacacatcagaaaaatgctaatactttcctcctggcccagcacatctccaagttaaaaaaatctctaaattctcaacccatagtttaatcatggtaactcccttctacccccaacatagatttttatgtaactgatttgtaactacaaccctaaccctacaatcacaattgtcattacaaaatactaacaaacatgtgctattaccaatagatggttaaaatcacttagggattatgaatcatgtcattcttgtatttatttgtacttattctttgtgtttatttattatgtcagcttcaagctgatttccctttcccttgctccccacaccttttgttgttccttttcagcatcctgtgtatgttagctctaagcccagccaagccccatgccctccacttcagggacagagggtggctcatccctttcgtgctccctcagctccctccccagtgcctggtggctggttggcatcacagccatgcccttgaataatgggcgctggtccacactgcttctgtggtcatgcagtcatcctccctccacagagctgggccaaaaagggctccactgcccttaggcattgagggaatggacattctgagtggcactgtcttgtgtgatcccacaggacagaaggagattccatcaatgggagtagtctgttgctgagagggatcctgaaagatagggggacagagacacactgggaggatccacataaagaggaagcagctgagaacaaaggagcccctgccagaggaatatccttggggagtaaaaagctgactctgccctttctccccagcccattcatcccagcccagacaattcaaatctaccttctatcaggacctagaaaggatgtaaaacggctgggtataaatatcccctgggtctggggaaactgtcaggagcagtgacatcacaggaaaaaccaccaaccaaggccaaggagaccagagcccagcacctcacccagaggaccccagtcagaggccccatctcagacccgaggctagcatgggctgcaggctgctctgctgtgcggttctctgtctcctgggagcgggtgagttgggttcacatcagctgtccttgaattccaagctttttccttgtgatttcagcaacaagcctcctcctgggctctgcctgaattttgtccctttccccccacagtcccc

SEQ ID NO: 39462 - DNA, 2300 bp, Homo sapien
tttggaacctattcgtgggcttgtttgatcccagctgtgactttcagtaccagggggtcctttgctgtgacttgaatttgtgttttctttactcttaagttccacagatgctgagtgacccagaccctggtcatgctcttgtgctgaaaggaaaccagcacacggggaggtgagcagtatatgaaacaaaatcatgtatttacaaccagtggcaagacttactggcaggtgctttgttcaaacactgttaggaatttgaagatcatggcagtagaatgtgaaaccaagtgcagggtccttccaaatgcaggcctctgtgcaccaaagatagacttttggagctcattttttttaaacaaaaacggaaacaacactctatgttcatggctgtaggccatgcgagaatatttttttaaattttaatttaatttttatttttccatatattattggggtacaggtggtatttggttatatgagtaagtttttagtgatgacttgcaagactttggtgaacccaccatctgagcagtatacactgcaccatatttgtagtcttttatccctcaccccctcctgctgtttccccaacacttccccaaagtccgttgtatcattcttatgcctttgtgacctcatagcttcgctcccaaatatcggtgagaacatgctatgtttggttttacatttctgagttacttcacttagaataatagtctcccatctcatccaggtagatcattccaaatgctgtttattcattcctttttatggctgtgtagtatttcatcatacatatatgatatatatatatgatatatatatgatatatatatcatatatatcatatatatatgatatatatatatatcacagtttctttatccactcgttgattgatgggcatttgggttggttcctttttctttatcactaaattaatggcagcaataaatccagaacattccttattaccctaaagtcagccctgtctcccaaactcccttacacatcaggacacctttgtgcccatagatcatgggcagtgcttggcagccaccactgtgcacacagagagggtagtcagtagcgttaggtggttctgcctgctggggtctcaccccaggaacagaaagcaggagccctgggtggagctgaaagtgctcatctgggtttgtcaggagtcccatctgtcagtgaattcacaagaaacagaacaaaacaactcttccaatgttgatgagcctgcccctgggatttggaaagctaataacagagaaaaccaatatagacaaaagattttaaacaggactatcggattatggtcatttaagcaaattagaaaaggatacttgaaggagtatttgggacacaggaatcaaaaacaccaggaagacatgaggagtttttccaagattgtagactatagcaatacttagataaccaataccagtgtattaatgagtaattattagtattattattttgagatggagtcgcactctatcatccaggctggaatgcagtggcatgatctcggcttactgcaacctccgcctccctggttcaagaattctggtgcctccgcctcccgagtagctgggactataggtgcacgtcaggatgcctggataatttctatatttttagtacagatgggatttcaccatgttggtcaggctggtctccaactcctggcctgaagtgatctgctctcttcagcctcccaaagggctaggattacaggcatgggccactatgcacagccaagtaatttgtatcatcatgggaataaaaaatatacattgagttacaaactaattaccaaaagatatttaaaaaatggtagacttgcatcgattcagacaaaggcattcttcccatccaaactgttcactggtgcattgatcttgaatttgaccatctggggaaggggcgtggcctctcctgacagcaaggctctggggcccaggcagggagaatgaggtctcagaatgacgcccttgaaagacgtgttcccttttcaccaatgcacagacccagaggacccctccatcctgcagttcctgccatgagcctcgggctcctgtgctgtggggtcttttctctcctgtgggcaggtgggtcctgggcggggccccttgtgtggatttcaaggcccatcccctttccactggagctgtagcatcagctttgtccttctctgcaggtccagtgaatgctggtgtcactcagaccccaaaattccgggtcctgaagacaggacagagcatgacactgctgtgtgcccaggatatgaa

SEQ ID NO: 39463 - DNA, 2300 bp, Homo sapien
tctacacagatcagagatccctttccagaaacccatgcatagagttgtgttattttggaaccacttctggtaccaaaaactccattaggtttacatcaataaaacagaatcactaaaagtactatggagaggaggatttatgacaggagttagaccttatataaatgtagggggagctgaggaagagaaggtctggaggggagatatagctaggcagatttaattcatgattaatgtgaccgtgacctcttattctactcaaaggagagcatatgatttcaacaaaaaaatattgattttcctttgtaaaagtttgatccaaatagtgagctatttttgtcccataattgtcttaagttggctaatggtggaacaaatccgactttgatttccttgaaagaacaggaaaaaaaccgtcattcatatacagtcttacaggctctattttatggaggaagcataataaataggaaagagaaaatcagaattctcttctggaacctacattgggactgtcctcagagcaggttgtgatgtgaggaatcaaatctacaggggtatttcgcagcttggagcgcagcagactgttcccgaccccatgcatttgggggtgagaccagagacagttgaaaaactatggaatcttgacattctgcactctcaagcctggcctctccctgaatttcacagattaacatcagaccaatttattccgactattaaaagtattagaacaaaaaccaaggaggaccagtgagcagaagcaataaaccattaaaatggacatcctaaagatttaaaattttgccatcataagatgtgaacgtttgaagagctgcatttaaatgaatacaagaagggactgaaacaagaatacacacaaaaaagagacggcccgaaaccatcaaaaaacattaaagaaataatcaaatagaatgtctagaaatcattacgattactccacaaaacaaaatggaagctaaacagcagattcaatgcttctaaagagattgttagcaatatcaaaggaggatctcaagaaatcacctagaatgcagcacagaaaattaaatgtaaaatataaaaaaagtgaaggaacaaggaaaaaatgaagtttctagaatattagaaagcatataatgttttattgaaacttttcttactttcttgtatataactgacgtttcagaaagagaaaataaggcaaatgatctgaggtgattgtgtatgtgatgctagctgagaatgttcctgagatgtttgaggaccgaaatcctcgttcaagaattcagatgaattgcaagacaagtaggcaggtccctgtgaaactgcagaccacaaatgacaaagaaaagattttaacagcagtcaaaagggaaagataaatatcctccaggggaatagaaagaaagaaataatcaaagtcaagaaagaggattaaaaataactgttaaatcagaattgagattgataaaaaatacctacaggacaggacaagaaaatatggaaaaccaaaataattctgtgagtttgccaccaaagtatcttttcagagttatagttaacaagggtgggaaatgatcccagaagaaatgtatgagggcagtttgtgagggaacccatgtgatgggacaatcccgttgggcacatgtgagtgggggaatggaggaggctggggcatgaatggggatggcagaggggaccctgacttggaggaaagacaatgagctcatcccatggtgcctggtgttgggggcactgttggcacatcctacagaacgtgctcagcagacagaggagcggctgtgggatgagaaggtgaactcggagatgcagcgtgaggcctccaagtccagacagcatgggagcccaaagcgatgtcccatgcaataacgttgtttacaaggagcttataaatatttaaagtagtcacccaagtgtggtctaatataaatcctgtgttcctgaggtcatgcagattgagagaggaagtgatgtcactgtgggaacttccgtgtaaggacggggcgtccctcctcctctgctcctgctcacagtgatcctgatctggtaaagctcccatcctgccctgaccctgccatgggcaccaggctcctcttctgggtggccttctgtctcctgggggcaggtgagtcctcagacaccaaccattctcattgtgtgtgtgtgtgtgtgtgtgtgtgtgtgtgtgtgtgtgtgtgtgtaggggtgggctgtgtgcattcgtgtgatgactaaaattattttcctcattctgttcccaactttgtctccacaga

SEQ ID NO: 39464 - DNA, 2300 bp, Homo sapien
aaatggaaatgtacatttcctctgatgatttatttgatgaaattaactaattaactaaagaatgcagtatggatccctcttgaggtatttaaaaaatcaatgttgttgacatataaattatacaatgtaaacattatacatcttaaatgaacagatcagtgatttttgagcaatatatatgtatatgcccttataatccccacccctcttaaaatgtaaaatatccccacccctattaaaatgtagactatctccagaaagttccctcgaacacctctgcaatgcctatcttggtcccagaaaaccaatgatgtaacttctatcactggagagtagttttgttcacaaatatttttaatgtcaatttaaaacccatactgattaatcctcttgaatacatagctaaataatcaaggcaaggaagagtttctgggaggttttatggttttagaagggattgaaaccatgagagctaccttgatccatggtaggaacgattctatctggagatggatgttgtgccgaaataacctcaaaaggtcttttcagctggtagaagctgattcgacaacatttatttattcattttcattcatttctttgcttctccattcattaactcaaattgtttagtaatgatatcctgataacagttaattatctccaaggaaattattttgagttcccataggacacacatgcagctggttttgtgttcacacactgagaacgctggcgtcaagcaaaccatggtaacagagacttcattgaaagatgatgttacattgggagaagcattctttttgccttaaccccaagtgtttaactcataaatcctgagccttcagctagaattcatcttcctgttctggccctgtcctgggcaccaggatcctgagctgtgtgttcctgtctcttgaaccacaggagtcctgggcacgcacatgaaacccactaatgggcttgttggatcccagctgtgactttcagcaccaggtggcccttagctgtgactttaatttctgtgtccttcactgctaagtgaagccccatagacgctgaatgaccagatcttggtgatgcattgtgctgaaaggaaaccagcacagggggaggtgagcagaatatgaaacaaaatcatgtatttacaaccagcgacatgacttactggcagatcctttgttcaaacactattaagaatttaaaaatcatgacagcagagtgataaagcaagcgtgggatccttctgaatgcagggctctgtacaccgaagatacagtttttgagctccttttcatttattactaaattaatggcaggaatcctgaacgaagggatattccctatgagacatgacacctcaaataaaacgagagcatttttccttatcttgaagtctgctccctctcgccaagtccctcactcatcaggacacctttgtgctcacaagtcttcagcagcgctgggtggccaccattgtccacacagagagggcagtcagcagcatgaggtggttctgcctgctgtggtctcaccccaggaacagaaagcaagactcctggatggagctgaaggtgctcagctggacttgtcaggagtcccatctgtcagtgaattgacaagaaacagagcaaaactactcctgcaatgttgatgagcctgcccctgggatttggaaacctgataacagagaaaaccaatatagacacaggactttaacaggattatggtcaattaagcagattggaaaaggatacttgaaggagtgtttgggacacaggaatcaaaaacaccagggagacaagaggatttttcctaagattctagactacagcaatacatagataactaacaccagaatattaatgaggaattatatcattgcaggaataaaatttatattgaattacaaactgtttgcacaaaagtcaagaaaaacttgaaagccttatatcaagaagcattcttcccatccaaacttcagtggtgcatttattttggatttgaccctctggggaaggggcatggcctctctcgacaagaaggttctggggaccaggcagagagaatgaggtctcaggatgacttccttgacagccctgttcgcctttcatcaacacacagacccagaagacctctctgtcttgtagcatctgccatgagaatcaggctcctgtgctgtgtggccttttctctcctgtgggcaggtaagtcctgggcagggcccatgtgtagatttcaagacccagagccttcccattgaggctgcagcattggctttgttctccttctctgtaggt

SEQ ID NO: 39465 - DNA, 2300 bp, Homo sapien
tgaatgaaccagtaacaggaacacactagattcattgtaccctggcagaggtctagagttaactttgcctgagatgctctgttatgagctcatcaaggagcactcacttgttgaacaagcataggaccatgcatggtgcaagccagtttgtcagtctgggaatttccaatttaaaatatgatgtgttcttcaagctgaatgagggtaaactttctgtatataattataatatctaagccatttcttaaagttttgggttaggaacaaaaaacccctgaagagggaacatttgtagatttaggatttttaaaatatatttatattattttcccttggaagaacaggatgggaacagccttatagttgctaatttgtggagaaggcatcatataaaagtaagagaaaatcagaattgtgttctagagggtaaattgtggctgtcctgagagcatgttccccaggaacctaaaccgtgagcatgttcaggaacccagagtgcaacagacaattcttggccccatgaatttggtggtaagactggagacagttggaaaaaccatggagtcttgaagttcttcactctcaatgcaggcctctcttgaacaccacagactaatgtcagataaatatgcttccactattaagactattaaaacaagaaccaatgaagagaagtgagcagaaacaataagcaattgaagtgtttgaagacaagaaatttttaccattaaaaggtatgaaagtttgtagaactatgtttaaaggaaattgaaatgtgaacaagaaaaaaagactgacagaaaccatcaagataacattaaaaaataatcaaattcaatacagaaatgattaagattatcactgaaaacaaaatggaaatgaagaaagatgaaatgcttctaagagattattagtgatgtcaaggacagagctgaagaagttacatagaatgcagcaccgaaaattaaatatgtaactttagaaagagcttaagggtggtttccagcatagtagaatatataatttttaattatatatatttatttatataaagttatttatatttatatatttaattatatatttattatataaaaatatataatataataatatagaatatagaatatatattctataatatagaatatagaatatatattatataatatagaatatagaatatatattatataatatagaatatagaatatattatatagaatatataaatatatatatttcccatttttcttatagataattgaagtttcagaaaaagaaagtagagggaataagtgattgtgatgagacattagctgagaattttccagaggtgtttcaggacctaaattctcaatttcaagaattcaaatgaatatgaaataagataaatgtttatattataatgagattgtggaacataagtgacaaatagatgattctaaaagctgtcaaaaagaaaagataaatctctcctagtggaatagactgaaaaaatcaatgaaagaaagaggatcagaaataaccatttagtcggaattataatccccattcattaaacactgagatggaggaaaatatatttacaagtggaaaaattaaaaaaaaagactatgagttttccaataaggtatcttttctgaattatagtcaacaaaggtgggaagtggtcccagaagaaaggcatgaggtgcagcttgtgagggaacccatgtgttgggacagccccgttgggcacgtgtgactgggggatggaggaggctggggcatcaatggggatggcataggggaccctgacttgcagaaaagacaatgagctcatcccttggtgccttgtgttgggggcgctgttggcacatcctagagaacatgcccagcagacagaggagcgcctgtgtggtgaggagataaactcagaaatgcagcatgaggcctgtagctccagacagctctagagcacaaagtgaagaccgatgcattgatgttgtttaaaaggagctaataaatatctaaagcagtcatccaagtgtgttctaatataaatcctgtgttcctgaggttgtggggattgagagaggaagtgatgtcactgtgggtactgttctgtgtcaggacaaggacgtccctcctcctctgctcctgctcacagtgaccctgatctggtaaagctcccatcctgccctgactctgtcatgggcaccaggctcctctgctgggcagccctgtgcctcctgggggcaggtgagtcctcagacaccaaccagtctcattctgtgtgtctgtatgtgtgtgtgtgt

SEQ ID NO: 39466 - DNA, 2300 bp, Homo sapien
tctgtgcactaatctctctgcttccgtgtacagcagtctcagaccagacagctgtgagaacctggggccttcagggggaaagataaacaatttcaggactctgaacaaggctggcggaaacaaggccaggaggatatgctcagaggatggtgctgcttcaggaggttcacggcaaaattactttctttgtcggatgctgtacactatagtgatagagtagctggcactctcctttttagaaaaagaaattcattttggtgtcaggattgttcgacagatgtgtagtatagaaggtaaaatctcaagggtttgctttatataattaagggagaagaaattgagatttggtttggagaaacttgaggagagagaacatgattaaagattattaaataaatagaagtagagctaccagatgataaaaaattgtgttctctgcaacataacctgtcaaagttttcaattgctagaaaatacgcagcaaggccttgtagcaactggcatcaccccgaggccactctatgatggtcatcaccacgtagccagttgccctgtgggagggccctggagctggttccaatgtcttccttctggacttatatctcaattctcaaaacagaggaattcatttcactgctgatggtaaacagataaaggctctcccatttccccaaagatacattctgcttcccttgtatctctttctgacacttaccgcccagatccattaccttctgtgatcaaacacctcttcgaatatttcctaaaactctgcagcctttacattctctgcatttgtgctcagtatttccatggcctggaaggaccttctgtctcccaagaaacagccagaccctgcttatcggtcaaggatgggctcacacctgcttcctctttgcttcttaccatgacattccccagcattgtactataccaccatctttattattttcataggaaaagccaagtattaattaaatatataatgaatattatttgatgttgtgaaatctatgttaattcctgcttatatagagttctggaatattattacttttattcatgtgagggatattattaaccactaactatttcctggttagagatcaaagtcacttctgtgtaatgatagcaaatgtgagaaccagctgaatctgtttgaattacagctggcagtattattcatttcaaaatttttataatttagaagtaaatttttaaaatctagaaatccttttgtgaaatgcactgtctaaaatttagtaataatgaacctaaatacaaaatatgaaaacatatgggtgtaattaactgggattagctgtggaatatagggtttccaggctgggtttccttgatagcatcacactgtttaattgtatggcctttataattctggctggtctctaccatcttaacatattatttgcaattatgtaacaattgtttattttgtaatcaaaatgttggttcatgtgtcctttgactccattggctaagggtagatttgaaaatcaaccctaaattgactcttctgggaaagcatggacggggtgtgtaagagggtgggagtggcaggagtgggggcatctctctttctgatttggacaatttgagcatatcacgtcagagggtatgaatccatgagactgtagactgttggccacttggaggcgctgtggctccacagtgctgcagagaactcagcggaggggtgggagagtggccaagagaggaggactgaaggggatgccctggctgcctgctggcatcagtagagtggatggaattccctgagtggggcctggccatgtagagttaagcacagactatcattgccttgaaagagttggggtgccagaggcctcagtttgcatcaaggagggagtgtctctgctgctgcacgggcagtggagggtgaaggggctggggtggcaagggctggggaatcagtgtcagggcagggacagggcgggcagaggaaagtaaggtgtgatgtgggtatgttggtactgtgttcagtcctcctcacctttagcttctggcctgtgcaagacaggaatagtacatggagtagcagaacctgaggcctgccaaagagtacagtgggctggagtggcctgcaggggaaagtatgtcagtgtggtgacatcacaggtcaatgctcctatcaggaagaagggagcttaggaacttcagaatgcttactacagagacaccagccccaagctaggagatcctgccatgggcttcaggctcctctgctgtgtggccttttgtctcctgggagcaggtgagtc

SEQ ID NO: 39467 - DNA, 2300 bp, Homo sapien
gggacaaaagctccaacctgcccattcatgcagatactccagagagcaccctatgctcttggaggtcctgatggattccgtctcctgttgccccagcacaaatacaatattgcacctttatcctggtttctcccttccctattttgttttccttgctctcttacttcttcctggaatcatttcccaaataagctacatgcacccaagtctccccatcacagactttgtcttcagagacagactaaactgtggcagtgatggaatgaagcgaccatcaaaagaccctaccttttgaaggagacaactgtttatcttttattcatatggctacccattcatttaaaaagtcttatgatgatgtatataaactaatcttttccaaatccatttggattcatctggaattcccagcgttctcaggatggctctctgctcccttaaaacttcaaacctattttgaactgaataaacttggattctgtttacagaagtagaatctgcctggactcagataatcattcattcctttcttcattcaataaatatttaatgaattataggtgaagattagattcaagttttgtggcgcacaaagctgatacattttaggtagctctttgcaaaagagagtgcaaaatagcaaagagttgaaaagaccctgtgcaagtgagaaggcctgaggttattcttcatcggcttcatggcaaatacacaggtactgtccaggtacttgggaaacaccagtgcaaaaaacagacaaagcttcaagttgaggtagacaattttaacacataattgttataatttattatacttaataataaattaatttaaaagtagaaggatatattcctggtagatgcttatctccccggagaagttagagtgtcattgagaatatcaacattcttggtaaatcatacctgatttagggaatgatccttggagctctggaattctacatgccttaccttgcaaaatgaaggtcctgatctgaaaagttttttttttttttttttttttttttatgccctggcccaaccatgaggattggcttctttgctgtgtggctcttggtctcccaggatcaggtgagttctgggcatagatgagaaagtccttcctgggcttgtcgggccccaaccacggcctcctatgggggtgctcatgggcctcctccctgtctccacttctgattctgtgtcctctctcactggagcatgattgtgggaattacccatccaggttgcatcaagatgtgcaatagatagcctattgtatctgaaataactattgcagtgttatggactacatgtgagttttgcaccatagcacgtttacaaatccatcaaccttctcccatttggtgaatataagatctgctggatgggaatagaggattttcctgtgaccctagagactccaggtaggtgtagttcttggtgaacatttcatccatattcctaatgagcctcctcttttcttcacaggaagtacagtcactcaggggacttagatggggcagtgtttgtggcttcacctgaagcaaagggagaaaacacccccatgagaatacacagcagcctgagcttggatggtgacattcccatcaggtgtaatgaggtgctacagcatgtaacaagtcttcaagcggtcatgaccttgaacctggaacttggaacttggagacatttctggatgtcatttaaccgagggtatccctgtatgctggcatacaagtgtccagaggttaaacgaagaggaaaataattcaacttggagttgaattttgtgcaggaagtcataaaagtcaccaggactgctatgacaatgttctttagcctacagaaatattcataaaagtgaaaatagtattcaaataaagaatttctcatgatggaaataaaatatacatagaagaacaaattcccctattaaaatcagggaaagagcttaggagtttattagatttctttcaaaacagacctaaaaattattcaactctgttataaataatttgttcctgcggggaagagaaggggcatggcaggttagctccgcagttcaagcattcagcaggaacagtgacatcatcaagtcactgagagcccaacttcagtctgcccacagcagggctgggagacacaagatcctgccctggagctgaaatgggcacgaggctcttcttctatgtggccctttgtctgctgtgggcaggtgagggctggtcacaggagggcctccttccctggaattcccaaggcctcagtgcaggcttttctgttgggatgacagcatca

SEQ ID NO: 39468 - DNA, 2300 bp, Homo sapien
aaccccaactgtagcaaatcattgagtgaataatgttctgggcttgcatcagggatagatggaggagagccaggagccagcctgcatgctcacagacccatataaagggagaaccacttcctcctcaggagaactcagagaaaccttagcaattcacctgtaccccacacctaacccattccagttgtgccctggatggtggacaggaggatgtaaagggaacataggagaggggagtggacaattccagacctctccagataggcttagctcaaataaccttgcaaatattctgaataagagccagatttcccagggctctggccttttcttccctgagcagcatgatgatgctccattcctgtcttgacaaggattctgtcatggatttcttggttgtgctgcccaggaagcaggtgaggcccaggaacaatgaggaatgtcgtccctggacttggcatgcctcactcgcaagcacaccatatgtgggtcctgtgattgataggtttgatagatggatacgtcctgtttccagccaccagcctctatcccctgaatgctgttgtcaactcagagccacaactctggtcacaaagatggagcaggtagtggcaccttaatgtgaagaaagtttccatcatgcaattgttacctggtgcctacatgagttagactcaaaccagcagctgtttacctcagtgatagaggatttatgacagaaacagagggctcttgtaattctatacccacaggtattcacctgataaccttcacatgtgtcccctaggttttggggactttgagcctgcctcactgaacacatatatcctcgttcccagctctctggacatgcatctccttgtattattgtcttatgccaactctcaggtgcttcatcccctaactcttcccatcctttaccccttaggcaatgaataaaagtatatttgtgactaatgttgccccattagaaaaaaaatgccagatactagccactgctgttcaattgtaacttatactaaatctgtaaggtttttttttttttaagatttcaacaaatctgattttagatttcttttttcttttgttttgttttttgagacggagtcttgctctgtcgcccaggctggagtgcagtggcgcgatctcggctcactgcaagctccacctcccgggttcacgccattctcctgcctcagtctccagagtagctgggactataggcatgtgccgccatgcccggctaattttttgtatttttagtagagacggggtttcaccgtgttacccaggatggtctcgatctcctgacctcgtgatccacccaccttggcctcccaaagtgctgggactacaggcgtgagccaccatacccggccgattttggatctcttactgtattcacaatgatattttcagggataagagagtccccacccatcttataagatatcagaactttcattacattgatgaccaagaaccataggcagaaccatgatgaagacttggtacacaatgcatcatgaagcttgataacagaaaagagaaagctggccattgaccttcaccaaaaatgaacccttccaactctctctcagggtattattttacccctttagcttagagcatgtcagctggttcaacatgcttctaggataaacctgtgtcaactaccccagctcccactctgtctaagctcatagcaatgagaaaatggagaacctggtaagacagaaatgcccagagagaaggatatacagataagacatagaggttactaattgttgtctgtattttgagttgcctttgacacattcaagtagaaacatgcagcagaagatggccctggagatgcagtgggtgatccaatcccccaagccctagagatgtgagtaaagacacttggatgaacttacacacagtccatgaatacgctaaagcaacttctagctctgttttagttcataacaactggtttctaagaacttaggcacttgtggagacaatgatgttactgtaggaactaccgtataaggacaggatgtcccacctcctctgctcctgttcacaaggaccctgaactggcaaagctcccatcctgccctgaccctgccatgagcaccaggcttctctgctggatggccctctgtctcctgggggcaggtgtgtcctaagaacaccatgatcatcccattggaaattccagtgatttcttcaatcatttctgtctttctgttttcaaattctgtctttttccccaacagaactctcagaagctgaagttgcccagtccccca

SEQ ID NO: 39469 - DNA, 2300 bp, Homo sapien
actataaagtatttgatttctactgctgctgtaatgaattaccactgattttggaggtttaaacaaaatacatttgctaccctacaatactggaggccaggagtccaaaatcagtgtaactgggccaaaatcaaggtgttggcaggcctgcgttctttcccagagctctaggggagaactgtttttctccccttttcagcttctagaggctaccagcgtgtcttggcttgttaccccattcaatcttcgaaaccaacagggactgactgagcctttgctcatgctgcatcactctgacactctttgtcctccctcttccacattttaggacccttgtgactacattggacccgcctggaaaatccaggacactctcccagtatgaaggtcagctgattgacaacctgactttgtgtggaactttaatttttcttttacaagtaacttaacacattcctaggttccagagattagacctggacgtggttggagggcctttgttctgcctaccaaacctaggaacttggtaagagggaggaaaacaaaatgatcacctggaaaccagaatactgaccaccgttttacatcccaggcctaacagacacaaaaagggatggagcccacaaggaaatagacacctcaggtctcacaagctcgtctgtaaactatttgctccttaggatcggaaagtactctggggtgcaggggactcagcagtatgcctctgtgccagcagcaaaaatgtggccctaaactgctccttcttggttagcaattaacccagttgaccaacccacagagcagaggcttctctcagctctgtacactctacaccctgagaggaagtcggcttctgagatgcaagactcttttataaggaaaagtccagttgtaaagattaagaaactttgagctttgctagaggtaaaaataggatgtaagtcaactctggagcatttaatttccaaatgtttatgaaaaagacaatcttcttcctgttttattgtatggatagagaatgagagagattctgtactctgggctttgcaaactcactagagttcaagaataaatacactcagagaggtctttcactgcaaagaagagctttgaaatcgaatgaactttcaggatatcagttcggctcctgtatctctaacaacgcagttgacatgcttgcccttcctagggatctcaggggccaactcctaactcacttgtggataattgaagtgcattcaaaggagtaggagcacagagacatcagggagaggaataggagagtttgcagagaatctggcttgctgtaagacaatgagttcatcttgaaataattggagtgtgaggtgcagatgaatatagttggcaagatcctaggtaagatatactatagagaaggctttatgaattggtaatatcaagacaaatccacagagagcctccgtaggtgtgcatttgtgtctcagatcaattatagttcagtcctgcctgattcatctcccagagatgcagcctccacttaaataaggagctttcaaattggaggtggtggcccattcagtgacgtcactgacagatgcatcttgtgtggataaaatgtcacaaaattaatttctttgttcatgctcacagaggccctggtctggaatgttccacttctgctctcactctgccatgggctcttggaccctctgtgtgtccctttatatcctggtagcgagtgagttctccgatatttattatggtcatgctggacctctgtctagatgactccttatattttccttattctttcccccaattctgtcttcttttatagcacacacagatgctggtgttatccagtcacccaggcacaaagtgacagagatgggacaatcagtaactctgagatgcgaaccaatttcaggccacaatgatcttctctggtacagacagacctttgtgcagggactggaattgctgaattacttctgcagctggaccctcgtagatgactcaggagtgtccaaggattgattctcagcacagatgcctgatgtatcattctccactctgaggatccagcccatggaacccagggacttgggcctatatttctgtgccagcagctttgccacagcactgcagaatctccccatctctgtgcagaaaccctggtgcttcctcttctccccacagctctcagcagtcgtcagcaaagtctttcctgctctctgctcaccatggctcacgcctataatcccagcactttgggaggccgaggtgggtggatcatgaagtcaggagatcgagaccat

SEQ ID NO: 39470 - DNA, 2300 bp, Homo sapien
agacagcattctgtgtgctcctgagaggccctgatggattccatctcctattgctccaacacaaactcttttgttgtttgtgcacttttatcctggcttcttccttccctattttatgtttcgttcctacttcttcttcctggaatcatttcccgaataagctacatgcacctaagtccccatcacagactttctcttcagggatagcctatactgtggcagtgatgggatgaagccaccatccaaagacccttccctttgaaggagacctttgtttttcttttactcataccgctacccattcgtttaaaaagtcttatgatgacatatataaactaatctcttccagattcatttggaattattcctgaattctcagcagcctcaggatggctctctgttcccttaaagctctgaacccaatttgaactgaatagacttgggttctctttacagaagcagagtttgcctggacccaggtaatcattcattccatttttcttccattcaacaaatctttaatgagctataggtgcagagtagattcaaattttgtggggcacaaagctgatacaattttaaggagctccttgcaaagaagaatgcaaaatgacaaagtgttggaaaggtcctgtgtgagtgagaaggcccgaggttattcttcattgatttcatggcaactacataggtactgtccaggtacttgggaaacaccagtggagaaaccagacagagcttcaagttgaggtagacacttccaaaaaattgttataacttattatactgaataataattaaaaagtaaaaggatatattccccatagatgcttatgtctccagagaagttagagtgctgttgaaagtactgacattctgggtagctcacacctcatttagggaaggatccttagagctctgggattctacgtgccgtatcccaaaaatgaaagtcctgcactgaaaagatttttttttcccctgccctggcccaaccacgaagattggcccctttgcttggtctcccaggaccagatgagttctgggcatagatgggaaagtccttccttggcttaccaggccccagccacggcctcccatggggatgctcatgggcctcctccctgtctccacttctgattctgtgtcctctctcactggagcatgattgtgggaattacccatccaggttgcatcaagatatgcaatagataatctattgtatctgaaataacaatagcagtgctattgactggatgtaagtttggtgccaaagcacgtttacacctcctccaatcttctcccatttagtgaatacaagatcttctgaatggaaatagaacatttccctgtgaccctagagactccagatagttgtagttctgggtgaacatttcatccacattcttaatgagcctcctcttttcttcataggaagtacagtcacttatgggacttaggtggtgagtgtttgtggcttcacctgaagcaaagggaaaaatcatcctcatgagaacacaccgcagcctgagcttggatggtgaggctcccatcaggtgcaatgaggtgctacagtgtgaaacaagacttcaaatgttaaagaccttgaatccacaactttgaaacctttctggatgtcagttgactcttttaaccaagggtatctctgtaggctgaaatacaaatatccagaggttaaacaaagtggaaaataattcaacttggagttgaattttgtacagagaagtcataaaagtcaccaggactgctatgacaatgctctttagactacagaaatattcataaatgttaaaacagcattcaaatgaagaatttagcataatgggagtaaaatacgcatagaagaacaaattcccctattaaaatcagggaatgagattacacattttaagatttctttcaaaacagatctacaaatttttcccaatctaagcttctcaagtatgtctataataaatgatttgttcctgtggggaagagaacagatgtggcaggttagctctgaggttcaagcatttagcagggacagtgacatcatcaagtcactgagagctcaacttcaatttgcccacagcagggctgggagacacaagatcctgccctggagctgaaatgggcaccaggctcttcttctatgtggccctttgtctgctgtgggcaggtgagggctggtcacaggagggcctccttccctggaattcccaaggactcaatgcaagcttttctgttgggatgacagcatcagtgtctgttgttctctattacaggacacagggatgctg

SEQ ID NO: 39471 - DNA, 2300 bp, Homo sapien
cctggtttctcacaaacactgtcctatattagccctgattctattgaagatagtatagaagtcccaccagtatctctaagccatggaccgaggacctaagtccagtgacactggccatcagaaggcactggggtttgatgatgctcaaatgtttttgaaacagggctcagtgctgcctgagatgttaagtttaaaggaaaagtgtgtatcctagtatccagtatcttgtttgcagaagttgtgagtagtcagtgaaatgtgaaatattaaaaaaaaaaaccctttatctttcattggtgctggcatgttctgctcagcagtaaaatctgaactgtagcaaatcttttgagtggagactcttctgggcttgcatgggaggtagatggaggaggaccaggagccagcctaaatgctcagagacccatgcaaagggaaaatgactggctcctcaggagaattcagagaaatgtgagcaatgcacctgtacctcacaccttacctattctagtcgtgctctggacaatgtatacgatgatgtaagggaaatataggagagtggacaattctagtttatgccagataggctattccaaattgcaggtagtaactacagatattcttaacaaaaaccggatttcccagggctctggccttttcttccctgagcagcacaatgaccagttcctgccttgacaagaattctgtcatagatttctcagttgcgctgcccaggaagcagatgaggcctgggaacaatgaggaatgtcttccctggacttgacatgcctcacttgcaagcacaccacatgcaggtcctgtggactgataggcttgatagacagataagtcctgtttccagctaccagcctccatcccctgaatgctgttgtcacccagaactgtaaacctggtcacaaagatggagcaggtagtggccccttaatgtgaagaaattttccatcatgcaattattacctggtgcctacatgagttggactcaaaccagcagatttttacctcagtagtaaaggatttatgacagaaacggatggctctggtaattctatacccacaggtattcacctgataaccttgacatgtgtcccctaggttttgcaggtttggtggaatatctctgagtgcacctcactgaacacatatatcctcattcccacctccctggacgtgcatctccttgtgttattgtcttatgccaactctgaggagcgccatcccctaactccttttatttcttattactcaggcaaggaataaaagtgcgtttgtgactaatgttgccccattagaaacaaaaaatagataatgaccactactgttcaactgtaatttacactagaggtatagctataaggttatttttagatttcagcaagtctctttgattttgcatttcttacaatatatactgatattttcagggataagagaattccccacctatcttcgataaaaatgagaacttactttcattgcactggtgacccaaaactacaggcagagccatgatgaaggcttggtacacaatgtatcatgaatgataacagtaaagaggaaactgttcattggccttcactaaaaatgaacccttccaactctgtgcccaggttattgttttatccctttagcttacagcgcgtcagctaattcaacaagcttctaggataaacttgtgtcaattaccccagcttctaagtgcataggaccaggaagatagagaacctagtaaaagagaaacacccaaagagaaggataattgctgataagacaaagaggtcactaactgatatctctgtttcgagttgccttcaactcgaaacatccagcagaggatgggcctagagatggagtaggagatccagtccccaagccctagagatgtgagtgaggacacttggctgaacttacacagtctgtgaatacagtaaagcaacttcgtgctctcttttagcttataataattggtttctaacaatgtaggcatttgtggaggcaatgatgtcactgtgggaactgccatgagaggacagggacgtccctcctcctctgcttttgctcacagtgaccctgattgggcaaagctcccatccttccctgaccctgccatgggcaccaggctcctctgctgggcggccctctgtctcctgggagcaggtgagtcctaggaacaccatgatcacattggatctctctgattatttcaatcatttccttctattttcaaattctgtctttttccttctcagaactcacagaagctggagttgcccagtctcccagat

SEQ ID NO: 39472 - DNA, 2300 bp, Homo sapien
catggatgaagctggaagccattatcctcagcaaactaatacaggaacagaaaaccaaacaccgcatgttttcacctagtgggagttgaacgaagagaacacatggacacagggaggggaacaacacacactggagcctgtcggagggcggagggtgagaggagggagagcattacgatgaatacctaatgcatgcggagcttaaagcctagatgacgggttgatgggtgcagcaaaccaccgtggcacatgtttacctatgtaacaaacctgcacattcttcacatgtatcccgaaacttaaagtaaaatttaaaaaatttaaaaaaagagagattttttatggctttagaagggtttcaaacccttccagaaccctgagagacacctgatccacgttagggataatcctgtctggagatagacaagatgatgaaatgacaccaaaaatcttcccacatggaagaggctatttccacataatttgttcattcattttcattattttttctcatacactcattcacttaaattattttataatgatattctgacaaaaactaatcatctccaagaacattattttgagtttccatcagacaatatttagctgtgattcagctctgcttcctgagcacatagagtgcactggggccaagtgaaccatgtgcaatagtgactaccttgagagataatgtcacattgagagaaggggtctctcttccttgaccgcaagtgtccaacccataaaacatgagccttgagctagaaaattcccctttctgttctggcgctgcctgggcaccaggctcttttgctgtgtgtccctctgttttctggaccagagaaatactgggcacatatgtggcatctactcattggtttgttggaccctagcttgcagataatagtaccaggtgttcctttgctgtgactttaacttctgtgttcttcacaggacacagtcccattgatgggatccaaagtaccattgatactgagtgacccagaccctggtcatgtacttgtgctaaaaaggaaaacagcacatggggaggtgagcagaatatgaaacacaattatggactcagaaacagccatacaacttattagcatcccgttgtttcaaaaaatcataagaatttgaagaacatgacaatgttatactgactgtggcgtcctaataagtgtgggactctgtgcaccaagatatgttatttgaattcctttttattgattactaaattaatggcaggaatcccacacaaagggatactccctatgaaacatgacaactcaaattaaaaaagagcactcttccttactctaaagtctgccctctctccccgagtccctcacgcataaggccacatttgtgcccctaggtcatgggcagcgctggttggccaccatcgtccacatgtagaaggcagtcagcaacgtgaagtggttctgcctactgcagtctcaccccagacatggaaagcaagagccctgggtggagctgaaggtgctcagctgggtttgtcagaagtctcatctgtcagtgagttgacaagaaacagagcaaaacgactcctccaatgttgacgagcctgcccctgggatttggaaacttcataacagaaaaaaccaatatagacaaaggattttaaacaggattaaggtcaattaagcaaattagaaaaggacacttgaaggagtatttgggacaggggaatcaaaagcaccaggaagacatgaggagtttccctaagactctagactacagcactagcactatgtagataactaacactaaaatattaattatatcattgaaaaaataaaatttacagtgaattacaaactgtttccaaaaggtcatgaaaatcttgtagacttgtttcaattcagacagatgtgttcttctcattctcagctgttcactggtgcatttattttggatttgaccatctggggaatgggtgtggcctctcctggcctctccctccctggggcccaggcagggagaatgtctcagaatgacttccttgagagtcctgctcccctttcatcaatgcacagatacagaagacccctccgtcatgcagcatctgccatgagcatcggcctcctgtgctgtgcagccttgtctctcctgtgggcaggtgggtcctgggcagagccccttgtgtgaatttcaaggcccagcgccttcccattggggctgcagcatcagctttgttctccttctctgcaggtccagtgaatgctggtgtcactcagaccccaaaattccaggtcctgaagacaggacag

SEQ ID NO: 39473 - DNA, 2300 bp, Homo sapien
tatgaagatatttttagaaagtttttgtttttctaaagcattccttgatattgatcctcacttgtttttcagcccactcatccgttgagcttaatttgatgccaaatttcaatgttgcctatttcagtcactgaccacttctcacattctccatatcttacacagatacgtgtgttcctgtcttttcttctttttgtgtgatgcatttttaaattgggctgtacagaatacaagcatacatttgtaaatgactgccatcttttatgcagtttagctgtttaatttttagtaacactttttattaaggtataattgagagtaaaacacaagtattaatacaaaaacatcctggtacattttgacaattgcatacaccagtgcaacagtaactgaaatgattataaaaaaaatttccatcactcaagaaagtgtcctcatgctcctttccaatcaatttctatcccagagataaaaacttttctgtttttatcaccattgactagctttgtctattcttcagcttcatataaatggaatcatattttattagttatttttctccaaaattagtatttctgaagtgtattcatattgttgtatcagtaggtcattctttcttatgactaatattccattgcataaatataccacaaattttttgtgcattctcttgttgatggatatccatgttattcctgtcttcaactattatgaataaagttgttgtgaacattcttgtggaaatctttcttttggacatatgcattcttttttcttcttttaaaacctacacttaagagtggaaatactgactcatagtgtagatgtgtgtgctatgcttgcgtgtccccacaaaagctcatgttgaaatttgtcagtggaatggtattgggaggtgggacagctatgactaggtcataagggatctgccctcagaaagaaatcaatgcccttattgggcgagtgacttagttttcccgggaatggtcttccaataaaaaggatgaattcagctgttttctctgtcttaagtgcttgcttccccttccttctgccttggataacagcaggaggacctcaccagctgtggccctttgatcctggacttcccagtctccacatctataagccaaataaacctcttgtctttatacattgcccagtccgtggtatttctctatagcagtaggaaagaaattgaaagaaaatatggcaccatgaggctgttgttataatacctgaaaatgtagaagcagctttggttaatgggaagtggctaatggatagaggttgaaagaattgggaggagcagactagcaaaagcctagactcctgaaaacagagcattaagggcaattctggtgaagtgtcagggggaaatgagggacaagctatcggaaattgaagcaaataccatccttgttataaatagcaaaaaccttggcaaaattgtgtcctgttctaggactttatggaatataaaattatgagccattcactaggatatcaactgaaagaaatatctaagcggcaaagcattcaggctactgtgtgactactttcgggcaccaggaaatttcacccagcaagaagggagccatgggaatagattttgcaaaccagcacagatggtaaccctacctccctctgctgtcctgtctcccataagccaaaccctgtgctgtgagctcttaaaatcctagaattatttctggggaatctatactcttaataatttatagacaacccaggtctgctttggatctgatcagacggactaaatcttggggactctgcaccactggccactgaagaaaggggctgggaatgttgatgggacaggaaaatataataagaaacattggtgtgaatctagtatcagaaagatgatgtgaggacaacaaggaagagctggaatgtgagggtttaatcacaggctcctcaccctccgctgatgggtaggtgtgttagctccagcatggagcaccaccgcactaggtgggggaagggtgagagggcaatggggcagcctgtgagctggggcaacgtaggcagagaaggaactgtgtcaccacagaaacttctgccttcacccatcccttcagctctgcaggacaggtagagactccaggatcatccactgagcactggacataaggaaggctgcatggggaggactcaggacagtgacatcacaggatacccctcctattaggaaaatcaaggcccagaattcactcggctcttccccaggaggaccaagccctgaatcaggtgcagtgctgcctgccccactgtgc

SEQ ID NO: 39474 - DNA, 2300 bp, Homo sapien
tttggaaatgcaggcactagagggtgctcatttctcttccttttccaatcaggggctattcaaaggctgttctagaacaaggggtgagatcctccacttccccgtggtgatcaggctttcacaggtagaagccttattagttcataatcagccaagctgacctcaccatcaaatgtatcgacctcgatgcttaccctcctcagcagtcagagactgtctgtgttcaccaggagctcgtgtgcttttacagagcacactttctcctcggtttagtaaaaaaaataaatgggccattatagggggttccataaacagaagctttctgtactttgcccatttagacactacaaattctgatgtctgacgaatagtgtaaacttaaagcttgcatgtggttaagaacttttaataaacaaattaaataatatatataatgaaaatgtcaataatgttctccaatccaatcccaccttccactcataaccaatattaacgctctggtgtgcttcttttcacccctcttttctgtgttcatgcacacctttctacccaagtacacctacagaaaatgggttcacctgtacactttacctgccacatgcatactcttttctgttaatatatcctggtctttattgttccagattggttgatatagatctaacttgctcctattagctgcttcacattgcataatgagggtagacaggtacatttgtgctctattgtctgattcctaaattctgccagatcttttccaaagtgactgaatggcctctttgtgcttccgagttcctctcaccccagcacccagttgatgattccagcgtttccatcactcatagtcctggcaggtttgagagctccattggttcctcctgcatgaggagacagggacggataaaaggatagacctttatcaaacctaacagagactacacggtatctcagttcaacctcataaagcattgaggggaatgttagtcttgttttatagatgagtctagatgaggctagaatccaggaaagttaatgaatggccttgcccacggtctcagagctaataaatggtggaggcagatgaagggcagtcagcctgcttccatgtggaattgatagaggggtcactggactttgacagaggggaagtctagaaccatctggggctgtcttcagatcggacaccagagttaagagagcctgtgtaccctacagcactgcagatagaagcatcatggtgttggcagtggggaggtactagagtgtgtaagtggttagtggcctacaaccagaagacctgagttttgagaaaattattcccatcacaagatgtagcagagacagtgatatggatatactagaccagagagctctgtgaggagctctgtgaggagctgtggcctaatcatgcatcaggccacgtttgtgtccataggtcatgggcagtgctgggtggccaccatcattcatacagagagggcagtcagcagcgtgaggtggttctgcctgctgtggtctcaccccaggcatggaaagcaagagccctgggagcagcggaaggtgctcagctgggcttgtcaggagtctcatctgtcagtggattgacaagaaacagagcaaaatgattcctccaatgttgatgagcctgcccgtgggatctggaaagctaataacagagaaaaccaatatagacaaaggattttaaacaggattatggtcaattaagcaaattagaaaatgatacttgaaggagtatttgggacgcagtagtcaaaaacaccaggaagacatgaggaattgccctaagactctagactacagcactatgtagataactaacaccagactattaattatatcattgaaaaaataaaatttacagtaaattacaaactgtttaccaaaggttatgaaaatcttgtagacttgttttaattcagacaaatgttttcttctcattgtcagctgttctctggcgcatttattttggattgaaccatctggggaagaggcgtggcctctcctgactggaaggctctggggcccaggcagggagaatgaggtctcagaatgacttccttgagagtcctgttcccctttcatcaatgcacagatacagaagacccctccgtcctggagcacctgccatgagcatcagcctcctgtgctgtgcagcctttcctctcctgtgggcaggtgggtcccggacagggccccttgcatagatttcaaagcccagcccctttccattggggctgcagcatcagctgtttccttctctgcaggtccagtgaatgctg

SEQ ID NO: 39475 - DNA, 2300 bp, Homo sapien
aagaaaatgtcatgatgactacatggcttaatggcatttatttatgaaagagctttattaaaaataattagaaaatttgaattctattctgaatttttccttgggagtgtcctgagagcatttttgaccctaccgacttttgtcatgtgtgtatttggcagcctagagtgcagcagttattggcgccatacattagggagttagactggagatggctgcaaaatgactgactcttagtgttattcactctcactctgggcctcactggaatgtcacagactaccatcgaacaaatggattcccagtatgaagaatattaggagatagcaatgaggaaacatgagcacaagcaacaaacatttgaagtgcaaacctgaagactcgaaatgttggcattataagatatgaaagtttggtgagctacatttaaatgaacatgacggggaactgaaactaggaaaaagacaatgcctgaaaccatcaactttcataacaattgtcaaaaaatatatctaggaatgcctcatacaatcactgaaaacaaaatggaaagtcaaacagttgattagctcctcctacagagatttttagtgatttcaaagatggatctgcaggagtgatctagaatgcagcacggaaaatgaaaagtgaaatatgaaagaagttagagaacagggaagaaaaaaatggatgtttcccatatattagaatatgcatatttttcataatttcccattttttgttgcatatgattgaattttcagacagataaaataggtagaatgttatgaggtgatatttatgagatgttagctgagaagttttttgaggtgtttaaggacctaaattcagagtttccagaatcacaatgaatctcaaataaggcagtcaagtcataagcaaattgtagaacatgacggacaaagagaagattttgaaagccgtcagaaagaaaagacaaatacgtcccataggaatagatggagaacaacagtaagttaagacagtggtaaaaataaccattagctcaattatcattctccttcatttaaggtaagattgattaaaaaaaataacttttagaaggggaacatgaaaaatgactgctgtgagtttgctatcaaggtttcttttctgaattacagttaagaaaggtgggaaatgatcccagaagaaaggcatgagggcagttcgtgaggtaacccaagtgatggggctgcccgttgggcacgtgtgactgagggaatggaggaggctggggcataaatggggatggcagaggggaccctgaattgcaggatagacaatgagctaatgccttggtgccttgttttggggatgctgttggcacatcctacaagacatgcccagcagacagaggagtggctgtaggatgagaagatgaactcagagatgcagtgtgagcctctggctccagacagcacgggagcccaaagcaatgagccaggcattgatgttgttaaaaaggagcttataaatatttaaagtgtgttctaatataaatactgtgaccctgacatcctggggattgagagaggaagtgatgttactgtgggaactgccctgtggagacaaggacattcctcgtcctctgctcctgctcacagtgacactgatctggtaaagcccccatcctggcctgaccctgccatgggcaccaggctcctctgctgggtggtcctgggtttcctagggacaggtgagtcctcagaacattaagtagttttattttttctctgtgtgtaggtgtgtgtgtgtttgtgtgtgtgtgtgtgcgatgactacagatgttttccttattctgttgccaaattctatttccacagatcacacaggtgctggagtctcccagtccccaaggtacgaagtcacacagaggggacaggatgtagctcccaggtgtgatccaatttcgggtcaggtaaccctttattggtaccgacagaccctggggcagggccaagagtttctgacttccttccaggatgaaactcaacaagataaatcagggctgctcagtgatcaattctccacagagaggtctgaggatctttctccacctgaagatccagcgcacagagcaagggcgactcggctgtgtatctctgtgccagaagcttagcacagcgtggcacagtcgcgtccttcctgctcacaaacctcatccttctctctccttgcacctcctagagacccttaatagaggcctatctttgatcctcacttttcgtgggaaataagtagatttggacatcggctgtcctttgggtagaaagaga

SEQ ID NO: 39476 - DNA, 2300 bp, Homo sapien
ttttccttggctcaccacatcctagcctaagcctttacatcaggtctgcattattggggtccctccttggtcactcaacttccttctatcatagacttcacagatgctggaacaacctgatcccaagataccagagaacaaaggcaggacgcgaagtgacatggagatgcctgagactgccatccatgaatacaggtgcagatgttaataggagccgaagctggtgcacagctgatctgtcccagcccacactacagagaaatccctgaatgtctttgacttcctctcaaagccaaatatgtggccttggtgtcagacagtctctcccagacctctgtgccctcttgcaccaggctttaccccacagccaccttcctctgcacacaaagttcagtggaagatataggtggccttgtctttacgagatcgtgatctgggcagtggaaaacattgtcccataggagtctccccaacactgcccaggctggggccttcagagctcggagcagctctgtgcatatgaaactctgccttgtgttgagcttctctgccaggccagtctcagctggacaaaggaacgcacatcaccatgatgtgagtagatgcagcctctcttccaggcccctcctgcagctctggcctcagaagtcctctttctcaattgctctcaggaaggaaagttcatttgaaattgtatatttgcagacagcattgacaacacaggtctacgtatgtccaatcccatcttccatttgtaacaaatacaaacactgtggtgtgcttcttttcacccctcttttctgtgttcatgcacacctttctacccaagtacacctacagaaattgggttcacctgtacactttactggccacatgcatactcttttctgttaatataccctggtcttattgttccagattggtcgatatagatctaacttgctcctattagctgcttcatattgcataatgagggtagacaggtacattcatgctctattgtctgagtcctaaattctgccaaatcttttctaaagtgactgaatgacctctttatgcttccaagttctcctcaccccagcacccagttgatgaatgcagcttttccatcactcataatcctagcaggtgtgagagctttatcagtttctcctgcatgaggagacagggagagataaaaggatagatgtttatcgaacctaccagagcctacacagtatctcagttcatcctcataaagcatggagaggaatgtgcgtcttgttttatagacgagtctagatgtggctagagtccaggaaggttaatgaatggcattgcccatggtctcagagctaataaatggtggagccagatggaggacagttggcttgcctctgtgtagaactgatagaggggtcactggagtttgagggaggtgaagtctagaaccatctggcgttgtcttcggatcagacgccagggggcagtagagtctgtgtaccctacagcactgaaggtaaaagtatcatggtgttggcagtggggaggtactagagtgggtatgtggttagtggccaggaaccagaagatctgaactttgaaaaaatttttcccatcacaagacgtagcagagacactgatgtggataatctaggccagagaactgtgtgacgagctgttcttaaaatgagggagggaggagaagcaactaagggtcacttcctctacatgaaatggagaggaaaacaatgttaactagaatctcatctgattttagtcagttttgctttgtaagtagttgcaaggtgggacaatttatttttgacattaagtaaacatctatacggcttctttaccttatgaagtctggtggtgaaggcaaaaatggtacggccaatggagtcacagtttgtttaataaataactcagagttcaaatggagactctcatgggccagaaattggtaaatgttcctgcattctaaaattaggaggatcttattttctttgaatcaacagagaaggaagcacaggcagtggggagggacagtagggaactcggcagagtggccacagaatgtggaagacaaaggacatgtaataccaaattctaagctgtgaagttgtgatgcaaccctcctccttctcctaatgtttttcaggtctcagcacagatgcacacctgagggagtaacttctttggaaatgaaggacaaatagctgtgtaataataagtccaccttacaaagcacaactggaaatggaaacaagattatttctaaggccttttctactctaagagtaacttagtagcaagct

SEQ ID NO: 39477 - DNA, 2300 bp, Homo sapien
gagtggcagggacatgacaggatcagagcatgccaggccatgcagtgggaccttgacctgggagcacaggaaaaggccaaggaaatctgtgtctggggaagctgttccctctgtgtgggggccacccatgtacgtgcactgccaaacactgggggcagcctggctgcttttgggaagatgaactgtacacagggtgcagaaggaacaggacttccaaggtctattggatgcctctgtatctgctggccactgactctcactgtctgaccacagttatctgctatgtgtaatagtgactgttttacatctatcttccaaattttacacaaatgtatccttgaccatctctaacccagaatgataacagaaacgtcactctgggaaggcagactcctacctttgcaaagttgacttaacacaatccagcacaggatggattctcccagattaaggcatcagatcacacaactgtctcgacctgccatggtctgtggactcctctccaggggacacctgtgccgcccaggtgaatgtggacacaatttgtatgtagatgttccagacactggtgactaagttttctttaatcgtgtgcctgaactctcactccacccagaggcagggctctgcctcctgcttctgtctccttcctgagcttccgtcctgctggagttgcatggacatcagaaccctggtcagagtgcagcgacctgtggagacagtgggagggaagctcacctcttgctgtcttcctggacctagttcggttatacccaaagcaacttctctggtctccctttggactctgcagtatcagaaatgtgcttcatgaatttgtagctgatcagctcaatgatttgatggccaacccaaagtgaaatcctaagatctgcagaaattgccggcatttctgtgaagatggcaagaatactgtgtgctagagatgccttctctccatgtagagacctggccccaaaacaagacagagcagagagggccaaagagcccaaaacatgtctcagatggttgaagggcaatttcctaggacaatcctgctgacaaaatttcatccctcctattacacgcctgaccacccttctccccagatcagctgagtacccaggatatcacacatcccagcatcttctaacaagggaaaattcttcacatgccagccttcttcctgcaccacattgactaaccctggaaacttcgcctttccagaaaaaagctgtcttctcttggcccagtctagcccagtaggtttaattcatgatttatgtgaccttttaatttactcagaggagaacatatgatttcagagtaaagaatattcattttactttgtataagttggacctaaacagtaaactgagtacttctcttccatcagtgtcttaaattagacaacggtaaaacaaatctttgatgcaagaactttaggtcctggtgtttttcatatggaagatcccagctatccagtccagggcatggaatagatgagcgttaataagtcactctatgcctgagatggttttctattggcatcttttctgagttacagttaacaaaggtgggaaatgatcccagaagaaaggcacgagggcagttcttgagggaatccatgtgataggacagtcattgggcacgtgtgactgggggaatggaggaggctggagcatgaatggggatggcactggggaccctgacttgcaggaaatgcaatgagctcaccactttgtgccctatgttaggggcggtgttggtgcatcctagagtaaatgtccagcagacaaaggagcaagaagcggctgtgggatgacaaggataaactcagagatacagcatgagacctccgggtccagacagctctggagcccaaggcgatgagccatgcattgatgttgttaaaaaggagctgataaatatttaaagcagcacccaactgtgttctaatagaaatgctgtgatcctgaggtcctggggattgagagaggaagtgatgtcactgtgggaactgccctgtggagacaaggacatccctcatcctctgctgctgctcacagtgacactgatctggtaaagccctcatcctgtcctgaccctgccatgggcaccagtctcctatgctgggtggtcctgggtttcctagggacaggtgagtcctcagaacacaaagtagtttcatttttttttctgtgtgtaggcgtgtgggcgtgtgtgtgtgtgtgtgtgtgtgtgtgtgtgtgtgtgtgctgacgacaaatgttttccttattctgttgccaaattctatttcc

SEQ ID NO: 39478 - DNA, 2300 bp, Homo sapien
tgtgattcatttttaaattgggctgtgcagaatacaagcatacatttgtaaatgactcccatcttttatgcaatttagctgtttaatttttagtaatactttttattaaggtataattaatagagagtaaaacacaaatattaatagaaggacatcctggtacattttgacaaatgcatacgccagtgcaatagtaactgaaatgattataaaaaaaatttccgtcactcaagaaagtgtcatcatgctcctttctaatcaatttctatcccagggataaaaacttttctatgtgtatcactgttgagtagctttgtctattcttgagcttcatataatggaatcatatttttattgaattgtttttctccaaaattagtatttctgaagtatattcatatcgttgtatcagtaggtcattcttatgactaatattccattgcataaatatactacaacttgtttatccatgctcctgttgatggatatccatgttactcctgtcttcaactattatgaataaacttgttgtgaacatttttgtggaattcttcctgtggacatatgcattttttttaaagaaatagacttaagagtggaaatactgactcatagtgtagatgtgtgtgctatgcttgcatgtcctcacaaaatctcatgttgaaacttgtcaaggtaatggtattgggaggtgggacagctatgactagggtcatgagggatctgccctcagaaacagatcaatgccctttattgtgggagtgaattaattatcttgggaatggtcttctgataaaaaggatgaattcagtcattttctctgacttcggtgcttgcttccccttccttctgccttggataacagcaggaggccctcagcagttattgcccttctatcttggacttctcagtctccagatctataagccaaataaaactattgtctttataaattgcccattccatggtatttctctatagcagtaggaaagaaattgaaagaaaatatggtacctgagagtgaggctgttgctataatacctgaaaatgtagaagcagctttggttaatgggaagtggctaatggatagaggctgaaagaattgggaggagcagactagcaaaagtctagattcctgaaaacagagcataaagggcaattctggtgaaggctcagggggaaatgaggaacaaggtattgaaaatcgaagtaaatgccatccttgttgtaagtagcaaaaaccttggcaaaattgtgtcctgttctagaactttatggaatataaaaattatgagccatttgctagtatatctgctgaaagaaatatctaagaggcaaagcattcaggctactgtgtgactacttttagccaccaggaaatttaacccagcaagaagggagccatgggaatagattttgcaaaccagcacagatggtgactctacctccctctgctgtcctgtctcccataagccaaactctgtgctgtgagctgttaaagtccaagaattatttctggggaatctgtactcttaataatttacagacaacacaggtctgctttggatctgatcagacagactaaatcttggggactgtaccagtggccactgagaaaaggggctcggaatgttgtcttggatagaaaaatataataagaaacattggtgtgaatctagcatcagaaagatgacgtgaggacagcaaggaagagctggaaactgaggtttactcacaggctcctcaccctccgctgatgggcaggtgtgtgagctccagcatggagcaccacagcactaggtgggagaacggtgatagggtgatggggcagcctgtgagctggggcagtgtaggcagaggaggaactgtatcaccacagaaacttctgccttcacacatccctccagctaggcaggacaggtagagagtccagtgtcctggagcactagacctaaggaaggctgcatggggaggacaaaggacagtgacatcacaggatacccctcccatcaggaaaatcaaggcccagaactcactcggctcttccccaggagaaccaagccctgaatcagatgcagtgcttcctgtccctctgtgccatgggccccgggctcctctgctgggcactgctttgtctcctgggagcaggtgagtcctgggcacaggacagcagccccattctcagctttcccacccctgtgtcctccactttaccttggggaggacctccaggctgtccctgtgctcatcctccatctgcttttcccacaggcttagtggacgctggagtcacccaaagt

SEQ ID NO: 39479 - DNA, 2300 bp, Homo sapien
gactcaacctgccacggtccgtggactcctctccgggggacacctgtgctgcccaagtgaatgtggacacaatttgtatgtagatgttccagacactggctactaaattttcttttaatcctgtgcctgaaatctcgctccacccagaggcagggctctgcctcctgcttctgtctccttcctgagcttctatcctgatggagttggatggacatcagacgcctggtcagagtgcagtgacctgtggagacagtaggagggaagctcacatcttgctgccttcctccatccagttcttttataaccaaagcaagtgttctggtctcccttttgactgtgcagtatgagaaatgtgcttcatgaatttgtagctgatcagctcaatgatttgatggccaacctaaagtgaaatcctcagatctgcagaaattgccctgcatttctgtgaagatggcaagaatacagtgtgctagagttgccttctctccaagtagagacctggcccccaaacaggatggagcagagggggccaaagagcccaaaacatgtctcagattgttgaaaggcaatttcccaggacaatcctactgatgacatttcatcccttgtattacacacttggccacccttccccccagatcagctgagtacccaggatatcacacatcccagcatcttctaacgaggaaaaatacttcacgtaccagcctccttcctgcaccacattgactaaccctggaaacttagcctttccagaaaaaagctctgtcttctcttggcccagtctagcctggtaggtttaattcatgatttatgtgaccttttaatttactcaaaggagaacgtatgatttcagggtaaagaatattcattttatttttataagttggacctaaacagtaaactgagtacttttcttccatcagcgtcttaaattagacaacggtaaaacaaatctttgatgctagaacttcagatcctagtgtttttcacatggaagttcccagttacccagtctagggcatggaatagatgagcattaataagtcactgtatgcctgagatggttttctatgggcatcttttctgaattacggttaacaagggtgggaaatgatcccagaagaaaggcatgagggcagttcttgagggaacccatgtgatgggacagtctcattgggcacgtgtgactgggggaatggaggaagctggggcatgattgggatggcacaggggaccctgacttgcgggaaagacaatgagctcaaccctttgtgcccctatgttaggggcgctgttgttgcatcctacaggacatgcccagcaggcaggggagcggctgtaggatgagaagatgaactcagagatgcagtgtgaggtctccaggcacagacggctctggagcacaaaccaatgagccatgaattgatgttgttaaaacggaggttataaatatttaaagtgtcacccaagtgtgttctaatagaaatgctgtgaccctgaggtcctgaggattgagagaggaagtgatgtcactgtgggaactgccctgtggagacaaggacatccctcatcctccgctcctgctcacagtgacactgatctggtaaagcccccatcctggtctgacactgtcatgggtaccagtctcctatgctgggtggtcctgggtttcctagggacaggtgagtcctcaaaacacaaagtagtttcatattttttctgtatgtaggtgtgtgtgtgtatgcatgtgtgtctgtgtgtgtgtgtgtgtgtgtgtgtgtgtgtgagatgactacaaatgttttccttattctgttgccagattctgtttccacagatcacacaggtgctggagtctcccagtctcccaggtacaaagtcacaaagaggggacaggatgtaactctcaggtgtgatccaatttcgagtcatgcaaccctttattggtatcaacaggccctggggcagggcccagagtttctgacttacttcaattatgaagctcaaccagacaaatcagggctgcccagtgatcggttctctgcagagaggcctgagggatccatctccactctgacgattcagcgcacagagcagcgggactcagccatgtatcgctgtgccagcagcttagccacagcatggcacagtcgcctccttcctgttcacaaacctcatccttctctctctttgcagctcccagagatcattaacagaggcctctctttgctcctcacttttcctgggaaagaggtagatttggacctcggttgtcctttgggtggaaagagaccaca

SEQ ID NO: 39480 - DNA, 2300 bp, Homo sapien
taaacttaagagtggaaatactgacttacagtgtagatgtgtgtgctatgcttgcgtgtcctcacaaaagctcatgttgaaatttgtcattgtaatggtattgggaggtgggacagctatgactaggtcatgagggatctgccctcagaaagagatcaatgccgttattgtgggagtgaattagttgtcttgggaatggtcttctgataaaaagtataaattcagccactttctctgtcttgggtgcttgcttccccttccttctgccttggataacagcaggaggccctcagccgctatggcccattgatcttggacttcccagtctccagatctataagccaaataaatgccttgtctttataaattacccagtctgtggtatttctctatagcagtaggaaataaatggaaagaaaacatggtgctgagagtgacgctgttgctgtaacaagtacctgaaaatgtagaaacagctttagttaatgggaaatggctaatggatagaggttggaagaattcagagaagcagactagcaaaagcctagattgctgaaaacagagcattaagggcatttctggtgaaagctcagggggaaatgaggaacaaggtatcagaaattgaagtaaatgccatccttctcataagtagcaaaaaccttggcaacattgtgtcctgttctaggactttatggaatataaaattatgagccattagctaggatatctgctgaaagaaatatctaagctgcaaagcattcaggccactgtgtgactacttttaggcaccaggcaatttaacccagcaagaaggcagccaagggaatagattttgcaaaccagcacagatggtgacactacctccctctgctgtcctgtctcccataagccaaactcactctgaagttagagaaaagaggagacagttaacatgatacactggagtcagcctgtgaaggcagggtggatctggagggattaacataaactttccagagcactacatataggatggccttgagggtgttgagtccaaagctggctaggtctgtggtgtgagctgataaggccctagatttatttctggggaatctgcactcttaataatttacagacaacacaggtctgctttggatctgatcagatggactaaatcttggggcctctgtaccgctggccactcaggaaatgggttgggaatgttgcctgggacaggaaaatatagtaagaaaccttggtgtgaatctagcttcagaaagatgatgtgaggagagcaaggaagagctggaaactgatggtttaatcacaggctcctcaccatctgctgataggcaggtgtgcgagctccagcatggagcaccgcagcactaggtcagaggagggtgatagggtgatggggcagcctgtgagctggggcagttaggcagaggagcaactgtatcaccacagaagcttctgccttcacccatccctccagctcggcaggacaggtagagagtccagtgtccgtggagcactagacctaaggaaggctgcatagggaagacacaagacagtgacatcacagcatacccctcccatcaggaaaatcaaggcccagaactcactcagctctttcccaggaggaccaagccctgaatcaggtgcagtgctgcctgccccactgtgccatgggccccgggctcctctgctgggtgctgctttgtcccctaggagaaggtgagtcccgggcacaggacagctgctccattctcagctttcccacccctgtgtcctccactttaccttggggaggacctccaggctgtctccagtgctcattatacatctgcttttcccacaggcccagtggacgctggagtcacccaaagtcccacacacctgatcaaaacgagaggacagcacgtgactctgagatgctctcctatctctgggcacaccagtgtgtcctcgtaccaacaggccctgggtcaggggccccagtttatctttcagtattatgagaaagaagagagaggaagaggaaacttccctgatcaattctcaggtcaccagttccctaactatagctctgagctgaatgtgaacgccttgttgctaggggactcggccctctatctctgtgccagcagcttggcacagcccagcagagtcactgacattctgtatataaacttccgccttagctttgacttgagaactgcaggccccacccaggtttcactccttcaagggaagcttttagttgtttggaaggcatgtcttgtgtcctactgagggcagacctttcccaaccaata

SEQ ID NO: 39481 - DNA, 2300 bp, Homo sapien
gacatatgagtacatagagggatgaaagcccagctagcccccagcccccatagaaggaagatcaagatttgacaactaggagaggcatgattacaccatgcagcttgatcaaggactgagaaagctttctagacaaatgacaggtaatgacccacactgtgaatcggtattgaacgtgagatgtcaatatatattcatatatccacttatatatctaaaataagaagtccttacaaaccctgaaaacataaaccctcactattacaggatgtgcaggtgatttggatcctgtgaagaccctcaaacaggattaaaatccagtaggcagaggtctctgattctttgttagctacagaggaagatgtgctatgatggacacctagggggtctgggggtcttcccatccccttcccagatccacacctagaggaatgtcaggcagcacaattcagagaaccaccagaaaagctgtgagaataggactccaatctgaatccagcttctctcagctctgcaccccttgctgtgtaggagtcagtgcaggagaaagctgactgggtgagaagagaagggatcctgaaccatgccagaggagacctgtgaactgggaaatgagcagcaacagcaccaccacagacacacactcgccaggcacagggagaggacagatcctggcctcttgtagcaccagagctctgaacgccctctacctgctcagtctcccatgggatctaggctcttctcctgggcgctggacatgccttggtttctcaaaaccaggtgtgtcctggatgcacctgggggaatctcagctctgaatatgccaagccttgccagaggaaccatgtattttgaaaacccacggggtctgtgttaaaaacaacaatttccctctcagagcatgatgggattccatgttcctgcttagttgtgctttgtctcctgggagcagatggctctggaaacctctgagggaaatccctgtccctgcaactgctgtgcctcagttccaaacattccccatgcagtctcctacgtcctagctccaggttctatctccattcatgaaactgtgctcacacagacctcttgaaagcaggtaatgggtatggagcagcaataggtgtgaatacatcctactttatggcatcatctatgggaagcaatgtcagctggaaatgcaccagcatgaattttatactattgtgatgtagcacttctgagattgaaggtacaatggcatattccaagctggtcaaccaaacatctcactccatcagctggacacacatcccctagtggggtgggattctgtgggtctccttttgccagcagcaaagaccttgctgaaccatctcctctgctttgcttcaaacttttcctccactttgcaggatcttctcaaatctgggtctaacttgcctgcagtgagaggaattgtgactattgtccctcatatgaaagagggtgcccatgaagttttaagagttaagttaggaatgaaaatgagaaattaattgctcataatgcagactgttaggaaccccaaggattaattcaactccctattttttaattgtactactcccatcacaatgtcaagggtaaaacagttctgactttttctaaaggctatggaacatttattgatttcagaggtgacttagaaacacaggaggtgtcgtgataagtagtagagacaaaaaagaaaaagtattgagattaatgaattcatatggggaattgtttaactgttctttttttaacctttagaatgagttgaagatcccaacttagcttggtgcctgctggaggcaacgtttcttcccttgcccctctgagctgtgaattgaaactctttcgggaaaaagacgcggcaattctctccacttcccaaacacctcccactcctacccagaccgtggatgggcaggaaatgcaggaacagagccagaaacaggagatctccaaggaaggttgacagtcagcactgggatcgtctgtgtaaagtgctgctgaagcagccaggtggcatgtccagccgacaatgcgaaaggaaaaagtgagaagacttcccgaaggcggagggtggaatgcgggcagcagccccctggagggctgagtggggaaaacaaaatggacctcacagaagctgtgtgtgtggaaacccacttctgacttatcacttgtcatgaattctatgcttcatggtgttacaccgtttattgtttctgatgagtgacagtaattattttctttcttgctggtacataataaagtggtgcacatcagagttgctg

SEQ ID NO: 39482 - DNA, 2300 bp, Homo sapien
ggattaaaatccagtaggcagaggtctctgattctttgttagctacagaggaagatgtgctatgatggacacctagggggtctgggggtcttcccatccccttcccagatccacacctagaggaatgtcaggcagcacaattcagagaaccaccagaaaagctgtgagaataggactccaatctgaatccagcttctctcagctctgcaccccttgctgtgtaggagtcagtgcaggagaaagctgactgggtgagaagagaagggatcctgaaccatgccagaggagacctgtgaactgggaaatgagcagcaacagcaccaccacagacacacactcgccaggcacagggagaggacagatcctggcctcttgtagcaccagagctctgaacgccctctacctgctcagtctcccatgggatctaggctcttctcctgggcgctggacatgccttggtttctcaaaaccaggtgtgtcctggatgcacctgggggaatctcagctctgaatatgccaagccttgccagaggaaccatgtattttgaaaacccacggggtctgtgttaaaaacaacaatttccctctcagagcatgatgggattccatgttcctgcttagttgtgctttgtctcctgggagcagatggctctggaaacctctgagggaaatccctgtccctgcaactgctgtgcctcagttccaaacattccccatgcagtctcctacgtcctagctccaggttctatctccattcatgaaactgtgctcacacagacctcttgaaagcaggtaatgggtatggagcagcaataggtgtgaatacatcctactttatggcatcatctatgggaagcaatgtcagctggaaatgcaccagcatgaattttatactattgtgatgtagcacttctgagattgaaggtacaatggcatattccaagctggtcaaccaaacatctcactccatcagctggacacacatcccctagtggggtgggattctgtgggtctccttttgccagcagcaaagaccttgctgaaccatctcctctgctttgcttcaaacttttcctccactttgcaggatcttctcaaatctgggtctaacttgcctgcagtgagaggaattgtgactattgtccctcatatgaaagagggtgcccatgaagttttaagagttaagttaggaatgaaaatgagaaattaattgctcataatgcagactgttaggaaccccaaggattaattcaactccctattttttaattgtactactcccatcacaatgtcaagggtaaaacagttctgactttttctaaaggctatggaacatttattgatttcagaggtgacttagaaacacaggaggtgtcgtgataagtagtagagacaaaaaagaaaaagtattgagattaatgaattcatatggggaattgtttaactgttctttttttaacctttagaatgagttgaagatcccaacttagcttggtgcctgctggaggcaacgtttcttcccttgcccctctgagctgtgaattgaaactctttcgggaaaaagacgcggcaattctctccacttcccaaacacctcccactcctacccagaccgtggatgggcaggaaatgcaggaacagagccagaaacaggagatctccaaggaaggttgacagtcagcactgggatcgtctgtgtaaagtgctgctgaagcagccaggtggcatgtccagccgacaatgcgaaaggaaaaagtgagaagacttcccgaaggcggagggtggaatgcgggcagcagccccctggagggctgagtggggaaaacaaaatggacctcacagaagctgtgtgtgtggaaacccacttctgacttatcacttgtcatgaattctatgcttcatggtgttacaccgtttattgtttctgatgagtgacagtaattattttctttcttgctggtacataataaagtggtgcacatcagagttgctgccatcttagacttaactcatcagtatcaggtgatcctgaggctcagtgatgtcactgtgggaactgctctgtggcgacaaggacgtccctcatcctctgctcctgctcacagtgaccctgatctggtaaagctcccatcctgccctgaccctgccatgggcaccagcctcctctgctggatggccctgtgtctcctgggggcaggtgagtcctcagaacaccaagcaatctcattgtgtctgtgtatgtctgtgtgtgtgtgcgtgtgtgtgtgtgtgtgtgtgatgactacaattgttttcctcct

SEQ ID NO: 39483 - DNA, 2300 bp, Homo sapien
atggactacgtacactgggccataaaacaagcatccatgcattaaaagtattcaagtcaaaccaagtgcactcgctggtcacagtgaaacttcattaaaaatcagtaagagaaagatttctggaaaagtcccgaatatttcaaaattagataatagttgtctaaataactcataaagcaaaaaataaatcaaaagataaaagataatttacaattattttaatagtatattttggtcattttttttttctttttgaccaaatactggtgagaatgaagataagtaagacctttcttttttattttttttttaagacggagtctcaatctgtcactgaggctggggtgcagtggcatggtgttggctcactgcaacctccgtctcctgggttcaagcaattctcctgcctcagcctcccaaatagctaggattacaggtgcccaccaccatgctcagctagtttttatatttttagcagtgacggggtttcatcatgttgggcagcctggtctcgaactcctgacctcaggtgatccacctgcctcggcctcccaaagtgctggggttacaggcataagccaccacgcctggcccaaatctttcttttttggggtgagagtaaattgtaaaaccgtttttgatgagtaatttagcagcatacatcaaaagagttaatactgctaacactccttgacccagagtgttttttatttaatgaatttatttcaaggaaattgctatatatgcataaaatgtttgagaatgttcaacagaaaagaaattattttaaactgaacaaatataaaaatatatcaaagttggtatgatgctgccaaagcaggactgaggggaaactgaagaacaggggataattttctattcattctgaggccagaactactctgataccaaaacgagactaagagattccaagaaagctgctgactaatatctctcaggaacacagattcaatgatccttttaccattacagcctagagaatctgacaatatgtaagagggatagtacaacatggtcaagtagggtttatctcagtaatgcattgttggtctgacattcaaaaaacagactatgtcatttaccttatctgtatgaaaaatatgaaaagtatatgatcatatctatagataacttaaacatttgataaaattccatatcctttcttgaagaaaactgttatcaaactcagagtaacaagaaattttcttcacctaaaaaaggacatttatgacatcctatggttaaatagaatatttttgcaagcaaactgataagtcaaagatgcatatgtaattcccagatcaaatactagaaacagcaaaaagaggataaaatagccttttcagcaaatggttctagaaaatgggataatatggaaaaataatgaatctctagccttatctcactccataaccagatgtgggcaaactatggcctccgggcaaatttggcctttgtctgttttcatacagcccagaaactaacaaaaattttacacttttaaatgattgaaaaaaagtaaaaagtattttgttacatataaaaatctaagatattcaaatttcagtaaacataaatgaagttctattggatcatggccacagtcattcgtgtatatattgtcaatggttgcttttgcactacaatgacagaattgagtagtcgagacaaatactgcatgatgcacaaaactaaaaaatttattatttcaccctttacaggaaaactgctgacccttcccataaacaaaatttagtaagagacacaaaaaaaatcccagataatcgaaaaactagaaactgaaagcttcctggaagaaaacatagcaagctctcttcatgatcatggggtaggcaaagatttcttaaggacaaaagaatgttctaaccataaaaaaagcaaattgttctttatgcaaatcccaaaaagttcttcaaaatacattacgaaaaaataaatgtatatctgagaaagggctggattcatattataaagaattcctacacatcaatcataaagaaggcaattcactaaaaacaaaaagttgactagagaattaaaaaaaaaagatatataagtaggcagtttcttttcatgagactaatgtgtttatttctccagacttagatgattgtttcactgatagcatgtcactgtcagctgcctccaggaattatctttggttaaagggaatgctttgcccaggtctcaccccattcctatggcagctggcatttaatgactggctgatatctcccttcctacaccattatttgatg

SEQ ID NO: 39484 - DNA, 2300 bp, Homo sapien
tacagcctagagaatctgacaatatgtaagagggatagtacaacatggtcaagtagggtttatctcagtaatgcattgttggtctgacattcaaaaaacagactatgtcatttaccttatctgtatgaaaaatatgaaaagtatatgatcatatctatagataacttaaacatttgataaaattccatatcctttcttgaagaaaactgttatcaaactcagagtaacaagaaattttcttcacctaaaaaaggacatttatgacatcctatggttaaatagaatatttttgcaagcaaactgataagtcaaagatgcatatgtaattcccagatcaaatactagaaacagcaaaaagaggataaaatagccttttcagcaaatggttctagaaaatgggataatatggaaaaataatgaatctctagccttatctcactccataaccagatgtgggcaaactatggcctccgggcaaatttggcctttgtctgttttcatacagcccagaaactaacaaaaattttacacttttaaatgattgaaaaaaagtaaaaagtattttgttacatataaaaatctaagatattcaaatttcagtaaacataaatgaagttctattggatcatggccacagtcattcgtgtatatattgtcaatggttgcttttgcactacaatgacagaattgagtagtcgagacaaatactgcatgatgcacaaaactaaaaaatttattatttcaccctttacaggaaaactgctgacccttcccataaacaaaatttagtaagagacacaaaaaaaatcccagataatcgaaaaactagaaactgaaagcttcctggaagaaaacatagcaagctctcttcatgatcatggggtaggcaaagatttcttaaggacaaaagaatgttctaaccataaaaaaagcaaattgttctttatgcaaatcccaaaaagttcttcaaaatacattacgaaaaaataaatgtatatctgagaaagggctggattcatattataaagaattcctacacatcaatcataaagaaggcaattcactaaaaacaaaaagttgactagagaattaaaaaaaaaagatatataagtaggcagtttcttttcatgagactaatgtgtttatttctccagacttagatgattgtttcactgatagcatgtcactgtcagctgcctccaggaattatctttggttaaagggaatgctttgcccaggtctcaccccattcctatggcagctggcatttaatgactggctgatatctcccttcctacaccattatttgatgaaatttaaaatttaaattaaaatgaaaaatttttctttcttgtttagaaagacatttgctttatgtctccctcaccaacctgtgcaaaatttgagtttgaggcaggtaaacctgaaatcagcaagagctgtgctgtgtcctgagagatcccgatggtctaatttaggaagcacccagtctccctagtcagggtccttagagcttcctcatagtgactacacactggccacttgggggcactgtggatccactgagtgggtcactgatagcgctgtctgagagagagagggttaagggagacagtcttgatttcgtctctgtatcagggatattaccagatgaaccagaggtactgctggcacaggaagagttaatcatagtcttatcagatcaactgatatgcaacgtgtatttgtcatgacaggaagccatgaactgaagccttgtgtggcctctctagcaacctaggtttgatggggagtgtgatgagggtttcagcagggcagcctggataacccaagccaggtggagataaaggagcatctgcctcagatgaaaatctcagaagctgtgcggatggctgtctgcccggaagcctgccccctctgctcagcacagctagcttcccctgctctgcaggaagctggacaggatgggggaaagcctgagttagctgagctagtcctggagtacagggtgcctatgggagcctacaggacgatgacatcagaacagtgacatcacagtaaaaacctccaaaaaacggtgaggaggagcaaaagccctgctttctcaccccaggagaccagcaacctgagcagggagatgcttagtcctgacctgcctgactctgcctggaacaccaggctcctctgccatgtcatgctttgtctcctgggagcaggtgagtcctgagtacaggtgggacatccctgtatccacagtgttcaattgttgctgaagtgtcaaactctcccgagctgagtct

SEQ ID NO: 39485 - DNA, 2300 bp, Homo sapien
agctacctaggtatgccctagcctggtcaggttggcacctaaaattaaccatcacaaaactcatgagaacacagaggtctgagttctgatgatgagactcctattaggtgatggagactcaggtggcctcccctaaaacaaaaggagaagtcatatctgtattagtcatacatatgtgtatatgtacatacatgtatgtattctgttggttctgtttctctctgaggacgaggtggcctagatccttccctttctgggtaaagggtggaagcagtgtggatcattacttagtgtgttctgatagccatgtgtcactatgtacttgttctttgtgtcttcacatctcttcctgttgcattttaaagcattttcatagtatgtggtgttgcctagcagagcattctcatagcaaaaaaatgtatatatatatacatatgcatatatatattctattggttctgtttctctggagaaacggtatatatatatatatatatatatatatatatatactctccctgtatatatagtatatatatatatatatacactctctctctatatatagtatatatatatatactctctatatatatactctcctatatatagtatatatacactctcctatatatatagtatatatatatatacactctcctatatatatagtatatatatatacactctcctatatatatagtatatatatatacactctcctgtatatatagtatatatatatactctcctatatatatatatatatatatatatatatacacacactatatatatatatgggaagagagagagagaaaaagaaagaagagaagagaagagaagagaagagaagagaagagaagagaagagaagagaagggaagagaagagaaggaaagagattagggaaattggctcacgtgattatgaaggctgaaaagtcccccagtatgccagccatctgcaagctggagatgaagcaaagccagtagcatgactcagtccaagtttgaagccctcagaccacagaagccaatgttgtgtctctcagcctgagaccaaaagcctgacaacccaggggattgctagtgcaagtcccggaatccaaaggtaggagaatctagaattctgatatccaagggcagtagaagacacatgtctcatctctgagagagaatgcaaattcaccctttctgtgcctttttgtttcatccaggcccccagctgactggatattgccatacacattgagagtagatctttcccacacagttcatcaatttacaagccagtctcctccagaaataccctcacagacataccaagaagtgttgctgtaccagctatccaggtatgccttaatctagtcagattaacacctaaaattaaccatcaaactaccagcgggaacacacagaggtctgagctctgatgaggagtctcctgtgaggtgaactaatgtgacagggcataaaacaatatacaaattgtattgatcctgaccttaagactttttgaaaccttcccagatgtcaggtggctcttttaacagaggccagcactgtaggctgacatccagttatccagagtttgagaaaagataaaatctagtaaaaggtacttagaggcaaatttgaggagatgagttataaaggacaccagactgccacgagaatgtcccttagactacataaatattagaaacaattaaaacagcatataaatgaggaattgtatcctaatgggaataaaatatgcagagaggaatgcattttctttctaataacctgcaaagagcatatgcacttatgtctttaaaaatagtctacaaattattcccattctgagctgttaaattgtatatatgtcctataaaatattgttgtatataccataaattacatatatgtatatatttgatttatttttttggagaatgtaaggggtgtggcaggttaactttccagctcaactatttgtcaggggcactgatgtcatcgagtcactgagaacctaagttctatttccccaggcagggctgggagagatgagatcctggcctggacctgaaatgggcacaaggttgttcttctatgtggccctttgtctcctgtggacaggtgagggctggtcacaggtgggcttccttccctagaattcccaaggcctcaatacaagtctttttcttgggattacaacatcagggtctgttgttttctattacaggacacatggatgctggaatcacccagagcccaagacacaaggtcacagagacaggaacaccagtgactctga

SEQ ID NO: 39486 - DNA, 2300 bp, Homo sapien
tcactaaaagaaattaaggaaaatatttttatcctttgagtgaagacttttttagtggaaacacaaaagaacacatgccataaaaaaataatactggatgggcatggtggctcacacctttaattccagcactttgggaggcctaggcgggtggatcacttgagcccaggagttcaagaccagcctgggcaacatggcaaaacctcgtctctactaaaaacacataaattagctgggggtagtggcgtttgcctgtaatctcagctactctggaagctgaggcacgagaatcacttgaacttgggaggcggagggtgcagtgagccgagatggcaccactgcacttcagcctgggtgacagagcaaaactccatctcaaaaaataaaacaacaacaacaaactgacattagttgtattaatcatgtatcgaaacacatgataaaaaatgaaaagtcaagccacagcctggaaaaggcataaggaatgcatgcaaatgaggaagaatcagcatgacaccatttatgttcacaaaagtcccttggctcccctacagttccaggcttcacatgcagttaaagtgctgggaacatatgaagaggttctgaataactggatgtgtgcagaactgatgtgggcaatcccaagtctggcccttagaaataacttgtggcagccacgcgcggtggctcatgcctgtaatcccagcactttgggaggctgagatgggcggatcacaaggtcaggagattgagactatcctggccaacatggtgaaatcccgtctctgctaaaaatacaaaaattagctggatgtggtggtgtgtgcctgtagtcccagctacttgggaggctgaggcaggagaatcacttgaacccaggaggcggagactgcagtgagccaagattgcgctactgcactccagcctggcaacagtgtgagattctgtctcaaaaaaaaaaaaaaaaaaaaagaaataacttgtggcactgtgaagggagtcctcaagtagacacagaaattagctgcaaagactcatgggatatagcatacagttgcacttatggttaagatttattacagtgtcatagtaaatattcagcagcggatcatatgaagaaaacacacaggaggaatctagaggagttcacacattggcttccttatgctctcttcctcccgggaggggtcacacagagctcacttcttccagcaacaaaaatgcattaacacgtgtgcaatgtttctgcctgtggagctcatcagagactcaacaccccagaggctttagtggaggccagtcatggaggcactcactgcctagtatgaacccaaaatccacagcccagaaggaaatctcggtattcagcacaatactgtttgcaatatcagtctaggccacaatgagctactcctctcggttaggagaaactatgtcagtgcagggcactgctcaccagccagcttcccagatgtcagccaaatgccaacctcacaagcaggactttctaagcaccacagtctcaagccttgctgttgactgttttctgtacagatcccttcaattcttttgccatgccctaataaacctgggagctacgcaatacagattgactaatgataatatggaagcagcctggctcactgggtcataatttggtgaaaaaccatgaaagaaagctacttatggcctgctgggctttgtggacatgggaagtaagacttcatagaattaagccaatgagattttaagatttatttttatttttttttctgtagcatagctgttcttatctaatagagttagtatctacaatgggtaaagcattctcataacttactaagacaatccaataaaatggcaatacttagtctaaataggcatttcacagaaaagtaaacataaattaacactaacataaaaataggttcttgggctaggtgcagtggttcattcctgtaatcccagcactttgggaggctgaggtgggcagatcacttgaggtcaggggttcgagacaagcctggccaacatggtgagaccccatagctataaaaaatacaaaaaattagccagtcatggtgggatgtgcctgtggtcccagcagctactcgggagactgaggcacaagaatcacttgaacctgggaggcagaggttgcggtgagccaagatcaccccctgcactccagactgggtgacagagcaggactccgtcttaaaaaaaaaaaaaagaataggttcttaacctcacttagaatcagagtattccaatctgaaacagtaaattatgaatgcaaa

SEQ ID NO: 39487 - DNA, 2300 bp, Homo sapien
tgtgtttgtgtaacagggagggggctctagcaggactgaaacactgtctgtggggaggagtctctagcaggacagaaggatcacatggagctggaatgaattcccttcagtcccccacaaacactgtctgatagtagccctgatctaatttccattgtttagaagtcccaccactctccctgagccatggctggagggcctaagcccagtggctctgaaccattggccatcaggaggcactgaggtttgatggcgtccaaatgtttttgaaacagggctaagtattgcctgagaagttgagtttaaaggaaaagtgtggcttcatcctagcattcagtatctagtttgcaggtgttttgagtggtcaatggaaactcatctttctccactgatgccagtgggttctgttcggcagtgaaatctgaactgtagcaaaccattgagtggagaatcttctgagcccacttgaggggtagatggaggagagccaggagccaacctgaatgctcacagacccatgcagaggaacaagtgcctccttgggagaacatcagagaaaccttagcacctaacctattctagtgtgtcctggacgatggacaggagaatgtaaggggaatgtagaagatgggagtggacaactgtagatgtttccagatatctcaaattgcagtaacaccacaaatattcttaacaagaaccagattttccagaactctggcatttccttccctgagcaatgagacggccctttgggccctgacacaatcatgggtgttttttgttcatttgttttggtgctcaggaagcaggggaggcatgagaatacctggggaatgtctttcctagaaataggatgccccaatttcaagtatttcacatgcagcttgataggtcctgtctccagccacccagcctccactctctcaatgctgttgtcatccagggccctaagctctggtcacacggacggaagaggtagtgacactgtgatgtgaagacactttccaccatgaaattattaattggtgtcaatataaggcaggctccgactagcagcttttctaccacaatgatagacaatttatatggaaaagagatggttctgataattctacactcacaggtcttcacctgataaccttgacatgtgtcccctaggttttaggaacttggatttctttaggctgagttgtactattccctttctctgaacacacatgtcattggttagttcattcatattgattctcagggcttctccaatccctcaagccttcccactctaccactcagataaggagaagtgtgtcttaactaatgttgcataattttttaaaaattgctggatactaacactgcaattcaattgtaaaatatgatagaggtgtaagtgttttagatcccagaagtcctgctcaattttgcatttattgttggatattcaccctgatattttcaggaattagagtgttcttcacccatttgggttaagatatcagaacttactttcaattcattggtgaccagagactacaggcagaatcatagtgaaggcttgatacataatacataatgaagattgataacagcaaaaagggaactagtcattggccttcagataaaatgaaacctcccaactttgtgctcagggaattattttacccctttaggttagagtatgtcagctagttcaatgcagttctaggataaagctgtgtcaattaccctagaggactgggagcatggaggacctggtagaaaagaaatacccaaagagaaggaaaattacacacaaaatcaagaggtcactaattgatatatctattttgagttgcctttgagacttccacgtagaaacatctagcacaggataggcctagagatgtagtgacagatctaatcccccaagccctgaatatgtgagtgaggacgcttggatgaacttccagtctatgaatacattaaacaaacttttagctctgttttagtttacaacaactgttttctaagaacttaagcatttgtggagacaatgatgtcactgtaggaacttctctgtaaggacagcaacatcccacttcctctgctcctgctcacagtgaccctgatctggcaaagcttccatcctgccctgaccctgccatgggtaccaggctcctctgctgggtggccttctgtctcctggtggaaggtgagtcctaggaacaccatgatcctcacataatctcccagtgattattctagtcatttccttctattttaaaattctttttcccccacagaactcatagaagctg

SEQ ID NO: 39488 - DNA, 2300 bp, Homo sapien
gtagaggtgggttttgctttaaattgtgctttgagtggggctgagtgacaggtgtactttgcagtgcatatacctctgagctcgcttaagatgtaggggcacaaggagctgaggtggtgcagggcccatgttctgagcttggaaaaccagagaagcagttcttgtgtcaaaggagccttggagagcctggccccaaaccagcccaggccaaccctacctgctctgtgagagtagaacagcaagaaagggaggtgctacccaggaccacagcagagggaccctgtcgccagggagatgaaaatcacagtgatgccacgaccatatccacgtatgaggcatagtccagtgtgtctcctggaagaagatgaagcctgggcagacataagaatatgtttttgaataggcttcccttggcctgattttaaattccttccatgtgatcatgcatctgtctgtacctgtattttgtacccggcttctgcctctcacccatcagtcccatggctactagaaggtattaaatttctattgacaaaaattaccactaatttggtggcttacaacaataaaaatttattatcttacagttctggaggttagaagtccaaaaccaggctaaaatccaggtattggcagggctacattccttcccgaggctctcagggagaactatttttctctcctattcagcttctagaggccaccagtgttccttggctcatggccccattcaatcttcaaagccaacaaggactgggtgagcctttgctcactctgcatcactctgacactcactcttcatcctccctcttccacattttaggacccttgtgattacattgggcccatctggaaaatccaggacacgctccccatattaaggccagctgattagcaaccttcattccatttggaacattcgtttctccccttgccacataatttaacacattcccagtttctgggaattagacatgtacatctttgagaggtcgtcacgctgcctgccacacttgctacctggttacacgaagtagtaagcaattaactttttgaaggcagaattatggccatagttttatatcctggatccaacagaccctgcaaaaggatagagcccacatggaaatagcccctccagtaacacaagctagtctgcaaactaatgcccttttactttgggaagtgcttttgactgcaggggactcagaagcatgcctctgtgccaacagcaaaaatgtgcccttctcttttgttggcaagtaacttaaccaaccaacccaaaaaaaagatctttctctcagctttccataatctctgagacgaagtaggtttggagaagtggggttacaggggaaaaagccaggtgttaatgatgaaaaaacattgaacttttctaggggtagtaataagatttaattcaagactagaacattttagctgcaaatcttcaagaataagacaatattatcccctttctgttttattgtgggactagagaatgtgagagaggttacattccatgggctttgggaatttaatatggttcaaggataaacacacccaggtttttcactgcagagaagagcttcaaatataatcagttttcaggtcatcagctcagctcttgtatccctaacaatgcagttgacatgcgtcttctcagatgtctaactcctaactcactgagggatactttaagtacatataaaggactagaagcaccaagctaccagtgagaggaagaggagagtttgcagagaagctggcttgaaataagacaatgagttcatctttaaatacttgccatttgaggtgcagatggatatagttggcaggctcctatgtaaggcatgttatggagaagctaccgtgaattgataatatcaaaacaaatatccagggagcctctgcaagtgtgcatctctatttcacaccaattatagttgagttaattcctgcctgattcatctcccagagatgcagcctcctcttaaagaagttgggggtggtggcccattcagtgatgtcactgacagatgcattctgtggggataaaatgtcacaaaattcatttctttgctcatgctcacagagggcctggtctagaatattccacatctgctctcactctgccatggactcctggaccttctgctgtgtgtccctttgcatcctggtagcgagtgagtcttcagaatatttgccatcatcaggctgggcttctgcatggatgatctcatatattttccttattctgacgcccaattctgtcttctttcatagagcatacagatgct

SEQ ID NO: 39489 - DNA, 2300 bp, Homo sapien
ggaccctgccctgtaatgctcaacatattaatgttacgtgagagtgggacagggtcatctctgtgacagtatagtcacagaagcctcttcctgctcaaataagtggccttcattaaaagaaacacagaagaatcttgtttcataagctaatgccaatcactgagacagcaacggtttcaggaacatgagggaagctgttggaatgggctttcctttaaacctagcctggttccatcatgctgagtggtgggggctttaagtcagggcctgagaaggacagcctaactgtggtataagtcagagggctcctcattcctcataagccgacaaatacattaatatcatcagaaaaattaccagggcctgtggtgtcccaaattctgatttcattttccattgaagatcagagcacagaggaaggagatacctcactcatgtgctcttcttgttatatgctcacagtttctttgtttcaatgactctgtaccctggaagaggttagacctggatatgctaaaaaaaaatttttttaatccctatcctagaatattgtggccttgaatcaaagtgttttctatgtttgtgttttcatcttccttcctaagccctatatctaggttttgccttctccatccacaaatctcaggatgctatggagtctgaagacacctgattgcagaaagcacaagaccccccaccagcgcgcgcacatacacaaacaaatacaggaccagaaaggagtggttactgctgattctctaacattacaaaaatatcacggttgtaacttctcaccctgccagtcatatgtttctctgtcacttgacatactcccctctttggggtgttggaggaaaaaatctctgtgccaacagcagagacatggaactagtgtgtcacatccactctatgaacagaattcttactactatttataccctaaaaagcaggccattttctagagtttcaccccctcaccagaaagaatttatttgtgagtattggttgacttactataacaagagactcaagtgttaatcattaaaggaacctgttagtgctttcttagaagtaagaggaagatcacatttaactggagagtgccttattgtggttttcaaggaaggtcaaagctcttacttatcactgctcaatcttcacccgatgcccaaagaattaacataattttgaaccttaccctggagaagcgaaatgggaccttgtcctccagaaatgcagaagacactgtgctgtgggctgggggagtcacggagcacgagagtatccatctccagccctcactggaaataaaatctgcacagttctatctctttccagggcagccaccttgttctctgcatgaggagcatggaggtccagatgcttccaggagggatctggggcaaagctctaactaagcaacacattattttgattttgtgtgtctgggatataaggatggccggtaaggggaacaataaagttcttgagatttcacaagtaatttattgatgtccagaatttgaggtgctgatggtacacctaagtggcaatatgcaccaggcagatcaatatgtgactcgtcagagaaagcagaatgggtgatgtgatgtgcaatgccacagaagcactgcagccaggagaggtgacagctaatggggatgtttggagtctttgagtgaaccaaacacatcccagagtaattgtaatttatttcagtcaatcttctgtacagacttagcattcacctttggaggaaggtcctttgagcagggacagagatggtgatgtcactgacagtcccccttttactctgggtgagaggtctagaatcctcagctcctgtattcgtgcccacaagggcctcatctaggtgaaggctccacctgccccaccctgccatggccaccaggctcctctgctgtgtggttctttgtctcctgggagaaggtgagtccccacaaataaagcacctgcatttttggatattgccagttatgattccaattatgtttcttattctgtccccaaattctatctcttttcacagagcttatagatgctagagtcacccagacaccaaggcacaaggtgacagagatgggacaagaagtaacaatgagatgtcagccaattttaggccacaatactgttttctggtacagacagaccatgatgcaaggactggagttgctggcttacttccgcaaccgggctcctctagatgattcggggatgccgaaggatcgattctcagcagagatgcctgatgcaactttagccactctgaagatccagcc

SEQ ID NO: 39490 - DNA, 2300 bp, Homo sapien
cattactattgcaggaaaatgatacctgtgagaatttccaaaagccagattttgtattgtgtggctggctgagtaatacccctccccacaaagacattcacatcctaatccctgggatctgcctctgttaccttagatggtgagagtagactttacagatgtgatgaagttaaggatctggagataaggagattattttggattagtctggtggccctcaatgcaattacatgtgtccttataagagatagccagggggagatcagacacaaatggagaagagaaggcaatgtgaccacaggagaagagattagagtgaggtgaccacaagccaaggagtgaggcagccactagaaacagaggcaaggaacgaatcctctcctatagcctccagggggaatacggtcctgatgacacctggattttggtccattgatactgattttggacttttccagaactgtgagaataaatctctgtcattgtaaaccagcaactttgtggtaatttttatagcagccactcaaaattaacacactccaatatgtccagttaacctgagactaggccaagaaactcatgttcttataatattttctgcaaaccttgctgtcatgtttttatctgacacccatctcaaactataatgaaagaaaataattttgagacttcaatgtccccctgtctggggtgtgccttccatagttcattggaaaagtctagtctcctttcaagattttattccagcagtacctcctcttgaaagaattttaggcattgttttctgttctcagtgcacatactaaaaagaaaaagacaaagactcatgtctacttgatgtttacatttttgcggggagggagagacagagataaacaaataagtaaggcatatagtgtattagcaggtgatacctgcaatgcagaaaaagaaaaggcagactaaggtgagggagaccaggactgtcagagtaaggagcgttgaaatgacaatacattgttcagagtagggcccaatgaggaagtgacctttgagcaatgatttcaaggagatgaaggaaagagacatgtaggtatctgggggaaaagaattccaggcagagggaggagccagtacaaataccctaaaaaaatattttaggaccaatgaggaggcccatatgactgaaaaattaaggaagggagtggtagactttatttccaagcggtaatggggcaggatggatcatttaagaccttgatggccttaagtgctttgttgttttgttttcttattccaaataaaactgggagctagtagatgatttggagatgagtgacatgatctagcatgttctagagggctgagtttgagagctagttcagaagtaggtgaaagcagggagatcagttaggaatctattgcagtaatccaggaaaaagatgatggtggccttgtcctgagggttagcaaagaaggtgatgaaaaaatggatggattctgagtgtattttcatgatagagccagttgaatttcctaatggattggctatagggtgggatagaaaaagaggatttgggaaccactctaaggttttcagctggaaggctgttggtggagtaaagttgaggataatctttcatgtttagagcatgctgtttgagagtggtggggggaaaatgttgattggagtgcattagagagataatgggaaaagagaatttggaggtaagtattgatcattagcaatagcaacaatagctaccgtagattaaaatgccccacagtctatggggatgtgatacatgagggaagacagggccagatgggatgaggtaggatccagacatcagactcaggagctacgagtggtatatataaggttaacacctagtcaaatgcataaacaggttgattttaattgatgtcagtttttctccattgccccctctagaggcaatcttcttcagagaaccctggctaggtcttctatgtttcatgtccgtagagggagctcctgagactgtggacattggctaatatgctgatgtcactggaggccacatcttacagggccaagagacagatttgctttcctttttctcatacttgtaagctccttcatctggaaatgtgatttacctgggtcctgccatggtttccaggcttctcagtttagtgtccctttgtctcctgggagcaagtgagtcttcaggtacttaaatatctgtgctgtaccctatcccagtctattcatgtcatgtattctgtttttgtctcttcccacagagcacatagaagctggagttactcagttcccc

SEQ ID NO: 39491 - DNA, 2300 bp, Homo sapien
gcaaatattagctatttttagattagctataaataatgaaaaatgctagcataaaagatggaaagaataaatgcagataagggctctaaggtctttacactttccaggaagtgataaaagctgcaatttaaattatacatgaagaagtcaaggatggcaactcctataaacagctgatacttcaaacctggaatgtctagtgctaagcagcccggacccctgcacccagcacacctctctttggcatgataggaggatgagggatccaggtcttctcctcccatgctgcccttggcctttatgttttgcctttcattagtaaggcttctcccttaattatcaccctatgacaggaaattcatcctaagcctggacacgtgagagatggtaactctgaagcagccccctgcggatgacaccaaatgaggccacacccagaacaaattgcaagaaataacaaggtatttcttacagaatccctaagagaacatgtctgtctgcatttaagtgtctacagtcataaatgcacagcatatgattggatcagatggaactgaaagactttcagtgcttcatggtgcccataactctcattgtcctgaagtggtgttggcagtggactcagcagggtgccgtgagatggtgaggctacacacatacgatcgtgaccaagctggctacacagatgggccaaactcaccctgtgatggtagacagagcttaccaatgggttccatgaatggacaatgggcatgctgctgtaataatcccttcgaccatgatggaagtcaggcaagacccaggccatgggaacattgaaaacagtcacctctagcctcaagtatttcctactgtttgccacactgtgcctacaaatatcatttatgatacagcttaaaattttcatgtttgtgaaaattattatcagccttatccaatctgatattttgaatgaaatcacattaaaaccatatattaatttaagaactggcatcttcataatagtgagtcttctacagtttcctagaccactaaaaaatcatggattgctatctcagacttgaaatgggtgatccttattcttctctcagtcagaacagtgaaaggtacagattcatggcagctagtccagcttctaaaagtcaacttctaattgtctactttaggacaaaaaagaaataatatccttaggaaggccaccatggaattcattctatctgaacaatccttacataatatcatttcttataatatgtcctcaacatcgtgctctgcatatatttctccaccatctctaaaaatcctcttagcccaggcctcctcaaactttaatgtgcatgtaaattatgaccttgttaaaatgcagattctaatccaatcagtcagggttggagctaaggttccctgtattttgaacaagagtccgtccaagtgatgccaaagctgccagtccatggaccacaatgagcagccaagctctagatgacacctacaataattacaggtgtaaggcccctcttctcaagtatcattttgcacagttcctggactaggtcagatacagaccctacttaccacatgtatctctgtattccaagtattacgtaatcatcagttttcctaaatctaggcaccaatattttaacatatattttcatggtataaatagaaattaattttctatagtaaatacactaatacctaatcacattcatgcatctttaatgtgagtagcaaaaagccaaggcactatcttaatggttattgagtgagactttagcaaatactatctttatggagaaacctctgggctgctttttaggatgtgagaaaagtgaggtaaagtgaggagaactggatgaacacgggacagagacagggacaggggcaaatatggggacacctgtctcaaggaagcagcaaatgatatagaaaataaatatctgttccatccctgttccagacaagcccatgtacctgccaagtaggaagctgtgtatcacattgcaacaaggaatgaccccggccctggtaaagtcaacagcaacagtcatcacaggccaatctgcctatcagggactggagactctctaaactcccacctctcaacccaggaatcagagcctgagacagacagatgcttcattcctgtatggggtggtattcctgccatgggtcctgggcttctccactggatggccctttgtctccttggaacaggtgagtactgggcagaaaggaaatctttgagcaaagctatcttgtcctcagtctgcacctttcattcacagcagtaacac

SEQ ID NO: 39492 - DNA, 2300 bp, Homo sapien
acacacagaatttggagcaaagcctttagatctctaaagcttgaggccccactgctgctctaagcctgcctatggcaccaggttcctctgctatgagtccctctgcctcctgagggcagtgagtcctgggcgtagatagtctgtctgccttgggcactcacactgtagtctgtttccacaccttcctctggtagtccaatattcacccccattttcctctctagcccctgctcctacactctagtccacagactctgtggatatcctaatcacagagacagaaacagaggtgacactcagatgtgagtgatgaaacttacaatgctgtaaacaagactcaggacttagactgcctactgatgttcattcttgtgccatttgttcagcaaatatgtatttaggaactcctgtataacagaccttgtttccggttctggaaataaggtaataaacaaaccagagagacttgttttaaactcctggaatttataaaccaaagagatgtatgtgatgagaacagtacgactctggataagaaggaacctgttaccttaacactggccagtgcaaacccagtctggcagacatctgtgatcctctagacttgtaaggaatcctatagctgtatagctctttgcatttaagggcaaaactagacaagacagaacctcactctcatgaatccatgccctaagaaagagaagaaacttccctcataggaacattggtgcagtctcgcagttttcttatcaagtaggaaaattagaactgctaaaactttgtgccagaatttaagacaaataaattgcctggatcatgcattatttacaattatatttacaattatatacagatattttccctaatataaatctgttgatgaaccacttatgtggcatataaataggacttattaaaagttagatgcggtgctttagaagatatattaaaattattagagtctgacttaaatttttaatagtaatacaaaatataaagtaccacagccttgttcagaagaaacaggatttctgaaatccaccagaatagctttctaaaagccagtatcttatggcctttagtgggctgaaatacttataatgatggattggaaaaatggatgtttgagtgcataaggttcacgagtataagaaacaattggtacctcctaactatagattgtcagtttcagaggatgagaatgaatgtgccctcatcctcattttaattttgaaagacaatgcagatatccctactatagaatcattttttacatcaccacctatagagattaacaacatagatgtttccagctccctaagaggccaagaagtattaacccaaggtcagattcaggtaattgatcgtgactcacgaattttcagagatccacaatggttgtttttaaattttcagcagttatgtctttttctctggggagagggtattcaaagctcctcatgaggccattctggactacttttcccctcctgccccctgcccataaaacagtttacagaaataggtgtccagaccgtgggctgtagttcaccaactcctgctctagcctaattttgtctcattactagagcatggccattctgtggatgccagtgaagcctttctggggtttctctccaatgccttttaaagctttttcctacacagacacagtttactgtttagccaaaaaattaagataattcctccagacatctggagttcttgtgcagcttcctcctctctggtggtctttccttaaaaattctagctgcctcagcccccgctgattttgtaacctgtttccgcaactcaaaatttgccatgctctgttgctctcttccccattgtgtatgtgcagaaattgcccccatgttttggtgttttggcagaatcccagtcctgtgctgtctgctttccagtggctgaatacaattgtttcacatattctcttaatttgtgttacttgtatagagcaggatgctaaaggcaattggattctacaaagtgatcacgtcacagagaagccgccgacagaggtggagagagccacacagatagccagctgcctgtgctgcctgctcttcccctaattctgccatgagcccaatattcacctgcatcacaatcctttgtctgctggctgcaggtaagtccctgttctgcagttgtcagctccctgctctaagcctttcatccatgtcatcgaactccctcatgggctcagtctccaactcctgtctgctttctttacaggttctcctggtgaagaagtcgcccagactccaaaacatcttgtc

SEQ ID NO: 39493 - DNA, 2300 bp, Homo sapien
gcacatattgttggacttcatttatataaaatgtctagaatagaccgggtgcagtgactcacgcctgtaatcccagcactttgggtggctgaggcaggcggatcatgaggtcaagagatcgagaccatcctggccaacatggtgaaaccccgtctatactaaaaatacaaaaattagcttgtagtggtgcgcgctcgtagtcccagctactcaggaggctgaggcagaagaatcacttgaacccgggaggcagaggttgcagtgagccgagatcgcaccactgcactccagcctggcaatagagcaagactcagtctccaacaacaaaaacagagtctaaaataggcaaattcttaaagacggaaaatagattaatgattgccatgggctgtgggaaggaataaaagtgaaatgacatctaatgataaagaatttctttctggggtgatagaaatattctggaattcatggtgacagttacagctttgtgaatatactaaaaaccacttaattatatatttgaaagggtggatgttatggtatgcaaattatatttcaattttaaagaaaatgtcaacactcaacatgaaaatattcaaaattacagctccaacatcagaataaagactatatttttggatctctaggattctgatatgagtaagaccatgagtcattattatttggacactaaatgttaacatgatcttatttattattcaagtcatacacctaactcctctggggtgcctatccaatggagtgagattgtgccttgtttcctgtatctttctttcactactcctgggacaaagtagactttcacataatttttattcaatgctgcaggatgagaaaggacagaaaaatgggaggaagaggctgggcgtggtggctcacgcctataatcccagcacttcaggaggccgaggtgggcagatcatgaggtcaggagatcgagatcatcctggctaacacgatgaaacccagtctctactaaaaacacaaaaaattagccaggcgtggtggtgggcgcctgtagtcccagctactcgggaggctgaggtaggagaatggcgtgaacccaggaggtggagcttgcagtgagccgagatcacgccactgcactccagcctgggtgacagagtgagactctgtctcaaataaataaataaaaaataaaaagggaggaaggaagatctctcaaacacaggcatcccatgcatgactacagagaatgatacagataggtatgcagaataacgggacctgaggtcagagggggaagtctttttagagtttgttctttgaatcacttatattgaaaattcaagtggaataagtgaaggtgacaaaagtgaattacaaatcttaaagttccctgaaaatgcttgaagccatcccttagctgaggtgtgggagtgaaaaagcaaactgagacaatgtgaaatcattttctatctcgaattttccctccagcaatgttggtgtccacttccctgtctcttaatgggtgcatctatatatcacctcttgtcaatacctctactcagcaacagccagaaaatagaaagattatataagccaataaaaggaaaataaaggaacaaaaaataagaatagtggagagatcatctacttgggaggctgaggtggggaggattgcttgagcccaggaatttgggaccagcctgggcaaacagcaagaccccatttatgaaaaaaatgaataacattatctgggtatggtggcttgtagtcctagctacttaggaggctgagatgaaggactcacttgactgatcctaggagattgaggctgtaatgagatatgattgcactgctgcactccagcctgggcagcggagctagatccagtcttgaaaaaaaaagaaaaaaaaggtgaagagggaaaaaaaagaacgagtaatagaggtgcttacttcacaacactaacctcacaaacacacactaagctaggttgtgtgtataggtcagaacaaaagatctaccatttaactgacatataagattggttctcgaaaccataggacccactggaaatggtgacctcacaggaagatgcatcttgtaggaggcagctgtgaggtctggttccccgacgtgctgcagcaagtgcctttgccctgcctgtgggctccctccatggccaactctgctatggacaccagagtactctgctgtgcggtcatctgtcttctgggggcaggtgagttttcagctaaaggatcaccatcactgggctttgttttgggctctacagcagattctcaaatata

SEQ ID NO: 39494 - DNA, 2300 bp, Homo sapien
ttctatatttcatgctttacatcaataattttatttaatcaccaagacacacaagcaaaggaagtgctttcttccttttcaccaagagaaattatggtcctaggagttaatttttagaaagaaagagacagagagatgggggaagaaaggggaggggaggggacaggaggagaagggaagggaggggaagggaggggaggggaggggaggggagggaagggagaaggaaacctagtaggtggcaaaaagcatttggctcaaagggttatgatttttatctcacatcatgctgcttagcattcttttaggcataatccttgttctgttccttgctgagtacccgtgcaggtttttacggatgctaggttcaagaattcctgctataaaattatagaacatctgagagatgatggaaatagagttggataaatttgtctagaatttagggaaaaggtctggcccacagatattgttcattagaaatgtgtcacctcaactttttgtcttaatgtttgtttttattctcatcactcaacagatataggccacctacagaaaaagatttgttataatttgctttgatgaaacaatttcataaaatcaaaaggcagacaaaagcaaagtcatttcaaatatatgtgcagactaagtccagcctcaccagcttggagtataaaccatgtgattccactgcagtttttgccctttgattttctaaaatcatttaatgtactcctgcccctccctcactttacccaaaaggagaaaaacccagaaaatcttccaggaagacagaagagggacaccggcttgggagcctgagaaagatccagagagatttccagaaaaagaccaaccctgagaccccagcaaggctgcagagaagatggattccaaacttcatgccatttaaagcaccagacatgtaatttaaagaaacagtcttccaaaggtagtgctttacagggaggggaaaaaaaggcaaagaggaagaaagagggtcttctggcaattcaatagtgaggagaaaaagaggaaaaaggggaaaactgagaattctgcaaaacaaaaggaaatcacaaatcaagaggacccacaaccagccccactacgaaaacaaacaaagctcactaaggagtctggattttgctagaatgatggccaaaggaacattagactaggaattttgtaaaacacctcaataacacgaaaatgagcaagatgaaagtaatacccgtacaacaaaggaaaacatctcacctctgttccctgttccctcatctcaaaagcaatcatgagtcagaagataatgtaagtctacactccaaacagaaataaatacactcaaggaagcagctgaggatataagtgaccataaccagaccaggactttaaaaactcagactacaaatggccaaaatgggaagacatcagaaaaaaacacaaattgattgaacccaggagggacatgaaagaaaaagacaaagttatcccagtcatgcaaaataaaagatgaccaagggagaataaacccaaatgaaaatttagtcaggacattgaacaaaggcaaagaaacaagtagcagaatgagaaggacatgagtgaaaccagccagttagaaggcggtcaaagaaggcgaggtcttggtatgattgcatgaggggcctggaacagcagcactgggctctgtgcagcaggacggctaagcagcaggttgtcacagtggccacagcactactggccagaccccaggagtcacagtttccctgagagagctgagggcataaacaatgataagttctccaggggatggacttcttaaatactctgagttcatcattacacattctatgcatgtagcaaaataccacaggcacccacaaataggtacacatattatgtatcaatgtttttttaaaaaaaggaaaaataaatgaattccacattcttgtataatcagagtatctacagcgctcctggagtaacccaaaccttatggttgctggaaagataaaaaaccaatgggccaattggggtgaaactctggcccggaaacgtggggtgccagccccctcagcacagatgcaatgcagagttatgggaggtgcgaatgactctgctctctgtcctgtctcctcatctgcaaaattaggaagcctgtcttgattatctccaggaacctcccacctcttcattccagcctctgacaaactctgcacattaggccaggagaagcccccgagccaagtctcttttctcattctcttccaacaagtgcttggagctccaagaaggccccc

SEQ ID NO: 39495 - DNA, 2300 bp, Homo sapien
aggccatcgcatctattaaataggaagataatttatataaaattttaatctagaactgtatttctttaacataataaacataattgctctatttaaaatcacattgaacataacaaattgtaaattagacaagtcagaaaaccaatttgtcaactgtttaaaaattgaagaaatagtccagaattcttaggaagcagaaagggatatttaacgtgtgagaaaaaggtactaccacaatagcagctttattcccaatggctccaaattggaaaatattcaacatctgacaatgcaatggagaaatgattgtgttacatttatgtaacagaatacaatatagcacaaaaaatcaagtgtaatttccaacacagatatttcaaatataacattgaataaaatatagtagacacaaaataatacagtatgtagtcagaatagtgattaaatttggtagcattatgtatttattctgagggagacatgaggaaggcttttggaattctaaattctatatcttgatctgggtgatgattacatgagtatattcatttcaaaaattcattgggctgaacacttaagatttgtgcagtctatgtattttatacctcacttagaaaacttaaaatggcaagtatattatcttgaccaataatctattgctgtgtgacaaaccactccaaaagttagtgatttaaaagaacaacatattattatctcttgtgattctgtagaagggctcagctggacagttctcacttagggctgctcacatggtcactgtcagatagtcactgaggctgaagatatctgaagactcaactaggctgaatatccaaggtggcttttttgtgcccctgttggttcgttacctgggatggctgcagtagctgtggacccgctgagcatttctctctgtacacagccttttgatgtgattagatgagctgtctcacagcatggtggcctctaggcagctaaagttttggcatggtcgttgaccaccctaactgtgagcattcaagagacccgggtgtggtcaactaggctccttacagcccagcctgagaaatatgcagtgacacctccaccacaatccagccagctcggattcaagagaagggcacccctgggaaggtgaccactggccagtgtgtttcatcaggctggtgtctttgaagaccaaataccacaccacagccatttgaatttgtgtcattacttggtactcttattttttccctgctgctctttttgcattgaagtccttttgggatgacatcaataaaactatttcatgtttttaagattgtatttgtcaagtatttctttttcaacctttctacatgcagcctttttgttgtttttattcttcaggtgggtatttcataagcagtgtgtattttttcagcccatgatttatagaactagaatcctcagtctattgtcttaaatgtatttctgtatagttttctatagaaggtgatttcctgggttttgagttatgtttcttgcttggttttgtacattaatttttctcacattttggtttcttcttccctcatgcatgaccttatttttgttgactatttttctcatttcattattttgcctttcagaagtccgcaattcattttcattttttgatggttaactgtaacattttattatataattatattaagaaaatctgagattagtcttatctttaccattctcctgaagcctatgtgaactttagaacaattaacacctatggttccccttcatgatttccaatattttggatagtcagaatgttagatctaccataactagaagtattgttttattttaccaatacttaattacaattacctacctatgtgttaaccatcatctttaatcgtcattgtttttgcacaaaactttagtataccaactcagagcagaaagaggatccatcatattctgtgtctgccctattaagcatgcttctctgctgcatggcctttgattcctagtagtagatttatcccaggcaaagatgtagagccctattatgggctatcagatctcaacaccaaggatttcttgtgccacagccctttggtgccaggcctctgactctaacttctatctctttttccaacagttctcatggatactgaagtcccccagacaccaagaaaactggtcacattgactaattttaagagatggccttgaagtagtctcagaaaatgaaaagtcatagcacatactagctattgacaatgtatggttttggctatggcaaacccataacacaaatggaagtgtca

SEQ ID NO: 39496 - DNA, 2300 bp, Homo sapien
attaagttttgcattaagctgttatatccatacactatatggaaccctgaaggggctggtgtaggaatctatgaagatggctgactctatgtgccaatagccctgtgagttctcagaaaatttggtggtggcactgcagtccctcctggtcagcagggctggcagtcggtataaagagctggatgtgaagcaggggaaagtcagcataaattggaactcaccggcacttttgatgctactccttactgcctggagccagtgatgacttcagaactcagtagcagctgttttactttccccttacaaacttcctgcatttcttaccccatgatcaactctaacccggaaccatactaggaaaaaagttgtccgaaacatattccttgcttagctaagttgacacagtgataaaaccccacaagaatatccagatgctccttgacttgcagtggggtaatatcctgataaatccagcacaaattgaaaacatcataattcaacttacaatatccagcttatctgtacataaccccatcataagtcaaggagcacactgaaatgcatattgcttttgcaccattgtaaagttgaaaagtcattgaaccatcatgagaccatctgtacctgacaattagtgtttctcaaaataaataggaagattttcttctgatctgaaggtcttccagccactccctcccagacatatcataatattggaccagaggtcacccatagcaagctgtccctacttattctttgcagaaaaagtacagttacagtatgaagtggcctcattttaatgaggcccaacatacccaggaaataaaaaatgcagccacaggagcatacagatgccctttaatagatatgtcaatattaacataatgcaatagctatatttgttataaaacgatttcactattgcacaaacataatatgatgggcgaagtcttaatcttatcttttctagctacctatgccagagaagcagaactaaatattaaatgaaaggcacaattgagaggctgttataaaaatgaaaacatagggctttcaaaaaaactttccagctccttgtaattgctacatatttccaacatcgatccattaaaacaagtatcccagcctgttcaaatcaaagaatttcttatgcctcctagaaactattttcactgtccagtacttagtatgacctccattacaatagaataaatttaattattctcacaacctcaacagtgattaacacggaaacatacaagctaaattgagaaatattattagaatgtttagaattaagtccctttatatatgagggaaattgtcatgagatacacatgaggtaactatctcatttagaaaatgatgaagtggcttcaacatgattatgaagaaacattggacttccagccgaggcactggcctgtgctttatcaatatttatggtagtgccaacctgtgggtctagtgattaacaaccatgagttgtcttggtgttattactttgaggatatgaaacagaagcagcaaacagactccaatgccattcattacctaaacctacactcctttccttataggaaactcacttaagtcattacaatgctttatgtctcagtgtatctttaataaatttggaagttgaattgggaagtctttaggccactttaggcaatgtatgggttttttgttttcttttgatatggggtctcactctgtcacccaggctggagtgcagtggcatgatttcagctcattgcaacctctgcctcctgggttcaagcaattctctccctcagcctcctgagtagctgggattacaggtgtccaccaccacgcctggctaatttttgtgtttttagtagagatgggttttcaccatgttggccagattggtcttgaactcctaaccttgtgatccacccgcctcggactcccaaagttctggaattacaggcgtgagccacctcacccgacctgtatggttttttgacaggcagagatggacgtaacatcagtcatgggcaaagattaccaccagggggcagactagggcatccttgggattctgtgatcagtcatccctcctcgctggtgaatggaggcagtggtcacaactctccccagagaaggtggtgtgaggccatcacggaagatgctgctgcttctgctgcttctggggccaggtataagcctccttctacctgggagcttgggtgggcatgtgcgtgtgttggcatggtcaagtggtggccagcagggttgcaatgtggattgtttatgctcatcgaagggagagg

SEQ ID NO: 39497 - DNA, 2300 bp, Homo sapien
ggatgtgaagcaggggaaagtcagcataaattggaactcaccggcacttttgatgctactccttactgcctggagccagtgatgacttcagaactcagtagcagctgttttactttccccttacaaacttcctgcatttcttaccccatgatcaactctaacccggaaccatactaggaaaaaagttgtccgaaacatattccttgcttagctaagttgacacagtgataaaaccccacaagaatatccagatgctccttgacttgcagtggggtaatatcctgataaatccagcacaaattgaaaacatcataattcaacttacaatatccagcttatctgtacataaccccatcataagtcaaggagcacactgaaatgcatattgcttttgcaccattgtaaagttgaaaagtcattgaaccatcatgagaccatctgtacctgacaattagtgtttctcaaaataaataggaagattttcttctgatctgaaggtcttccagccactccctcccagacatatcataatattggaccagaggtcacccatagcaagctgtccctacttattctttgcagaaaaagtacagttacagtatgaagtggcctcattttaatgaggcccaacatacccaggaaataaaaaatgcagccacaggagcatacagatgccctttaatagatatgtcaatattaacataatgcaatagctatatttgttataaaacgatttcactattgcacaaacataatatgatgggcgaagtcttaatcttatcttttctagctacctatgccagagaagcagaactaaatattaaatgaaaggcacaattgagaggctgttataaaaatgaaaacatagggctttcaaaaaaactttccagctccttgtaattgctacatatttccaacatcgatccattaaaacaagtatcccagcctgttcaaatcaaagaatttcttatgcctcctagaaactattttcactgtccagtacttagtatgacctccattacaatagaataaatttaattattctcacaacctcaacagtgattaacacggaaacatacaagctaaattgagaaatattattagaatgtttagaattaagtccctttatatatgagggaaattgtcatgagatacacatgaggtaactatctcatttagaaaatgatgaagtggcttcaacatgattatgaagaaacattggacttccagccgaggcactggcctgtgctttatcaatatttatggtagtgccaacctgtgggtctagtgattaacaaccatgagttgtcttggtgttattactttgaggatatgaaacagaagcagcaaacagactccaatgccattcattacctaaacctacactcctttccttataggaaactcacttaagtcattacaatgctttatgtctcagtgtatctttaataaatttggaagttgaattgggaagtctttaggccactttaggcaatgtatgggttttttgttttcttttgatatggggtctcactctgtcacccaggctggagtgcagtggcatgatttcagctcattgcaacctctgcctcctgggttcaagcaattctctccctcagcctcctgagtagctgggattacaggtgtccaccaccacgcctggctaatttttgtgtttttagtagagatgggttttcaccatgttggccagattggtcttgaactcctaaccttgtgatccacccgcctcggactcccaaagttctggaattacaggcgtgagccacctcacccgacctgtatggttttttgacaggcagagatggacgtaacatcagtcatgggcaaagattaccaccagggggcagactagggcatccttgggattctgtgatcagtcatccctcctcgctggtgaatggaggcagtggtcacaactctccccagagaaggtggtgtgaggccatcacggaagatgctgctgcttctgctgcttctggggccaggtataagcctccttctacctgggagcttgggtgggcatgtgcgtgtgttggcatggtcaagtggtggccagcagggttgcaatgtggattgtttatgctcatcgaagggagagggagaggccctgctctctagaggtgtaaatggtaaggtgaaagccgccggtcagaggagatgggggattatggccctagggagatgacgggaagattgcacaaaacaaacaggactctccaggagctgggagcacagggagggagtgaggctcagctctgcctggcgtcctgtctgactcg

SEQ ID NO: 39498 - DNA, 2300 bp, Homo sapien
ccatgagataatattaacatactagactggcaaaattaaacgtatattaaatagcaagtgtagtcctagatgtggaacatctgaacacactcatgagctgttggtgggatcacttatttggcttaatcactttggaaagcattttgttatgttatgtaaagttgacatgttgacttgaaaactcagtctttacattgccaggtatggcaacaatcttgcacctagaaaagcagagacatgttcgagaatacaatactgtttgtagcagcacaaacacccagggaaaaattagtgtgcattaattcaagaatgaataaattctagccaatgaatataatgtaatactagatggcagtgaaagtaaattgtctagattgtgtgtcaacgtattatcacagacctaatgttgaatgaaaaaataacattgtagaaaatatataaactagctgattcctcttagatacatttcaaagacacacaaaattaaatactacataatttacagattcttgtgtaaatgctaaagactataatgccaagctagtgaatgacaaatttaaacttcagattacacctacctgggcatgacggagaaacaatgaggaaatctaaaagagtaacatggactgagaaattttcagcaataatctaactcttaagctgattggttcaggcaaaggtattcattttattgcttctatatatgcattgcatatttgtcataaatattgttctgtatagttcaacatttcattatttaatgtagccgggcacagtggctcatgcctgtaatcccaacagtttgggaggctgaggtgggcagatcacttgaggtcaggaattaaagaccagccagtgacatggtgaaagcctgtctctactaaaaatacaaaaattagccaggtgcggtggtgggggcctgtaatcccagctactcaggaggctgaggcaggagactgcttgaacccgggagacaaaggctgcagtgggctgagatcatgccactgcactccagcctgggagacagagcaagatccgtctcaaaaataaataaataaataaataaataaataaataaatacttacttaatgtaaagcagctgctatgtgattttataagtgtgtcaaaagctactatttgtaaagaccgagttgtatgattccttacctgagatggaagggaggggaagaagcaaactgacaagttaaaaaagtaaatagagtgtaaattagttcaaccattgtggaagacagtgtggagatttctcaaggatctagaaccagaaataccatttgacccagcaatcccattactgggtatatacccaaaggattataaatcattctactataaagagacatgcacatacatgtttattgcaccactgttcacaatagcaaagacttggaaccaaccaaaatgcccatcaatgatagactggataaagaaaatgtgacacatatattccgtggaatattatgcagccataaaaaaggatgagttcatgtcctttgcagggacatagatgaagttggaaaccatcattctcagcaatctatcacaagaacagaaaaccaaacaccgcatgttctccctcataagtgggagctgaacaatgagaacacatggacacagggaggggaacatcacacatggggcctgtcgggggatggagggctaggggagggatagcattaggagaaatacctaatgtagatgatgggttgataggtgcagcaaaccaccatggcatgtgtatacttatgtaacaaaagtgcacattctgcacatgtaccccagaacttaaagtataataattttttaagtaaataaatgtatgagtgattttacttaaaaaaaatagcaaaacagtgagtaacagaaaaaaaaaaaactaaaagcaggctgaaacttacactatttttaacagctaaaacaaagtctgccctcctacattctttgaaattgaaatgactctgtcccatgtacagagcatctacaaaggctatggaaagtgatcacgtcacaaggaggttgctgacgggggctaggagagtgggtgaagaagccttacagaaaaagctaccactacgatttctttctgagccaaccatgtgcctcagacttctctgctgtgtggccatttctttctggggagccaggtaaggccctgttctgaactggttgaatttcagttccaagactctctccggtggctgcagtatcaagctccctcctgcgctttttctacagctgctctctccttcctccacaggctccacggacaccaaggtcaccc

SEQ ID NO: 39499 - DNA, 2300 bp, Homo sapien
aaataagggcaatgatttttttttttttacgttgaagacaaagccaaaataaaagtttttatgatcattgtcttgtttatattcatcagatgcctggctaaggaatttactggaacaaatccgtattttcattcatattactaatggagaactctaaccaaaaagagaagaagggaggggacactggaatatgtcatctggagtgtaggcaaaggctgtaaaatgtgcttgggtactcctaaataaagcaacaactattcaaaattacacaggagaggcagaagtggtgaaggaggaggtagatgaacaagagaggccatgaggagttggtaattaccaaagatgactcatgtgaggacatgaaggctcattgtttattaagcctactttgtatatgtttgaaatttttagaattaaaagtaaaaatatctaaaaataagactttaccaatttgacatgcagcaggaatgattagggtaggatgccatggtgtatccatgcatgagggagggtcagtgatatggacaggagacggaaatactgggtagaagagggtggtttcccagcaaaggccccaccctcaagcctggagacctgcagctgtaaatggggacaagcattcctgttttcattcccaaaaagttgtcttttgacccaccatgccccctttcttttacccatataaaccccaaaccccaggcttcagaggcagagaagcaggctaggagacaagcagagggagggcagaacaacgtggcagagaaaaagaggaggaacgtctgaaacccgagaggagttcagctggaggtggtcagagaagagttcagtccctggatggccaaactccaaggggaagatcatcttctcactccatccccccttccagctccccatccatcccactgagagccactgccaccactcaataaaaccccacattcatccttcaagcccatgtgtgacccaattcttccaggacgctgggcaagagctcgggacacagaaagctgtcacactggccctctgcccttgcaaaaaggcagagggtccactgagctggttaacactcaagccgtgtgcagatggcagaactatctgcccacttgggctcctgcatctgtccctctgtgtgttccctttcccctcaggggtttgagcagttgcagcaactgaaaaggtgagcaacactcctgtcgcacgtccttccaggggggtcagggaactcttcctttttcaccaggacgagcacagatctgaagcagcaaagagccagttgtttattacattgaacaatgtttcacactatcaccataactgttctgtacttgcaatctgctgcattaaatattagctctttcctcctaaagtcaggaataatttgtgttagaataaaatgaattctttaatgaacaactgtattttcagctaattcaaaataggaatgaaggcgttaagtacttctttgaagcacatacccacattaaactaacatctttctacaataagccaatatttttaataaagctctgtgcccagaaaacattgaccagaaaagcaggagccactaaaaaataggagcaatttgaaacaaagttaggaatcctgtccttcttacaacaaaaaagtctcaaactttacagagaatgtattcaaattgcatagtttaccaagaactgagttagaataaatgattaaatgcagaaaaaaaggagaagagttataatgtcctatcattcaagtgagactagacttcctttattcgaaattcaatttggttttgaattttctccagcctgttttatcaggaggatgatgtcaccttgaacaactgaaatggatatgccctgagaaaggggagagatacaactctctggtggttgccagtaaagcgccagaaaaacagaagagaagcaagtagaagaatttcagcatctgctaagaacatataatacataagccaacatggcatctttctttaagacccagtaccttgggagggacaatgacatcacttcctgaatcctcccagttttctatttccatgccctgcttccctcaacatccagagctggaaacacctccatcctgcctcttcatgccatggcctccctgctcttcttctgtggggccttttatctcctgggaacaggtgagtttggaacacagatggggaaatcactgccttaaattttccaggttctgaattaagcctatcctcagagattgcagcacgaggatatttaccagtttctgtcttcaatttctgtcttatttcccacagggtccatggatgctgatgt

SEQ ID NO: 39500 - DNA, 2300 bp, Homo sapien
ggaaccgtgatggtacaggctattcttggcaatgggaaatgaaacctcagaggtaatcctacttccatgtggtgcagagccctgagctaggagatgtttatcactgtttgggaaaccagaaccctcagcctttctcccttctgcctcgcctgaagacaggtgagtcctttgccataatatgaagtcttaatttagcattgccacattctggttccagatctttccctcctggctgaatattaagattgcattttgtctcttgtctttcttggtatctcttccctatgcaaacttcatggacactggaaggactacaaaatcctgaaaatcaagaaacctccattgagaaagggggttttactagaacaaaaatgtgtagagatatatacaaaaattatatataataatgtctgtctctgtaattattcacacttagcaattcccagcaccttctccagaggacttccctaactaaacaagaaaggtagtctttggggaaagtgttttcatcaataaaagacaagctatgtgtgagttattcctgcactgggcagcaaggagtgggtagttacctctgccttcgagtaccccttcatttgactaggacctgagactctctcatatctacttccaagcccaggttgagcacttcttttctttcctttctttagttgcttctactgtgaggtatagattttacatccagtcactgctgaagactttcatcaactcatcactcatccttcagtcatctcacactgagaacaactgggagcctcccgttttcctgtttctttaacatttgtcagaatctccccaaacctctaacacctttttttcagcagggggcagtaaaattcaatttattttttctgttctcagcacttactattaagaccagatttcatagtaaagtctaaggccaaatctcattaatgattttaatggttacttttgtcttaaaggagcccctgataggacaagagtatttcagggtttggtaaatcaaaactgttatattccttcgtgacacatgacagaggaagagtaagcaggggcccacatgtgttacatgtaaatacatacagacttgaagacatggtgttcaaatagtagagatataatagtaaaaacccaaagcctatgtcagcatcatgtgaacaaaaattttagtaaataccaactgtagatcttagtgaactagggcaaaggaagtggacaacactgggagaaattctgggattaatctttgtatctcacaatcaaaaccaaagacttttctgttaagaagaaatgggggaaagggcggagggagaatggcacttggtttagacattgtttactgcagcagcacccaaaccatttgtagcagtattaccaaagcatgtattggattatattttctgttctgtcatgattgatagtgcaattaaaggcagatggactaaaatcatcctaggcaaaggctaagttgataaagctgataaagcctgaacaccaagtcagtgaaaaatgagactgagaaagttattatcacacaataataacaccattctgaggactcagtgaattccagttactgctccaagctctttacatgtgtctatataaatagattgccccgtttaatgctcacaagttctcctgctccttgtctgatcaagccacgctgttcactggttccctcttctgcatgttcttctctcttgggtttgcagagttcattcctgttcatccttcagaacccaactcaaatgccacttcctttcccaacctttttaattaggtaaaatcttgctattacaggcactcaaagctatgtagtttttatgttcatagcttacaaaacagttgcaatggaatgttttgtaagaatattaaagacttgagttaagataagcaaagcatcaagcctactttggatgagggaagtcaacaaaaatattactcatttgatgggttaaaaggatatagatgaaactgtttcaacaggatgtctgtgggacccaggaagtttgcaggggctgtgtcatcacacacacacaatgacattatcaagagcccatcctgcttccccactactgggagacatcctctctagccccaactgtgccatgactatcaggctcctctgctacatgggcttttattttctgggggcaggtaagtcatagacacagttcattccaaaatctagaaggaataattcctctttgttgggtttgtgcctggctcagcatcaaagtccatcgtgaactctgttaccaatttttgtctcttcccataggcctcatggaagc

SEQ ID NO: 39501 - DNA, 2300 bp, Homo sapien
cttaaatttaacaacccttgccttccttttctgtctaagggctactggtaggtaggataatgactccgaaaggtgtctatgtcctaaacctcagaacctgtaaatatgttaccatacataataaaagataattaagtttgtagatagtttagtgtgctaattagctaaccttgaggcagggagattatcctgactcatgcaggtgggctcagtataaacacataggtacataaaagtgtatggactatggtgagagtgatgtgacaactttacctgctgttgctgctgaagataatgaaaggggccacaagtcaaggaatgtgggaggcctctagaagctagaagagaaaaaagaaaacattctctcctagagcctccaaagagcaaactgccaatgagaccgaccctggacttccaaccaaaagaactgtaagataataagtttgcgttgttttaagccactaatttgcagtaataggatacagcagtaagagaaaactattataaggctctatttccaagcagctgaaaaaaggcagctgatgaaagaagttgtgccgggaagtagcctaagaggcaaaagtacaaaggcaggagtttgaatcagacgatgccacttttaagggtggatttgtcagagacatgtgaaccacagcaactccatcttaaataggagctgggtaaaataaggttgacacctactgggctgcattcccagatggtgaaggcattctaagtcacaggatgagataggaggtcagcacaagatacgggtcgtaaagaccctgctgatgaaacaggctgtagtaaagacgctggccaaaacccaccgaaaccaaaatagtcccaagagtgacctctggtcgtcctccctgctacactcccaccagtgctatgacacaaatgccatgacatcaggaagttaccctgtatgttctaaaaaggggaagcatgaataatccatcccttgtttagcatataaaaggatataaccataaaaataggccacaagcagccctcagggctactctatctatagagaagctattcttttattcctttattttcctaataaacttgctttcactttatgctatggactccccctgaattctttcttgcttgagattcaagaatcctctcttggggtctggataaggagcctttcctgtaacagctttctggtgatgatgaagggactgtagtgaggaaaccctggaaagaaaggataactttgggtaagtgttggggtcctgtaacatcttcctggcaaaccctgaagggatgatactaagacgacctccccccaacccaaggaaatagactgcagcaccgattggacaactttgggtaagtggtggagtacctacccaggtaaagaatgggattgggatagaggctcaacttaggggagttagagtctctcctaagacagagagggttaaaggcccctcttaataaaaggcaaggacacttgaatgaccttgggttagaggcccgatttaggaggattagaatccctttccaagatttagggggttagtggcccttcttagaaagtctgtcttggtaaagtcctttcgggctaagaacgggttttgcactacaggatgttaactgctattctctttggattaatctgccttcaactccttgctgacagctgtgtgtaacaggattaggcatgtacaggatcatgggacatggggaactattttctccctaaaacagaaaacttgagagctgatgggactgctggaaaagatccttcacaaccatcatgcggccacctgaaccgttcagtgtcactgcaatgggtgggtctttctctggtgtctccgagtgcctccccttccccaccctgcctcaggcagtgctttcttctttctctgtttctctgtctctctctttttctccttgcaaactggttgaattaatggtaaaagtaactgtctcctataaagttttgattaatggaagaaagggtttttgaggctagacttaagctgtagcaaatctgatgtgctttgtgtgtttttctgtattattctgtcataaagaggggtaccttatgatagaacactggctgaggacacttgtaaactgcttttcaagacagaccagcaaactggtcagttacaaactttgctgtaggttcctgagaaaaattggatgagatttttttttgtcttgcatgtccttgggagcttgaagctgtaaccatgtggccatgttttcgcttttcacaatggcatcctgtgttcagggttctattcctgcctcaggggatgagttttttt

SEQ ID NO: 39502 - DNA, 2300 bp, Homo sapien
gtaaaacaactggctcctactgtaaggctattggagcctcaggctaacagcatcattttagtaccttggttgaggtagaaaaggaaacgagagcagaatagcctcatagtcaaaggaacacagaaggagaaaccacattgctgaggagagtgaattagctagtagagggacagaatatagaattagctacctcctaaatcttgaattaatctaatatgaaaagacattgggaaaaattataatactctgaagtgtaattatgtacctgttcaactttgaaacaccacggaatgttgggaaatccaatatccactaatagtgagctatgtggacgcgagtaaattctgaaagattttgctatttgggatgtcaaggtttactaagtaacatgaaattatttacttgcagtgggtttttagaatgaaagttgttttccctctcttaagaatacccgaattcacagctaggatatggaggatttgccaggaaaatgcaaacacctgtggctgaagtagagccaagctctctccctacatttttttccagaaagcagtggtgaagaaatagaaaaagagagaatactcctcttagatcagagctaaggtcctgatagcaatcactcctttctcaatgcatggaatggaaactgttagagctgcacctctcaccatgaaggggtctgggggcaaggaactcatctctgaggtttgagagtaggcctgaaaaccgggaagggggccccttcttgtctggagatgataatgatttggcaaaaacaatgacgggctctgtgaggctctacttgtggtaggaagcttttgggaagaaaggggtagcctccttctattccaccatccaggaatacattcgttcctacaaagtacaagaaggattcaaaggtatacatgtgtcaaaaatcacaatgagcactgtaaatatatgcaatttttattcatcaactataccttaattttaaaaattaagaaaagttcaaaggtgttcgaggaggaaggcattctggggaatcctaggaaagtcacctcaatgtaggaagaacatattcaggcagaaaagagagcagtaccagcagctgctggaagatctaagagaagcttgacactcctggccccaaacactgcctggctacaacacgatatccagggacagataccttccatgtacagcaagctgtggagtggcaagaaagcaaagcacgtaccaaaagcaggcaggaagcagagctggctggtaaggctctgaggttactgcaggaagcaggtgttgcctctgcctttcaccagcttcttctggagaagaacagagaaggggaaaagaagaaagatgctccagataccatctttggtggaaacagctgctagctctagcaatgatgactaagtcaattttgctaaagagcaaagaagctgtgtgtcttggattttaaacagcaatagactagcaaaataatctatgatgtgaatctgagattttacaccctagactcttttaaaatgtagtgactaaaaatatataccagtggataaatgaagtcagggatatacttgaaattttttctgccagagtagaaatgacttcaaaatatatgataatgcagctttcatgtaatcccagctactggggaggctgaggcaggagtattgcttaaacccgggaagcggaggttgcagtgagccaagatcatgccactgcactccagcctgggtgacagagtgatactctgtctcaaaaaaaaaaaaaaagataatgcagctttcaatattataagctttatgttctcacacttctaagtgataatcaaatgtgttacaccactttataccctgagatccaaaatacataaatatttgacagtttgtacaagactgtattaataagaaaatgtggcacatgtataaagaaaggaatctcacagattaaggaaaatgacattgattacaaatgtcctcagcctgagttggctgtgttgcgtttgtacacttcagccctctgagctgaagtgggagtggtttctctcctgaaaatgtttctgaggcccaaatagctgaagaggtggagacgttacagaaaccacctggagcccccagaactggcagacacctgcctgatgctgccatgggcccccagctccttggctatgtggtcctttgccttctaggagcaggtgagtcccagaacacataggcaacttttggccttattttgtaggcctcagcccaaggcatctcctaaaggcttaagcattggagatccccttcagcgctgcctctaactctgtcccc

SEQ ID NO: 39503 - DNA, 2300 bp, Homo sapien
ttcactgtataatagtttcagcttctatagatgtttgaaaattctcataataaaatggaaaataatggcatgattctgtgtattttttaataaaatcaactttgaaatatgctgataagaaccacattgctaattaaagaagtgaagtacaggaaggtttgggctgtgtgtttctgtgtaaaagaaggaggagtcagatttacataaacttgaacaagcaagaactattatttctaagaacatgtagcaaaataattacaagactgtctctggagaaggaacttaccttttgttctctgttataattgaatcattaaccaggtgcatgtattaattcaataaataaacacattaaaattcaatgagagtttagtatccataacattccccgagagaaaaatctagagaccactgcagtttgaaaagcatgaaaagggagaggaatatgtttgctgttttttgttttttgttttccaaacaaagagaatactgatgaagaagcaaagatttggaatttagtaaagaatagggatcatttgttaattttcagaagcttttaggataaataaaatgaaaaagatgctgggttattttggcatagagtttgatacacttgactaaaagatttaaaaatatacctacatgtcaagaaaaactgaagtattctataccttttactacttctacttagcagagtttatcttgagccactgtccgtggcatgtccaataagttgtaaaggcttcacacacactcctcatatgaacaagttgctgaaatattgttaaagtgtcacattttgtccattataaggtaaattgtttttcacaattctattttctttgaaatacgggtaagtcctataatcaatcttcacctttaatgtggtagtactaaacaccacccaaaagtaacaattagatatttaatagaacatcttataatagagagaatctcagaatcaaataaataagatgggttagtttttgcaagcctgtctttctggagtttcctagtattctttagagtgttaggcctatcattctcagttacccaccagactgtactttactaaggcacaggcaactgcaagagtcagacaatacttgatagtgttgatattgacacttgagatttgtgatcgcataggcattgatttgagtcctgactctgttacttactcttggattatatgaacttggataggttatttaaggtctctaggtcttatctgtaaaatttcctaatccgtaaaaatagtgtgatgataataaatagcctagccaaaaaaatagacttaaataaatgtatgaaaagtagagtaagtgctcaaaaacttagctctgcttttatgcaaaaatgaactattttaagcagttacatgatacgagaaatcagcttgataatggaaaaagatcataccattgtggtcaagttttacacaaacatgatctgtttcgtggcctagactgagttgaattagaatagaagaaaccatattacaagtattcaggaattaagcaaagacaaaaaaaaatagttatgactgtgataactgaaacaagggaagagatataagagacaatgcatttaatttgtgaattgacaaataaggtaggtgaggaaaaaagaggcttatggaattcttgaacctaacatgcaagaagagcagggatgccatttgttgggagaggggaattgaggaataagagcccgtttattggtgtgtgtacgtgttgggggaggaaggagttcagtttgggacaaccatgaagacccagcagacagctgaaatactgtaatgaagttcccttatattctaacatattacttttagttctttgaagtcaattctgcaccccactttttgctctacacccagacagtagcacagattggtgttcagtaatgacagatggaaaagtgatgggagaatggtggtgagtggctggtgcatgctgtgagacttgtgcatgaagactcatcctgagtgaagagccacacggttccaccagggggaagactgatttttgcatatcatgcagaaactcaaccacctgttagaggagggaaacagagtgggaaggaactacgctgtaggaaggaaagatgaacttgagtttcacttcttagtgccttttctcaggggagaggccatcacttgaagatgctgagtcttctgctccttctcctgggactaggtatgagccttgtcttttgaggagtctggggttaatgttaacactgggtggaaagactttctctccagagagtctgaagccaccagacagaagatgaag

SEQ ID NO: 39504 - DNA, 2300 bp, Homo sapien
cccattaccataggaagttgacaaatttacctacagtgaagccttggattatgaagcaccttcctatattacaaaattgcctctttaaaagcagtaaagcactgtggttaggaacttgaactttgtcaagtgacagacctaagtttaaaacttggttcttctgctttaacactaggtgtaaccttaacaagttacacaatttctccatgccttaatttctccatagaaaataagaataatagtgagtttttaaatgtaggttttttaaaataagaaagtgatacaattatctgtataaaaagcacatagagacaaaatatgcaattagtgtagttgctacctaaacgtatttctcactataaaaacatattttaccactggcaattccttcctcaagaataagtatggccctctctcagaaaattttatcattacaattgtttctcttttagctattttaattaaataaaaaatttgtggtattataaaatatgcatattatcaaaataaaaaagtcaaaatcactcagtttaataaaattagatcatacaatatgtagttttagaatttattcccttaacccaacaatatttcatgaatatcatttcatgtcaaaaatattttacattaactttaataagaatagttcgatatactgatgaccatccttcatacaatcaaaacccatgacaaggtatatatccataggctagatgacagggttatttaattttaaatagcaattgtttgtgtgcgttgaattatttctgttgcagactcagaaggaaatcatgaaagccctaagtctacctgcagatggctggttcttttttattcaggtgttaacttaaatgccacctccccaaagagacctttcctgaccactctacgtaacagcacttcagcagtcatgccatattatattatcactttatcctattttagtaatatgtactcatcatttactgaaagtgatgtatgtgcatcccatttctatacctcctcatatgtgcataaatgcatgcacatgcacacatgaatgcactgaaaacaagaaccttttctgtcttcttcgttgctgcttccaaatagcctagaagaactcttggaatatcactccaggaattcaataaatatttgtgagtaaataaatacatttcaaagataagaggaaaatttatacagctgcagtggatttccctggtggaaaactctacaaaggcatttgagtttagataatgtaagcccataagaaaattaactagattattctaacaggaaaggaataagcacttcaaactttatattttttattcttgttttaaatttatgttttagttgcggggaggatacaaaaagattaaaggacacaaaattacagctagataggaggaataagttccagtgttttacagaactgtaggaggactacagataacaagcattgtatttgaatagaaaggtccatatgtcatgtgccaaccccgttctgctgccttacccaagactgggaaatggaacagatgatatgggttctatagagaggcaaagtgcagaacctgctcaaacacagtggccctggggtggaaagttctcaattggaattgtgttggtgcctgtgtggatggagcattcaattctgagccttaggagccttttgaaggccctcctggccaagatgatcttgaggaaatgactgacccattggctgccttccaaatggatgacacagtctagacttttataaactacatgagtagaaggaacccagttgactggatttatcaccaaacctagcttgtgagcctcagtctagagctagcataatttagaaaaataaatgcatacatcatatattaaactctgagtatcatgaaacagatcctagatgttacaataataagaacctacatgggtgtttctcctgcactctgtcctggctttcttctgcttcttgtctaagggagcctggactcacttaagcagctctaataggccaaacaagagagtggtcaaggagtggctgaaatgtgaacagaaagactcaccattatattagagcaatcaatctatccttaaaatactgtgggtttagtgtcaagtgctagaggcttccccatttacccatacatggaagcctgaagaataaacagaactataaacttccctctgggcataaaacttgcatgtcttccacggcttcaaggtggggagcagctgggcaggcagaaggaggggcaagaggcagtcaagaggaggggcgggaggcaggcggggaggaatgggctactccgtttagc

SEQ ID NO: 39505 - DNA, 2300 bp, Homo sapien
taaggcaggtgttctgtgaagaccccatgacaagggacaaaatgaaacaacatgttcagggacaacaaaggaaaagcccattttatcaatgctccaaaacctggctacctcaggcttggcaagttattcgtgagcagagaagtttgtcatctacatggcagtcatggcctggatgggtctcgaactgtggcatggtaatgctctgagactaggtgccaggagaaagataaattcaatcatccatttctaccaggaagaaaagcaccaggaaggaatcagatgtacagtttgtcctctggggacctctgccttgatcctcaataaatctccttttagatacctcctcttagatgaaattcccacacttcacaatgctctccatggcttctgttggccttatggtcagctctgccaagatctgtattcttgggcaagacagaatccttctgaatctcagtctcttgctctataaatggaaacaattttgctctgcacaaattacaattagcatgtttgtgggaagttaaagtgtgaaactcagcataaatgaaaagtaatgtaccactgttgcttacatgaaaactcttgtaaagttgtcaggcactgtgcaccatctaagcatagcagtgttaggtatgggcccattagtgattagagggggtgcgaggcggagagggggtctccaagcagtgggtctcctggctgtggggaagctggctcagcggccataccaggagctgaaaccgaaggtactctgtgtgtcctctcaacaccatgggccccactttggcattatttccaattccctctggtttccatttgcttcctccctctagccccctggccaggtccgatttcaacaccaagtttctgagcttttcccattttgtccaccgtctctagaacatttctgcttcttttacctttcaaagaatccaaacttgaactctacttactcctgcccatcaccagcctgagctcagagttgctgagaagggaaagcaccctcataaggaagctcctcctttccctacatcattagacttgagcacagacagcatctccatttccacactgctctggccaggttgtgcctcagtcaattacacaactgtgtcttagtagccttggtagggcccaaatcaggatattctctaggaagattcactttgtactgagccaagcataatctcactgcatcgaaaatagaaaatgatcatctgatcattctggttcagactgtcagccctgagcaggtgggtcagtttgcatcacctgagtgcagattgcaaggacaacagtgaggctgcataaaaagaacctatgacaggatgcacatgagagagacaaatgtcttcacattgaagaaggggaggagtgcgccattggttttccatcctccagaggcactgagaaagctcctacagaaactgtgccccctccttctttgaaacacttcccatccttaagccttggtaggaaggagagaaatctggaagcccagaatcctatggaatgctgagtctcccttctccttaccccttagtgttggaattttcattccccaaaatcttgcatttgaccttcctgcacactgactggagagaagcatcttcatattcacaggaatgagccttagataagactttgctcctctcatgtgggccccaggaaactgaaatccaagctttttaccaacgcttgcccttccttaagtacattaaatacattcccaataggtggaaagatttgtaaacagctaggccattctccctccttctaaccctcatctccagggcctaagaaagcccagctctgttatctggggcttgactttccctgtcttccccatcccagtatccttgcaggaaacagccggtctcgctctctgctctcagaaggcaagtttccttatcacctgtgaatcacaaacccagagagtggccaaacatagccaggctgatgcaagaccctgggaagaggaaagctgcaggtgtgtttgtgctgggaggagtggtgaccctcacctcacagtcacctcctctctggatcctcgtgaggtataaagacgagtcctccaccaccagtcaggcacactctaccaccatgaatccactcctgatccttacctttgtggcagctgctcgtgagtatcatgccctgcctcaggccccaaccacccccccgttcctggccgacaaatgcccttccattcttaccacctctcctcttttgactgtgctctgatattccgtttcctccatctggcatatctccttcccatcctccttgggctcttt

SEQ ID NO: 39506 - DNA, 2300 bp, Homo sapien
agccttagataagactttgctcctctcatgtgggccccaggaaactgaaatccaagctttttaccaacgcttgcccttccttaagtacattaaatacattcccaataggtggaaagatttgtaaacagctaggccattctccctccttctaaccctcatctccagggcctaagaaagcccagctctgttatctggggcttgactttccctgtcttccccatcccagtatccttgcaggaaacagccggtctcgctctctgctctcagaaggcaagtttccttatcacctgtgaatcacaaacccagagagtggccaaacatagccaggctgatgcaagaccctgggaagaggaaagctgcaggtgtgtttgtgctgggaggagtggtgaccctcacctcacagtcacctcctctctggatcctcgtgaggtataaagacgagtcctccaccaccagtcaggcacactctaccaccatgaatccactcctgatccttacctttgtggcagctgctcgtgagtatcatgccctgcctcaggccccaaccacccccccgttcctggccgacaaatgcccttccattcttaccacctctcctcttttgactgtgctctgatattccgtttcctccatctggcatatctccttcccatcctccttgggctctttttaagtctcacctgttcaccttctccttgacttcactcccaccactgtcattcatccatatccgagttgtggttggagaagctgggaagggggccaggtggggctgtcccacgaaatgaagcagcaggcttcaggcttggctccgacagcaacagaatagcaccactatagctgctcctaacctcgaatgcacctggggaggttgaaaaattactcatgccagagactcagctctagaaattctaacttcaattgtctggggtagagcttgtgttctgggcttttaagcttcccaggtgatttttaatatttccagccatgcagccaaggttaagaattgctgtcctattggccaataacaaagtctacctttgttctgccaaagtgagcctgggggctgccctcaactctgccctgactgcacagatctgagctatgggggaaggtggtcatggccaggtctatgcagacagggggttttcctagcttggcaaaagaatcctgacaatccagggcccaaatagccaggggaagtacacaggtgatgaataaaagagagaagcactcagtgggagagacaaccacatcccaactcctatcccactggaagcattgtgaggacattccttgcgacttcagcctggtgaccccaggagagctcggatcctccgcagggtacctagctatgtgccctgcaggcacagagacttgggagccacaggcagtgatgatcaccaggggtggcagagctccctcccttgcctagcctcactgtgcttgttaaggatttctaattagcagaaagcaatcacaggctgggagcgccacccctaacatgctattgacttgccttctcccttcccatctccactccagttgctgccccctttgatgatgatgacaagatcgttgggggctacaactgtgaggagaattctgtcccctaccaggtgtccctgaattctggctaccacttctgtggtggctccctcatcaacgaacagtgggtggtatcagcaggccactgctacaagtcgtaagtgtggggcccccgactgcaaagctcccggccagtctgcctgggagagcttggcttcagcccagggaactactgaggttgggtaagatggatgggagaggtggtggagaagaaaacttgttggcagctgcggactctccagagcagagagtgaacacaagacaggaacctctcacacccaggcaaatccatgaaacagcaagggttgtggtcataaaagcaggcagggatgatcttggggtggtgagagctagtgagaaaagcaggcaagtatcttttgctggttagctacacattaaagccaactaagaaagactttttaaaaatacagatgcctttgtcctatcccagggcaattaagtcaaaattttcaggaagagggtgtgaatatcagtgagaattttacactctacctctgctaactgtagagtgtatagacagagctgagaactgctgcctacaccaagaactctcaaacctgagtatgcatcagaacgccctgcaggcttgttaaggcacaaatcactgggccccttccccaaggttctgatcagtaggtgggggtaaggaccaagaattcacatttctaaca

SEQ ID NO: 39507 - DNA, 2300 bp, Homo sapien
gagcaggctagagagatgttccacctaccatagcgggagctagactgcgacttgggaatcaagccaggtctgcacgctgcattttcatcttctttgcctttggggtaggacgccatatgaatcccacagttaacaccagctccccactctgaccagggaaagaaactagagagggtcaagattcacccatttgatcaattaactgaggtaggtttcattttcatataacttgcttgcctttgagatacttcaagtgacttacgtgggactccttaaaaaaaagtggagggaaagacatctgagcagccactctggccacatgttggctggcttgcacccactggatgcagcagagggaggcaggccccctggcacctctggcacctgccaaagcctcttccaggcaattctgagagggaccatgttggggctgtagctcatccaagcttgtcactgaagatccaagcaagcttctctttgaaattccaccttcatcttctgtcccaagtggttgtggacacccctgggagctggtaacaagggccaggagcagccaaggaagacagacaagttcagagcacatttccagttacagggaacagagcacaggcctccaagtgtccacagagcagtgtgcaaattgcagggatgagtagaggaaaacctctacatggagcacagcattcctggcaaacacaagggaccgcagtccacatgctgtggaataaacccaagtatgcatcggacacttgtttggtaaacagtaaatgtgtaagatcaattaccttgagagggccatctgggctccagatatgtagttcatgtgaggagacggctaccactcactatcttcagaggaaaacagggctcagggcttgcacacaatggagatacacacaggtcacccagaacgtcaatacatacaaacatcactttgttcaacatggattttgtttttatggagtccaaacgcagaccgtagttcaccttacagccttgggtttgtctgcttttggagacatatatccagtagatagatagacaacacagatacatttttttccctttcttactgtaacgtcagtgcctcgtctgaatatcatcatcactcaagaatcaagggaagaacaaaatgcttcatataaacagggctgggcaaggagtcttagtttcccctgttttctgtctccattcagatcattcctatcaaagcccagctggttacctcaagccaagagacagacataaggatcccaatggccttctagatggctgcttccacctcctacctgggccacatagagtctttacacagaaatctgagttagccctgtgagaagggttgacagcacaaacagtgcatgaaaatcacagataaccatggtatatctcgcaagtggtcagtgtaaaataaaccaccaccaccaccacaaaaaacacaaaacaagcagaaaaatgcttattcaaaaatctaagacaaaatactgtgtgagaaacaggccacggggttgccttttctcaggccacacagctttcccattccatgtgctcacatggaccgtgagatgtgaaagtctgcagggcgtgtgctcgggatcgaggctggtactgttcacctgtgggtccagaccaaatggcaaagaggcagaaagctataactctgtccaccgccacggcttagggcctccttctcacagaggctccaaagagcccccacctcagccttcacacaaaacatctccttctggctgaacaacagccaggctggagtgccgtggcatgatctctgctcactacaacctccacctcccgggttcaagtgattcagtctcccaagtacacgggattacaggtgcatgccaccatgccaagctaattttttttttcttttttgtatttttattagagacagggatttacgatgttggccagtgtggttttgaactcctgacctcaagtgatccagagtgctaggattacaggtgtgagccacagcttctggcccaggccccattttttaaaaaataatttcaaattttattttagattcatggggtacatgtgcaggtttgttacatgggtatactgtgtgatgctgaggtttggggcacaaatgatctcctcactcaggaactgagcacagtacccaataggtattttttcagccctttccacactccttctctcttccctctagtagttgcagtgtctactcttcccatctttacatccgtttttacccaatgctcagctccgacttatacatgagaacgtgatatttggttttctgttcccatgtt

SEQ ID NO: 39508 - DNA, 2300 bp, Homo sapien
tgctctggaacatggaagagtcacttcaccttcagaaagctcatttgctcatctgtaaagtgggcaattccataggtggttgtgatgataaaatgaaaaaaaagttcttaacttatatgagtgacatgctgtatagtaagttacatgcctatataggaagcacacagaaatgattcactgttatgataatggaaggacagtggtttggcatgttaagcactaaacagaagccagaaagatatcttagagaagtagacaaagaaatctatagttcagaatgaacagtaccaagaatgacatgtcccccaaattgagcatgggtagctggatctgaacctatcctacacatctgagtctacagtatgaggtaacagtcttcacctatagctatctcctctgcctgtaaggtcattcctttttgaagaaagctgacctcagactatactgtgatcgcttaaggaagagcacaaaatactggagaaggctagtcttcaagctctagatacagaaaatcctcaattcttgggtgttacctttcagaaaaagagtccgagctacaagccctgatccaaaaatccctttttccaaaaaaattctccatcttctaccaaggttcacctccctgtttagtgtacactggtgtctatagttgctagagcaagagtctctccttatcctctaaggcaggagttctgtgaagaccccatgacaaggggacaaaatgaaataacatgttcagggacaacacagcaaaaccccatattatcaatgctctaaaacctagctacctcaggcttggccagttattcatgagcagagaggtgtgtcatctacatggcagtcatggcctggatgggtctggaactgtggcaaggtaaggctctgagaaaaggtgccaggagaaagatgaattcaatcatctatttctgccaggaagaaaagcaccaggaaggaatcagatgtacagtttgtcctctggggacctctgccttgatcctcaataaatctccttttagatgccacgtgcagcaattcccacacttcacaatgctctccatggcttctgttggccttatggtcagctctgccaagatctgtattcttgggcaagacagaatccttctgaatctcagtctcttcctctataaatggaaataattttgctccacacaagtcaccattagcacgttggtgggaagttaaactgcgaaactcagcataaacaaagagcaatgtaccactgttgcttacgtgaaaactcccgtgaagcagtcaggcaccatgcaccatctaagcatagcagcgttaggtatcagcctattagtgattagagagggtaccggggagagagggggcctcagagcagtgggtctcctggctgtggggaagctgcctcagtggccatgccaggagctgaacctgaaggtactctgtgtgtcctctcaacaccatggaccctattttggtatttttttccagttacctctggtttccatttgcttcctccctctagccccctggccatgtccgatttctccagcaagtttctgagcttttctcattttgctcactgtctccagaacatccctgcttcttttacctttcaaagaattcaaacttgaactctgctcactcctgcccatcaccaacattagctcagagttgatgagaagggaaagcaccctcataaggaagcccctcctttccttacattattagacctgagcgcagacagcatctccatctccacactgctctggccaggttatgcctcagtcaattacacgactgtatcttagtacccttggtagggctcaaatcaggatattctctagaaagattcacttagtactgagccaagtataatctcactacatctaaaatagaaaattctagacccacccctccacatctttgttattgaacccaatatgtcacccatttaccatgtgctcaaatccctacctactgctgattctcagatcaaatcataacccagatttaccatggtccaaactctgacatgtgatcaggggcatgtcattctggttcaggctgtcagccccaagcaggtgggtcagtttcaatcaccctgagtgcaggttgcaagggcaaccatgaggctgcataaaaagaacctatgacaggatgcacatgagagacaaatgtcttcacattgaagaaggggaggagtgcgccattggttttccatcctccagatgcactgagtaagctcctacctaacctgtgccccctccttcttctcatccctatgccgtggtaggagggagagccatctt

SEQ ID NO: 39509 - DNA, 2300 bp, Homo sapien
gctctaaaacctagctacctcaggcttggccagttattcatgagcagagaggtgtgtcatctacatggcagtcatggcctggatgggtctggaactgtggcaaggtaaggctctgagaaaaggtgccaggagaaagatgaattcaatcatctatttctgccaggaagaaaagcaccaggaaggaatcagatgtacagtttgtcctctggggacctctgccttgatcctcaataaatctccttttagatgccacgtgcagcaattcccacacttcacaatgctctccatggcttctgttggccttatggtcagctctgccaagatctgtattcttgggcaagacagaatccttctgaatctcagtctcttcctctataaatggaaataattttgctccacacaagtcaccattagcacgttggtgggaagttaaactgcgaaactcagcataaacaaagagcaatgtaccactgttgcttacgtgaaaactcccgtgaagcagtcaggcaccatgcaccatctaagcatagcagcgttaggtatcagcctattagtgattagagagggtaccggggagagagggggcctcagagcagtgggtctcctggctgtggggaagctgcctcagtggccatgccaggagctgaacctgaaggtactctgtgtgtcctctcaacaccatggaccctattttggtatttttttccagttacctctggtttccatttgcttcctccctctagccccctggccatgtccgatttctccagcaagtttctgagcttttctcattttgctcactgtctccagaacatccctgcttcttttacctttcaaagaattcaaacttgaactctgctcactcctgcccatcaccaacattagctcagagttgatgagaagggaaagcaccctcataaggaagcccctcctttccttacattattagacctgagcgcagacagcatctccatctccacactgctctggccaggttatgcctcagtcaattacacgactgtatcttagtacccttggtagggctcaaatcaggatattctctagaaagattcacttagtactgagccaagtataatctcactacatctaaaatagaaaattctagacccacccctccacatctttgttattgaacccaatatgtcacccatttaccatgtgctcaaatccctacctactgctgattctcagatcaaatcataacccagatttaccatggtccaaactctgacatgtgatcaggggcatgtcattctggttcaggctgtcagccccaagcaggtgggtcagtttcaatcaccctgagtgcaggttgcaagggcaaccatgaggctgcataaaaagaacctatgacaggatgcacatgagagacaaatgtcttcacattgaagaaggggaggagtgcgccattggttttccatcctccagatgcactgagtaagctcctacctaacctgtgccccctccttcttctcatccctatgccgtggtaggagggagagccatcttcaagcccagcatcctatggaatgctgagtctctcttctccttaccccttaatgttggaattctcattccccaaagccttggatttgactttcccactgagtgactggagagaagcatcttcatattcacaggaacaagccttagttagataagactttgctcctctcctgggagctccaggacactaaaaagccaagcttgctaccaacgcttgcccttccttaagtacattaaatataaccccaatagtaaaatatattcctaaacagccaggccattctccctccttctaaccctcatctcctcggcctaagaaagcccagctgtgtgatctggggcttggcttcccctgtctttcccatatcagcatccttccaggaaacagccggtctccctctctgctctcagaaggcaagtttccttatcacctgtgaatcacaaacccacagagtggccaaacatactgatgcaagaccataggaaggggaaagctgcaggtgtgtttgtgctgggaggagcagtgaccctcacctcacagacacctcctctccccatcctcgggaggtataaagacgggttctccaccagcaatcaggcacactctaccaccatgaatctacttctgatccttacctttgttgcagctgctggtgagtttcacgccctgcctcaggcctcaaccaacccttccctggcagacacatgccctgccattcttgccacctctcctcttttgactgtgctgtgatattctatttcctccatctggc

SEQ ID NO: 39510 - DNA, 2300 bp, Homo sapien
tttttttttgacagagtctcactctgtcgcccaggctggagtgcagtgactcaatctcggctcactgcaacctccacctcatgggttcaagcgattctcctccctcagcctcccgagtagctgggactacaggcgcacaccaccatgcccggctaatttttttgtatttttagtagagacagggtttcaccgtgttagccaggatggtctcgaactcctgacctcatgattcgccctcctcggcctcccaaagtgctgagattacaggcgtgagccactgcacctggctgcaatcaactttttatgcaggcatttggtagcatgttgcgaggtccatcactattaatgccgtgaatataccaaatcctctttttctttcttccctaagttctaagggccatgccctggcaccaaacttatggcagtcctagactgccctctgatgttcaccatggcttacctctgccctgttctagttggggacaagctgtgggtcccaagcctggcattgtaacagaaacgcccagggtaattttctgtttgtttatttaaataaataaataagtaaactcagtcttggagattttaactcaataggtcatgaagactactcagaaatctacatttttcacagttgtccaagtgattaagtcctcactgagcaaattcaggacaaggaaacaacttcttacataaattctacataacttcatacataacttcacacataaacttctttggcaaaaaaaatgactttgtaaattaaacaagtaggtttttaaagtagcatattttatttaaagccaaattttcttgatttttaaaattaacttaagtttgactttcaatagacaatagagctatatgactctaaaatggaaacaacccagtaacgttgacactgggaaatgtaacttttacttccgctctgtttctgtctactccacccattctttcttttctttttttttttttttttttttttttttgttttgatagagtctcaccgtgtcgcccaggctggagtacagtggcgtgatcttggctcactggaacctccgcctcctgggttcaagtgattcttctacctcagcagcctctcaagtagctgggattatagtcacctgccaccacgcccagctaatttttttttttttttttttgtactttcagtgaagatggggttttgccgtgttggtcaggctggtctcgaactcctggcctcaggtgatccgcctgccttggccttccaaagtgctgagattacaggggtgagccaccgcacgtggcctactccactcattcttaataggtcatcactcttgtcagtttctgttgtatctttacagtgtttctgtatacaaaatgtatacaaaatcaagtaaatacaaaagtataattcttcttttcccccctctgttagacaaaggtgtcatctagttatgctattctgagactttctcttttctgggttaataatgtatcttagagaattttccatagcaatataaaatattttgattctttttttagcattgaatattactccattgtgtgaacatatcacagtttatccagtcccttactgatgggcatataattcaattttgtcagtcaaattagtgaaaagtgtattttgatgaagtttttttaattttatttttcttattgtgattttttttcccttatagttaggtaccatttggatttatttttctctgaacaatttactcttcacctatttttattgggctgctggattattttcctattgatttttaggagttcaccacatgttgaggagattagccctgatggtgagaactaggaatatttttcccagattgttatgtatattttgattctgtttatattttaccatgcgagtgtgtcatcattatgtcgttgtttgtcttttttttttttttttctggattttaagtcatagcttaaaaccctccgagtgacgcacagcctcggggcagggccagggtagtgatgggggctgtggcttctctataaggacatgccccaacgtgacaacagcttggagaggggtgggtactggagaagaccagccccttcgccaaacagccttacaaagacatccagctctaaggagctcaaaacatcctgaggacagtgcctggaggtgagaaggaagcccccggcctggtccataccccaccaccaacttgcataatggggggtgatgtcacccaccctccactcccctcaaaggagcagctgctctggtggtctctcccaggctctgggggcggacccatgggaggggctgt

SEQ ID NO: 39511 - DNA, 2300 bp, Homo sapien
gggaaatgtaacttttacttccgctctgtttctgtctactccacccattctttcttttctttttttttttttttttttttttttttgttttgatagagtctcaccgtgtcgcccaggctggagtacagtggcgtgatcttggctcactggaacctccgcctcctgggttcaagtgattcttctacctcagcagcctctcaagtagctgggattatagtcacctgccaccacgcccagctaatttttttttttttttttttgtactttcagtgaagatggggttttgccgtgttggtcaggctggtctcgaactcctggcctcaggtgatccgcctgccttggccttccaaagtgctgagattacaggggtgagccaccgcacgtggcctactccactcattcttaataggtcatcactcttgtcagtttctgttgtatctttacagtgtttctgtatacaaaatgtatacaaaatcaagtaaatacaaaagtataattcttcttttcccccctctgttagacaaaggtgtcatctagttatgctattctgagactttctcttttctgggttaataatgtatcttagagaattttccatagcaatataaaatattttgattctttttttagcattgaatattactccattgtgtgaacatatcacagtttatccagtcccttactgatgggcatataattcaattttgtcagtcaaattagtgaaaagtgtattttgatgaagtttttttaattttatttttcttattgtgattttttttcccttatagttaggtaccatttggatttatttttctctgaacaatttactcttcacctatttttattgggctgctggattattttcctattgatttttaggagttcaccacatgttgaggagattagccctgatggtgagaactaggaatatttttcccagattgttatgtatattttgattctgtttatattttaccatgcgagtgtgtcatcattatgtcgttgtttgtcttttttttttttttttctggattttaagtcatagcttaaaaccctccgagtgacgcacagcctcggggcagggccagggtagtgatgggggctgtggcttctctataaggacatgccccaacgtgacaacagcttggagaggggtgggtactggagaagaccagccccttcgccaaacagccttacaaagacatccagctctaaggagctcaaaacatcctgaggacagtgcctggaggtgagaaggaagcccccggcctggtccataccccaccaccaacttgcataatggggggtgatgtcacccaccctccactcccctcaaaggagcagctgctctggtggtctctcccaggctctgggggcggacccatgggaggggctgtttttgtacaaagctgtaacattgtggggacagggggccacaatgattcaactctacgggaaacctttacaaaaacctctctggcggtcccaactcccagagtcctcttctttcctcctgggtcacaggtcttaatgcaatttggttcagaatgcctctgcctcactcctgatcacatgtcagaccaagactgtggacaaggacaggcccagatgagaactaaagcttcccaggcagagagaggtcagacataagaagactgcctcaggaacctcacaagtggaggactcagggagggtcccaatccccaaaaattgagacaaagtcaggtggaaggttcatcggaggtgaccagctctccagaggactcgggaagaagtcaggggtatctatagatggagtcacaggttctgggcccctgccatcctctgcaggccatgcactttccctttcgatggaccctcacagagggagcatctgaatggggcatcctttgaaaaaggaacctaggaccctgtggatggactctgtcattctccatggtcctaaaaagcaaaagtcaaagtgttcttctgtgtaatacccataaagcacaggaggagatttcttagctcactgtcctccatcctagccagggccctctcccctctctatgccttcaatgtgattttcaccttgacccctgtcactgtgtgaacactgaagctttctttggacaaggcaccagactcacagttgtaggtaagacatttttcaggttcttttgcagatccgtcacagggaaaagtgggtccacagtgtcccttttagagtggctatattcttatgtgctaactatggctacaccttcggttcggggaccaggttaaccgttgtaggtaaggctgggggtctctaggagggg

SEQ ID NO: 39512 - DNA, 2300 bp, Homo sapien
attcattctataacacttctaagcacctggagtgtcccaggcaccaaacaaattatagcaaaaaatttacattaaactttaaaaaggaattcattactttgctttttaatagctgcaggttgcagcatactttaacaatgcattctatgctctccacctaccattaaaacttggtttgataagacataggcaattaggatgcaaagccgactaatcacaaatttaaacctctttgcatcctgagtatgacacttcctttgaaaactagatgcctctcaaattttattaacaagacaaatataactaattacacaagccttgagcagcaaaaacttcatttcatattatagtcacctaatatgaggtatatcatgaaatagaaaagaaggcagatatttttactgttatgtcaatacaggatacgttgcaaattactacaggaatttctgggttttataaagtaacaactacggtttggttttgtccatatttttattttaacataatctagttatgtgtcttttttttaagttttcaatataaccatagatgtctagcaatcaggcatgttaatgtatgagttacgtaattccacacacaatgcaaattctgtttctttgcagaagtctttgaaagccttggagataaccagaaaatgaaggaagccctccaccactgagtttcagggcaaagggaagaaacaagataaagtagaaccgtcagtacaagtggaattattaatgacgtccaaatgcagtcattaaatactatcagacttatttattgactcctgatattaagagtgaacaaacccctggccaagtgggaacttgctcggtagcctttatctttctatcactcattcagtcaattcattaaagcctgtttgtctctcccaggtgactcttactgagtttcattgttttgtttattgtgtttgttggctcatagatctctttcacaattttcttcggcttctgaatgctctttaagtaccagttttgatcagcccatttgctttaataaacaggagagcaagatgggacagggcgatacagggagaaaagggggcaaagggaatcgcaccgggtgcttgtgctccctagaaaaaccagcaggtggtagcaacacttcgtggcaaggccccagcccagctctgtaggacccaaacaatagaccccaaatccccgtcctcggctagagaaggggttagaggtgggcggaaacacttttcctcgcggcgccccctcggttcctcaaccctgcctccaggcgccagctgagagcaccttgcaccgcccctcctcactgcagggaggttctctccggagcgcgggcgagggaggaggcacccagaggtgcagcgacttgcccaagccatgtcagagccaggcgtacagcagcgcttccccttttcaacccgactgccctgccccttggggagggtagatggagggaggttcgactcagaagccccaacgttgaccaagatccagacacgaaaagagaaaagagttcccggctagcacggcgacgctttcataccgagacgcccccctctcccgctgcctcggctccccctaccaccgcccgtactctcccagatttctcagtttgtctttccctccaccccctgcttttccttccttctctcttgctcagctcacgcccaccttagttcaaagctgagtaggagccccactgttttagttcctagagttaaagccgaagaggagggaggcgcgagggggtgtgtgcagggctctgccctgccctgaactgccacggtccgccagttgcgcttcgctccgcgggtgtccgacccaagccgagcccgagcccgagcccaggcaggagctttacagacagcctcttcccttcccacttcctgcaggcgccccacgcgtgcgatcctcccggccaagacccgcgggaggaggccgcccccttcccggcgcacaggcggggccccgggcgcgccccgcgtctcccccgcgcgccggggcggaggagcgggcgccgcgcactcaccgcctaggccgggagggcgggctcggctccccggaagaagggagtgggaaggcggccaaaggggctgaaggggcgggccgggccggcttgggaggggacgcggagggggcgggccgggctgcgttcgctccagccgcggctctacagcagcgggcggcgggacccgggacccagcttggcgacggcgatctcgacgcgggcccccaggatctcccggcgccccacctctggagcagcccctgccgccagcgtcaggtccaccccggaat

SEQ ID NO: 39513 - DNA, 2300 bp, Homo sapien
gttgtcattacgaggcatgctaaggctatgcaagcacgccctattgcaaccacaagtgactgtgttccttgtagttcgggtcatcaaagcaaatatcttgctattcatcttccagagtgttccatattggacagctgatactatctgcagcgcatcttttctatcttgcttggctgtctttcaaaataattcattgaaatatttccaaaatatttattgttccttcttcatgattatttgcctagttgtaagcttgagaagacacagggcttactgtttcttctttgtacagattacagaatccatccatgttctgagtgaaagaaagagactattttaaagaataacttctaggcaaatggtaaaatagccttcattgtttaaaaacctgctgctggcattttctttccctgataacagtatttctaaggactccgtgactctggtttgcttcagtgtgtcaagcacgtctccaaattaagccattgagagtttggaggggatgcacttacaacatgaattactttaggatatttattaaacagccactggtgacggtgccaaggttacagaatttaatagctatgcctgctttttacttcatgatctccccgttcctctccaaagcatttatttcatctgtgaaggatcctagtaacatttcagacatttttgcaaagaacattacttaagagcaatttgccatatggaaatgctccttacttgtctccataggctgtaaattgaactctctatttcacaaatagggttaaagatgtataaaaggtgagtttcaggggctagttggcaggtgcccactctacatcagcccacgcgtatgtagaaatggtgtatttccatgataacttcatggacagcacagcccgcagtgccagaaaaaaattagtaggaatcaaattatgattttcatatttgttgcaattaaagtttcatagtttgatttttgttttatgatagctttcaacaatcccaaggccatatatatccaggaaaaacaaatcacaacttctcttctaattggctttttttttgttttcctctcagttctatgtcttttgagcaatctgggcaacatgtctcttttttttcttcacagaaataaagggattatagtccacccaattcacagacttctgagactcagacacgaggagagatagagaaccgccaatctctagatcaacaagcaaaggaggtgccaagcctgtttgtcttcattgtgacactggaggtagctattccttctgttcatttgctcgtgagcttagtggtgtaccttctgaaggcacaggaaggttttatataagaggtagcttactacatagttctgagaagccattatgaggatatgaacactgttttgattaactttactaaacagttattatcctatagttttaaagaaaattttaatcaatgatttagttgaaagaatacacatgcaagagtttaagaatgcaaaaatttaaatggatacaattaatgagaatacaatgaaagttaagtctcccttgcactgggtctcagtccacttcctttgcctttttcacaggttttggatgctcttccatagatatccttccatacatatgtatgtgtatatatccttcttaacaaaggggagcttactttacactgttctccattgtcccactttcacttggaaatgctttttatatcagtgcatcaacagttgcccgtatttctttctaaggatgtactataattttactgtcttccaattgatggacagttagtttacagccttttctcttataaacaatttgcaattaatgtctttgttcaaacatctgtgcaaacccatacaagtatacagtacctgaaggacacattcttacaatgtagttgctggaaagatattacccaattgtcctcccaagagaatattccaatttggattcaagcagagtatgtacaagagaacctatttcccatatcttgtccaacatggtaaaaatggtgtcttaggcaactgtggctgccataacaaagtgcaatagacctagtagcttatacacaatagaaatatctttctcacagtctagatgctgggaagtccaagatcagggtgccggcatggtcagttcctggcgaagcctctcttctaggtttcagactgccctcttctttgttgtgtcctcgaatggcagaaaaagggtgagaaagccctttggggtctctttcatctgggcactaatctcatgattagtgagggctccaccctcatgacctaaaatttcctcccaaaggccccatct

SEQ ID NO: 39514 - DNA, 2300 bp, Homo sapien
gatggggacatcagggactttaggccagtggccacatgataccctgtgtcctccccaggaaacacagtgttacacatcctcatcctccagcccaacaaaacctttgcctgccagatgtacaacctgttgctgtcctacgacagacatggggaccacctgcagcccctggacctcgtgcccaatcaccagggtctcacccctttcaagctggctggagtggagggtaacactgtggtgagagacggtccccatccctgaggtgtctttctaatgaccctcaacctatcccgctggccctgggagaaacagaggtgaacgcgatccctgatgcttagatcccattctcaactcagaaatttttcaacccctcccactgtggttacctgttccctttcttgcccactccttttcccctgaggcattgggggttacagagtctagatcccatgctaggattgtctgtaatgccccagcccaccttccctttcagcccccagagcagggccctccagcctctcgtctctcctttccaaactctggagggagtcatgggagaggatgaggaacctatgaatgtcactgtgaatgtgggttcttctgccctctaaaggctgtcatcaaaatgaaagggcagccaccttctccaggggtgctgtcctcctgcacatgcatcctatccacactctgtgaccgtcccctttgcttactgctcctgagtcatcttcactttcccttagatgtttcagcacctgatgcagaagcggaagcacacccagtggacgtatggaccactgacctcgactctctatgacctcacagagatcgactcctcaggggatgagcagtccctgctggaacttatcatcaccaccaagaagcgggaggtatggctcatgacagcaggctgtggctggggaggggtgtcagggtctctgagccacctgttctctttctgttgcaggctcgccagatcctggaccagacgccggtgaaggagctggtgagcctcaagtggaagcggtacgggcggccgtacttctgcatgctgggtgccatatatctgctgtacatcatctgcttcaccatgtgctgcatctaccgccccctcaagcccaggaccaataaccgcacgagcccccgggacaacaccctcttacagcagaagctacttcaggtgacacccttgtaggagcagatcagcagggcaggacttggctctctgtcctcagagactggtgtccctttcctccctcacaccatttctccccttgctctaatctcaaatatatgggtacaaactccaaatgcacgcccacaaaaacacacatacgctcttactctgagagcagagtttgagaagacccaaacctaacagattaaaaagaatctgctaagactggtgaccctgggcaccatggaaatgcagggcagaggcctgaaagccctgagcattttgactgttcttctcccccattaggaagcctacatgacccctaaggacgatatccggctggtcggggagctggtgactgtcattggggctatcatcatcctgctggtagaggtgaggtgtggatggactctgggtgaggctgtctgcccgaggaatccagcccaagttccggtatctgagtgcctttgtgtctccctgacctcttcaggttccagacatcttcagaatgggggtcactcgcttctttggacagaccatccttgggggcccattccatgtcctcatgtgagtttccttcctctcactcccatcccttccctcaacagggctccagttccactccttggattcctgacctctcaagaaccttagctccagagccccctctctagtgctgtgtgtatgaccctgggcattgagtgtggggaggctgaatctgcatgtgtgggtactttcccagctacattcttgctgtcaggtccccaggatcatcccagccctcccctcatcaccctcctccctgctcccccagcatcacctatgccttcatggtgctggtgaccatggtgatgcggctcatcagtgccagcggggaggtggtacccatgtcctttgcactcgtgctgggctggtgcaacgtcatgtacttcgcccgaggattccagatgctaggccccttcaccatcatgattcagaaggtcagtcctccccccaagctccctagagaaaggccccagagccacagtcagcagacggtcccataaagggcagaacagtagacattgcaggttctgcaagccacacatggcctcactgcatgtttttcttcttttttaacaatcctttt

SEQ ID NO: 39515 - DNA, 2300 bp, Homo sapien
tatggtccactgttcttttgtgttaagccctgaagatgctattgttgggagggaagcgccaggatcaaagggttctgctgagaaggttgagtaggcagaggatggtgcaacaggagaaatcctgctagcctgtgcatatgactccctccacaaatatgagacaggaattccttgcacccctcggtccatgcaaaacaaggcttatcctggagggcaatctcagggcacctggtgagggtcaaacaggaccactccaggggtaaactggttagcaggtaagcacatgtctacatagaactcctcccctccgtacctgaaatgcactgataatacattcacacatgatacattctggtcccaggacccggtagcggggaatgaaaccagtcacggacaatctcaaaacgcatgctaaatgggcaaaaagttgattgtatttactgactgtaaagagaaaagacatcaatggccccacctgccttgattgaagaccctgaggttcctgctgctgaggcacacacatctgtgtataataatggagtcaagccagggcctctccctccacaactaggtatgctcactgtttccagctttcctattccatcccttcataggatctgggagtctcctctccttctagctgccaaagataatgatgtccaggccctgaacaagttgctcaagtatgaggattgcaaggtgcaccagagaggtaagaagcacaaatgcagcatgatctcctaggtgagccccacacatggggcctcccaggagtgcccaggacctcgtgctgttggcctctgaatctatcgtctccaatccgctgtcccacagaagccatataacccacctctctgtaaatgccaggagccatgggggaaacagcgctacacatagcagccctctatgacaacctggaggccgccatggtgctgatggaggctgccccggagctggtctttgagcccatgacatctgagctctatgagggtgagggcccacgggtctggggtgaagagcaggagtgactggttgggtatttcaagtcagtctctgtgatggataatttgggaaagacacaggggatctgagcctcctactctttttttctcttctctgtctcccttccgtgtcagtcctgactgcccatcacttgaacgcctgccccctgaaatgccaggggcctagagaagaggaagagatgggcagcagctggatcccctgggaatcctgaacacccgagagctccctgttctccatcccaggctacccctgagggaaagagactggggtgcatatgggagggaccccctgcaggatcctggggacagacccgtgactgacagctgtctctgggccaggtcagactgcactgcacatcgctgttgtgaaccagaacatgaacctggtgcgagccctgcttgcccgcagggccagtgtctctgccagagccacaggcactgccttccgccgtagtccctgcaacctcatctactttggtgagagcagggctgggcttggaggacgggcagttggaaaggtgggcaaggcagggcagggccaggcagaggaggatcctgtcttcagccgtatctgttgggcagctgggaggagcaatccttctagggcttaattagactagaggccaatttaccccacgacccttcctctggttctgcaggaaaagtgtcctcaagccctgagctgagatgtgggggaagataaggctgtcacttgggggagactgtccaccccatcctgccatcctgcactctcctaccatagatctctctgtgtccacaggggagcaccctttgtcctttgctgcctgtgtgaacagtgaggagatcgtgcggctgctcattgagcatggagctgacatccgggcccaggactccctgggtaagagctgagatggggaggggagctgggatgctgcagggagtgagggacagggtgaggagaggggctgggaccttcaggaagacctcagggtggggatggggacatcagggactttaggccagtggccacatgataccctgtgtcctccccaggaaacacagtgttacacatcctcatcctccagcccaacaaaacctttgcctgccagatgtacaacctgttgctgtcctacgacagacatggggaccacctgcagcccctggacctcgtgcccaatcaccagggtctcacccctttcaagctggctggagtggagggtaacactgtggtgagagacggtccccatccctgaggtgtctttctaatgaccctcaacctatcccgctggccctggg

SEQ ID NO: 39516 - DNA, 2300 bp, Homo sapien
caacccagcccgaacccactgacccaggtgggtggggacgaagctaatccaattgaactgtttgctcaggactgcgtggcctggcctctgcccagcggcaggaacacaaatagctttccacttgaaggggtccttctctcccctgccctacctcagcatccacctccctccacacaccgactccccccacacacagcacatatgacacacaccccatgacatacatacacacacaacacacaccatacatacacacatagtaaacccaccatacactacacaaatcatgaatactatacaccacacacacacacacacacatcatgtacacgcacacataccttaaaggtaccatatacatcacccactacacaccatacacacaacacacatgcaacaatctttccacaatacgtatatacacaacacacatgtcacacataccatcacagacaccacatccacacgctctacaggccatacctacacatatcacatatatcatacacacgtagacacataccaaacacaccacaggcacatcatatacatacagcataccacacacaaaacaccccaccgatgcacatcatgaacacacacataaacaccacacacaaatgcacatgggcacacacgccatacacacgccacacacacactcccctggctgggtcttccaactctgagtcagagaaagttaggacaaaacagactctgaagctaggaagtgatccacacacctgtgactctgaacacccagacacctgcccctaggctattggcacctggctggcaccaggaggttggataagcccgggcttctgcccctttccagtggaaaagttgaactaaatgacctttccgacagcttccagcaagctcatgatggagctctttgttgtgggaagacgatgggccatgcttaatgccatcattcttctgtatgactgtgcgagtcacttaacctctctgaagctctgttggccagttagaatgaggaggtgtgctagggagaaagaagtgggcttggaatgagggatgggtgtgaatcttgcctctgccacctctatggccttgggagagttcctttaccatggtgagctttggtttctcccatcaatacaatgtagataataatacctgccttgcaggtttgttacgagtttacctgggaacgctcagttaaaaggcccagcacacagtagcagctgaatgtcacctccacgggaaggctggcagatagaatacttgcaaaacgtggggtatatttatactaaaaaattctttgttgtttatctaaaattcaaatttgaccacgtgtcctgtattttatcgggcacccaccccatgcacggggcattgtggacagtctgtggagctcccgagcagggggtctgcccagagctagattttgtgccctggctggtgagcgaagaatgcattttacatctttgggggtggttagaaaacaaccaccaaaacaaaaccaaagaataacgtacattagagagtgtacatggcttgcaaaacctaacatctttacatttcctatcagcccttccagaaaaagtttgctgacccaaaggtgatggggactgagaggaaagtctgggagaactgagaatcttcgcaatttatatacctatttcaggcctggcaagaatgaaactggaagagtccagaaaatggaattctccaggacataagcagggggaggcagagagtgaggcaggtggtcggcagaagaggcactgtgggaaagtgtggcgctccctcctgggagtcctcaacattgggaatgggcctgccctgactcctcccctcctttctcactgcctagagtctctcagggtaggtcactgggtgttctgacgtccaagggaggcctcgccagtctttctgaaggcctccctggttgtgactggcctgggggcagggagagagccctgggtggagaaagaattggagttggcacaagtcccccttggtaggcaggtctgtggctggcctgtgtctttaaatctcaggtaatttgggaggagggagggcgtgtccgtgcagctttggctcctcctgctcactcccagcaggagctccagacaggccagccctgcagagtcctggctggctctgccaagtgtaacaaactcacagccctctccaaactggctggggctgctgggagactcccaaggaactcgtcaggaaggcaggagacaggagacgggacctctacagggagacggtgggccggcccttgggggggctgatgtgtccccaaggctgagtcccgtcag

SEQ ID NO: 39517 - DNA, 2300 bp, Homo sapien
gaacactagctcctcttagtttccttatttattttcctttcaattcttgtccttctctaaaggttattttgtccatccctcaatcttgggagcagatctctctttcttacaacaaaagaagggggcagtccccactcctcaagacccccagagggagagtcccagcgtatcctcacgctggtctctcacacctttacagccaaaagattcccaagaagcaacaaggtctggagagtggtttggagctgagatcccaagttcatggccagttacagtctcgccactagccatgggacttggggccagcacacccaagaattctcacagacggaattcttccttgttctcatttacctgataggtctattgagtgaatgcaattcaataatattgatgtacctctttgaaaacaatgagaacagaattgaacaatgagaacacttggacacaggaaggggaacatcacacaccaggacctgtcgtggggttgggggaggggggagggatacattaggagatatacctaatgtaaatgacagttaatgggtgcagcacaccaacatggcacatgtatacatatgtaacaaacctgcatattgtgcacatgtaccctagaacttaaagtataataataaaaaaaatgagaacataaatacaagctatcatatacagtagtcaccttttatcctcaggggatacattccaagacgccccagtggatgccaggaaccttagatagcaccaaaccctgtatatactatcttttttcctacacgtacatacatacatacatacatacatacatacatacatacatacatacatatgatgaagtttaatttatacattaggcacagtgaagagtttaggccgggcatagtgactcacgcctgtaatcccagcacttcaggaggccgaggcaagcagatcacctgaggtcaggagttcgagactagcctggccaacatggtaaaaccctgtctctactaaaaatacaaaaattagccaggcgtggtggtgggcacctgtaatcccagctactagggaggctgcggcaggagaataacttgaacctggaaggtggatgttgcagtgagccaagatcacaccattgctctccagcctgggcaacgaaagtgaaactctgtctcaaaaaaaaaaaaaaaagagtttaacaacaataaaatgaaaattataataatataaagttatgtgaatgttctctttctctctgtctctcaaaatatgttatagtactgtactcacctattttccaactgtggctgaccttaggtaactgaaccatcagagagtgaaactgtggataagggaaactacttaatatataaaatataatataaaatatataaaatagtgcaacattacttattcctcctggtgtttcattcctggaaagagtcccaaacatggaatcacgatttatttgtcgtctacctttgctcagtttctgctgttcaacctccataataactcgaggcccctgggggctcctctgacctgcgtccccaggtaccagagcctgctcggcgacgctccaggaagctggccggtcacggtcatgaggacttctcacagagagggattggcctgggaagtgggggtcagaaaccctcctttgaggtacagggttgaggacagagatgaccacaagacacataaatgggaagctctgagaagcagcccgggggtctcttgagccctcttgtggaaggaggatcggcagtgattgagtacttgtgacacatgctttacagatgctcccgtgagacggcatagccgttaccccaatttcacaggttaggaactgaggctcagaaagctcacctaactgtaagggataagagtcaggatttgaaccaggctctgcctgactcttgagctggaagtctttatttcctcctctccctcatgcaactaactgtgcaccttgtttgtggacccaccttccatcccttttctttttccaaattcctctgccccacctcttagcttctcgggtctcagccatcccagcccacagttaggaaccttccttcccctcctccttttcttccccagggtggttctgtggctgtggggctcagctctgcaaagagctcctccccctccaggaaaagcacttctccccaggcagggcggtcagtcccctcagcgcacctgcatgcacacacaccacctcacaaccacacactgcatgcacacacatacaccacagccacacactgtgcatacacgcacaccccacaacccacatactgcatgcacacacacacacctac

SEQ ID NO: 39518 - DNA, 2300 bp, Homo sapien
gacaggagaatcacttgaacccaggaggtggaggttgtaggtgagctgagatcgtgccattgccctcccgtctgggcaacaagagtgagactccatctcaaaaaaaaaaaagtgattatcactggatggtggaattattagcctttttggggttttgtatttttctatattttctactttgtaataagaaaaaatatttaagggattccctgttttctgcaagaatttatctcttttaacactgcggaggtcaggcgggtggtggtggcaaggaaatggaagtaatggaaacaactcagttatttccactcaagcctgcccgggaggcaattctcaccccagccgccctccccattcattcccacagagctggagatggcttctctttttgccaggaaaccaagaggctgctcccccaaaatagccaggagggaggagattagtgatggttttttccattcaagcatcattctttggatctcacgtcaatgggttcaaggtggggtgagcagggtcacctgcctacttgaatctttccttactcaccttcaagcgacctccgtaccactccctagtcccttgtcatctggcttggaccatcaggaagtgtgtaagagatggtgtctgctgtatgtgagacagcatccatgtgggcatgtctgctaacacgagtaaactctgtgggaaagcatctctttgtgtgtttctgtctgcagttccctcttgcagaaagggtgcctgtctccgcagtgtccttggacctgcatgtggtatttcattcaggtctggtatgcatggatgagcaggagcagtgtgaactggttatgagagttcaggagtgactaaagtcttctcttacctgtcttagcagccatcctgcatctaatggcctatgtctctgttgctggttttcgaaaaaaggccttcattctgtctccctaactcacaaccctccaaccatctctgcccaagaagcagttgggggtgattacccacagccggttactgccaacagatctgtgctcaccaggctcatgggcaggaggcgcatccaagtactgaggcaggattctcccagatctgttatttgggatcctagactccctgccgcactgcggcttctctgcagactctaactccttttgccaagcaatgaggttggagatgagcctctaacaaccttttctttcgtctaagagtacagaaaggtgtaaaatgaaagaagagggtgtttcaacctggtggtacaagaggacaaaggctagaaaagtgggaaaaccaggggagggtgaagagagggtgtgaatgggctctaccagctgcaaggcaccctgctctttgtctctcgctctctctccgttcactctctcttcatctgtctctctgtctctgcgtctctatctctctgtctctacccctcagtttctgcctgtctcggtctctttctttctctctttttctatgtctctgtctgtctctgcctgtctatgcctgtctctgtctctgtgtcttttatacacacacacagcatgtgcttttacccatccttaccctatgctcctccccatctttattttctggcagacccatgcttcatgtagagcagcatgttcatacccacgacttgagaatcctgtccggctcatctgttctgggcctcatcctatgcaaaccactcttgttacagaaaggccacatagaatagtgggaagatatcatatttaaaagtaaaagttaatcaagagtccttttctgccccttagtatttgggcgattttgagtgagagagtcattttttctgtgagcctcagtttcctcatgaatgtaatagatatgagaacactatgattttgcagtcctggtttctacgtggatctaatggtgtaatggatatgaatgtacattgcaagctgttaagtcatttctgctaaatacagaatgacccactgtggtcatcttggaagcctcggccatccctgctggctgtgctccattcttgtgcctcgccattggaacgctctagtgagccggaatgaagttcaggcccatggctgtgatgtcacagaacatgtgaagtcagaggtcctatggaaggtgaggggagaaaatgcccctggaaagggttaagggccaggacaggaatggggcaggaggtgcacggatcctgctgggcactgggagcagggggcggccaaaggcagtgggtgggcaggtccatgcctcccctggccccccagctctgcagggcagtgttcctggttcctatcttgctgctgctgcaggtgaagcctctgaacggg

SEQ ID NO: 39519 - DNA, 2300 bp, Homo sapien
gccctatccctgtggctggctcagcttctctgacagggagagaacctaagtccaggctgtggtggctgtccataggcaaatgtcacagagcacactccatcttcaactttctcttatcaaatctaagtggtctccattatcatcttcctagggaaacatcagctcaggggctttgattgatagaaaaggagtgaggaagggaatatgtgtgaaggaagctaaaagcccatggggagagtattggactttctgtggaagggaagtttgaagaggaggcaccatcagggtgtacccacacagaccaaacacctctagaatcctgagtcagctttttcccctcactctgattcctactccccccttaatcaaaattccattgttcgctggcatcactattcccctagtcatgcagaaatgcaacttggagctcctctgtggctctatcataaacccctcctccattcaatccattgccatgactttattccatacaatttttctttctacgcacttccctcccctctgccatccccttgggccgggccctcccttcatcactcctgcaacaccaaactaaccactctgtttcttgtcttttatccaatcagtccagatccccaataccacaccggcgtttcttagatattattgtatcttgccacacctttcctcaaaagccttatttttcccaatgctttcttttctaatgtatgaagttctgacttttctttatgactttcatgatacccgaccagctggccccagggggcacaatggctttactccacttctccacacccaccctcatcctggcaagtgcaccaaggccctagcacagtgctgatggaatctggaaatatcgccaggggatcatttgcaagactaacctaataaattacattatttttttcctgggatgaggaaacaaggacagagttgaaacaccttcccccagaaatgtgcttgcctctctcagaccacaggtaagggcttaatatgatgtgagaaagaggatttctggcttggaatgcaattcatttctattaacatttagaaagcatcttgggtgggcaggaatgaaaaccagacactgtacatgctatgacatagttttcaatcactaaggagatgaagaggcaagctatcagtgtaacagaaagcagaatgaaagaaagaggggctcagtaaagccttattcttttgtagaaggcatgagatcctatgaggtaggcataggcaagtattaccctcattttccagatgacaaaacttgcttacctgcctcagagtttaagtggcttgtttattgtcacagagctaataattagcagattagggtctcctagctgggtgatcttttgaatgcatgactttgccagcagccagcagagctatgaaacaccgagagaaacaattaagcatgcttgggaacagtgtgaatgggcatggagctgggaggcctcctgggaaaggtggcatttgacctgggaattgatgaatcccagaaaagccaatcagagaggtgtgaaaacaaaattaaaatggagactgggcctgaaaaattcccaggcaaacaaagccaaagaccttaaaaatagccatattcttgctaaaactacaaacataaattaaacttaacttgggtcaatttctgataaatgcttacaacaaataaaacttaaccccagccaatgataagcagccaactaacatatgattatgtgactagggactttccaaaaagttacctaaaaaatgcaattatgtaactgcaaactaagcaaataatgtttcattttgcttctataacttcccaataaatgcttgcctctgacattttgtcatcgcaacactaaacctttgtcggtctggtgctccccaattcatgaattgcttcttacttaaataaactctttaaaattttactgtgcctcatattttttttaatacagaagaaatgagagaaggaagaatattttagaaataaaggaacttcatgggcagagtcacagtgcaagacaaaaggagcagaccaagggcaagattgcttggggagtgaagactccctccctcttctcccctgagaagctgagataaagggggaggagaagcctgggtgccccccactgataagcaggctccacccagaggccagtcctgtgtgtctggggacaaggcgaaagagcagcagaagtgccccttctccaggatcaaggaactggggcggggggtgtttcctggaccccagtcctccgaatcagctcctagagtggaaccaggaaggattctggagccacaga

SEQ ID NO: 39520 - DNA, 2300 bp, Homo sapien
cccagtgggaggtaattgactcatgggggtggttacctccatgctgttctcgtgatagagagtaagttctcacgagatctgatagttttataaggggctttttcactcctgtgctctgcacttctccttgctgctgccatgtgaagaaggacgtgtttgctcccccttcggccatgatcataggtttcctgaagcctccccagccatgccaaactgtcagtcaattaaacctcttttctttataaattacccagtcttgggtgtgtccttatagcagcgtgagaacagactaatacaacagtttaaatatgtataatttcaatacaagatttttaaaagtaaactcctataacccacacccagatatagccattgttaatattttaaaatgcatccttttactctttttctggatgaagatagatggctagctagtttgattgattttgaaagtaattataaatgaaatctcattgttacaggttatttttatttatttatttatttttgagatagagtgttgctcttgttgcccaggctggagtgcaatggcatgatctcagctcactgcaacctccacctcctagattcaagcgattcttctgcctcagcctcctgggtagctgggattacaggcacacaccaccacactcggctaattttgtatttttagtagagatggggtttctccatgttggccacgatggtctcgaactcccgacctcagatgatccacccgccctcagcctcccaaagtgctgggattacaggcgtgagccaccatgcccggccttgttacagattattaaaaacagttgattgacacaataacttaagaaaataaaatataatagcagcatggtgcctggataggttggtgattgagcaatctaccaataaaaaaaaaattaagagtgttgttgcaatggttaagaggaaacagatccttgaactagggtggtggatatggataaacaaaggagggctagatgcttccagtttccagcccagatgactggggaattgggagccataaacatggcctttgcgggaggggaggactaggtgtgtatctttagatgtgttgaatgtgtggtggtggtcaatctggtggttagagatgtgggccgggactcagaggaggacaaaatccagatttgaaattcatttacattttaaagattgctttggttaaagaaggtgagatttctgaaggagaaaatagagaatttttttaaacaaagataagaaaagaaatgtggggtcatccatgtttagaaaatggcagaaagacagggagctagagaaggagacagacgagggaacccaggatggtaggagaaattcaagagtgcagggtccttgcagtcaagggtggaagtcacttcaaaaacgggttatttgtagcctgaaatgttatagagaagaaaatgttatagagaagaaaagaggatgaagattcagcaaaaaagatggaaggaaataatgtgtaaggtatctagcgcatcttctggcacagggaaagaacagtaaatatcagctattatttgaacaacagaccattacatttggcagttaggaagtgtttaccccttcatcctcagacccagccaaatgtcttgcacagagttggagcttattaagtgtgttgtacaatataatcaatgagtagaagacagaagaggaagagcttaagaatggtgataatgtagaggtggccaagtcataaatctgctcatcccagccagtaatccattcctcgccccagggaaactcctgccttttgggaatgtgtctcctggggtcaactgtgcacacaggctagtgtgcatggggagccaggccagcactatggggacctgattgagagagaggttgatggcaatctcctgctaacagttctcaacctctcacaggtgtcacatagaatgggcatcaagtgcaatgggtaactacagcattgtcagggagtttgtgctcctgggattttcttttttttttttttttttaattgatcattcttgggtgtttctcgtggagggggatttggcagggtcataggacaatagtggagggaaggtcagcagataaacaagtgaacaaaggtctctggttttcctaggcagaggagctccttggattttcttatctccatgagttccaggttctgctgtttgctctgatcctgttgatatatgtgctgatgctgctgggcaacctggccatcatcagcttcatttgccttgattcccgccttcactcacccatgtacttcttcctctgcaacttctccctcatgg

SEQ ID NO: 39521 - DNA, 2300 bp, Homo sapien
aaacaacaacttcacagcaacttctaaactgttgtttttccaaaaagtgggcaccatgcctagctaagctaacaaataaaagtaaccatcacagcagtcatggcctgaataagacttgtcctaggccaggcacagtggctcacacctgtaatcccagcaatttgggaggccgaggcaggtggatcacttgaggtcaggaatgtaagatcagcttggccaacatggtgaaaccccatctctaccaaaaatacaaaaattagccgggtatggtggcacctgcctataatccccactactcgggtggctgaggcatgagaatttcctgaacccgggaggtggaggctgcagtgagctgagatcatgccactgcactccagcctggatgagtgagattctgtctcaaaaaaaaaagattgtcctgtacattgtaggtattgcagtttcctgctagctcacagaagaacagcctcattaccttcaatagatgctcttaacccatcgtcatctgccttcctctggacactgccttttgggagtgctggagttgcatcctcaaggacagggctatgccttcaaagagccaagcaaagaacttttcctgcattttcccacacagacacttcctagattcttctgccttatgcctgccttggtcagtgtagctaggatgtgcttcaaatggaaattatgcaagtgagaaggaccaggtgtaaagacaatttaattgtgggaaaaggcttacaaaggaaggtcattgtgaccctcacaagcagtgttcttgagtggataggacataaacagggaagaaagcatgtgatcatgagaacagctgaagttctgagtgagcaatgacatgaatggtgtccaattcaaagaaaagagaaggtagatccaggagctgaataaacagacagagcaattttgagagatacatccagaaagcagaagcacacacttacactttagctctgaatcctggctaaagcaacatacagaggcggtaactcctagaactctgattttcactctgttgccagagaggctcttcctgggcagctgtgtgccatgcaaatgatagaaacaaatcccatagtattgtaagtcataggttaaggagcagatttaatttcataaggagaaataacacaatgccagtgtcagcaagagcaagtctccccatcatcccaaggagaggaattctacaacctgggtatctactggacataatgtgggctccattctcacagaaggaatcctttccactgtggttcttcctgtgtggcttacgcatgagacaagtgtaagaaagtggccatgtcaataagaaaataagccagctctttggtgccaagaagtctgatttgggggtgccagctatttataggaattgtctagaattaaaatatcaccctgccttggggattgtggggcagctggggatcttggacatctgcagtatattgcaaccacacctgaaattaagaaggactcaatgacaataaacatctttacatcacccagtgtcttgaactcacttccccatcatgtagagcagctcaggtcttctctagctcttccacctcatgatgggtagtgactgctagggaagtcctgatcatcctagccctccaagaaatgttttgaatagcattgcatcttgaactcactataatttgatcaagcaaagatgttctatgtctctggtctgaaacctgccaccacagctgtgttctctgctttcagagaccaggggagcagtgactgaagctaagactacacatagcacttcagacaggcaaattaggagggaaaagaaaactgaatctgtaaactcgggaaaaactggtgtatcttttgaggtcccagccattttgagaaactctgatgctgaaaaaataaggaagaacaatctgactcctctctcaaacgctgacattctagctgagtgttgattttttcttagaaaaacaaactttgggtcaacaaggaaagatcacgagtggggagggtgaatgggtgattcacctcatggatctccctggcagctcttgcacttccttgatcaatctgtatataagaaatgtgctgggcacctgggacaccacttctctgggacacattgccttctgttttctccagcatgcgcttgctccagctcctgttcagggccagccctgccaccctgctcctggttctctgcctgcagttgggggccaacaaagctcaggacaacacgtgagccatgcccttctcctccccacaaaaaaaattgcagggagggctcctctcccagtctggaa

SEQ ID NO: 39522 - DNA, 2300 bp, Homo sapien
aggctgaggcagagagaattgcttgaacccaggaggcagaggttgcagtgagctgcaattgtgctactgcactccagcctgggcaacagaacaagactccatctcaaaaaaaaaaaaagtttagtttcagtggttgttgaacaattagtttactctgcaagtaggtaatgataacatcatttttcattccattttgcatgctcttctccatgtaggggtttacctcgtatctctgtattctgatagcctggagttgttttccttattgatacaaatgaaaagtggaatctttatatgttttccaatttattaaattagtaatgttaaaaataattttaacaaagttaaatggaattattttaaaattctgtttctttgcagtaaatgtaatcccaatataagacaatatgactcacatatttgtgaaaacgaatagggccaatcgtttccattatcaccaaaattatctatagtgaggcctctccatcttctaccagtccctcttttttttcactcactcaaaatatatgtatcgatggtcaaatgtgtcccagacattgtgcaaatctctgacaaaggtaacacaagaaaatgtgtactctgagaacttcttattctgccccagtttaggagattcatgcaactgccaagcaacaataataagagctagcagttattggagtacctcattcctcacaactcgtcataaggcaggtgttatcattagatattccccatgtgtatgcaggatgaggaaataggttcagagaggtcaagtggctcacccaaggggcacagctaagtgaaaggcactgcaggcatctcaaactacccccttcccacaagactccactgcagagcaggacagtcaccctgacaccagcccaatgggttcatcttgcccattacccagatggggctaatttatcaagacaagggaattgcaatagagaaagagtttaatacacatagagccagctaaacaggagaccagagttttattattactcaaattagcctcccaaaattcggaggcagaggctaggggactttgtgggtttttttgtttttgtttttgtttttcttttgagagggagtcttgctatgtcacccaggctggagtgcagtggcatgatctcggctcactgcaacctctgcctcccggattcaagcaattctcctgactcagccccccgagtaactgggattacaggcacatgccaccatgcccggctaatttttgcatttttagtagagacagggtttcaccatgtgggccagagtggtcttgaactcctgacctcaagtgatccacccacctcagcctcccaaagtgctgggattacaggcgtgagccaccatgcccgccggctagagttttttaatgatagtttgatgggcaaggggctagagaatgggtgctgctaattggttggggatgcaatcacaggggtgtggaaaaccgtcctcagtgcaccgagttgcatttggatgcgggccacagaggagtcactggtccaggtggagtcatcctgtcattagaaatggaaaagtctgagaaggtatcttcaaaggccagtcttaggttctacaaaagtggttatttacaggaataattggggaagttgcagagcttgtgacctctggaacaatgtctggtaattgttaatgcctacatcttagcagaattcaggcccctctcataatcctaaacttgtggacttttattagttttataaaactggtttagtttggggaagggctattatcatttaaactataaactaaatttctccctatattagctcgtcccatgctcaggaatgaccaagggcagtttggaggttaaaggcacgatggagttggtgagttcagatctgtttcaccttcgtaattttctcactgttaaaatttttgcaaaggcgattgcagcgccccttgtccacacctgcgcgctccccaaggggtccctacccaccccgcccctggctgggggccgtaggctggccctgccccgctgcgccggaggtggacctctaccagggcagtttctctctgaggctgcgcgctaaggcggtgggcggtcccaggcaggcccagaagctgggcagcctctgccgggttccgggaaaaggagctcctgctgccactgctcttccggagcctgcagcatggggcccctgccgcgcaccgtggagctcttctatgacgtgctgtccccctactcctggctgggcttcgaggtgacgctgggaggggtcgcctcggcagtgtctggggagtgagggcggagggaagag

SEQ ID NO: 39523 - DNA, 2300 bp, Homo sapien
ttctccagccttggcctcccatgtagctgggactataggcgtgagccaccaacacctggctaatttttgtattttttctagagacggggttccaccatgttgcccaggctggtctcgaactcctgagctcaaagcgatctgcccaccttagtctcccaaagtgctgggattacaggcatgagccaccatgcctggccccttttctgtatgcttttagtaattcataacaaaacggtctacacatattgatctacatatgttgataaggcacaatctccaacatatattgttaggtggaaaaagcaaaatataaagcattatctatggtatgctcccaaatgtataaagaaagagagcctgtatatattatgtttgcatatttatggtctctctctggggagggggtacccagaaatagttgggaaagagattgcctcatgggaacgggactgagagactgaggtttggggatataaaaaagacttactctttattataattttttccctgttgaattttatactaaaagtgtagatcattttttaattaactaaaataactatattttagtaatccatatatttaatttttatgtttgtttgtttgttttttgacgaagtctcgctctgttgcccaggctggagtacagtggcacgatctcagctcaatgcaacctctgcctcccgggttcaagtgattctcctgcctcagcctcccaagtagctgggactacaggtgcgtgccaccatgcccagctaatttttgtatttttagtagagacagggtttcactatgttggccaggctggtctcgaactcctgacctcatgatccacctgccttggcctcccaaaatgctgggattacaggcgtgagccaccatgcccggcacatacattaatactttttcagatactgtcttcttcttcttttttttaaagacaggatcttgccttgtcacccaggctggggtgtagtggcacagtcgtagttttctgcaacctcgaactcttgggctcagacaatcctcccccatcagcctcccaaagagctaggattacaggcaggcaacactgcacctggctaattttttaatgtttttttgtgtgtagagacagggtctcactatgttgcccaggctgtcagatactgtctttaattgttatttaattatttcatatgcatctcttatctctctacccatatcagaaaatcctggagaccacagtcaaatatgttacctctcctggatagatgcccttagaagttagcacagggctatgtacaatgtagttacaaacaaatgctccatggtgaaatcaggtcccagtgacaggatggtacccctcgctggtcccacacacagttgtgcacattacagtcagacccagactcactttggctgtagttccccaagctggaggagcagtgtgggaaaggggtgatatacgtgggtttattttcaccaatttacagattagtaaccgaagctcagaaaggttaagtaacttgcccaaggtcacactgctagtaagtggtagaaatgagatttgaaaaccagggttggccaaaacacatgtgcttaaactgcacggcctcctgtttgctagtatttacaggcatatccatgtgggactctgctgtcactatctgtagacatttctaacaaacacaatgctctttttgttgttgttgcttagcaacaactacactcaatttctcaaattccagaaggtttttgtggcttaatgccgagtatctgagctagactgactgcctcaaccccattgttcactcagttcttgtttagcgagctttgtacaatattaaaactagttgatggggtaagtgcatgtatttatccttacatactggaggatttattattttttgaaagcatttccatctagaaaatatcaatgttgctcacctatgtcatgataaaccatttatccaccttccttacacattttggagaagctgtgactaaggcaatttctgaaggggaaaacacacccagctgaattaaaaggtcaaggttctgagtttccttctaactaaagaaatcgtgtactttctctgagcttgtttcctctgtaaaatgaaagtgataatcaggcagcccaaatgattgttaataaggatcaaatgagatcgtgtatgtgggtccaatcaattgattctacacaaaggtatgtatctattgtcactgatatctttttagaagtcaccagcagtgtgttgtatgcttattcagtttaaactgatctattttttagttgtcttaatcagatgataaaa

SEQ ID NO: 39524 - DNA, 2300 bp, Homo sapien
gccaggctggtctcgaactcctgacctcgcgatagtccgcctcggcctcccaaagtactgggattacaggcgtgagccaccgcgcccggcaacctgcattattttaatggccaaaaatattgagtgaaataggctcagtgttattgagcaacgtatcatgagggtatattaatcaaattatggcatatcgattcaatgaaatattacatggctgtttgaaattactacaataaggtctttatcagggtgaaatatatacaatataaagtataaaactttttaaagatacaaagtggttagtatattctggtttgcatgtggacagtctggaagaaatatataaacgttttaaatggccgtgttaggataatgagaagatagacaatttttttttctttagcttttaaatattgtcatgttttttcttttaacaaatgcaatttttaaaaattgattttacattactggaattgagaatgtatgaacgggcacagccagccaccagtctagcctctccagttgggatccagttcttgtctatcgtactctccttccggcaaccaagagacttaagctacaaaggtccgcctctcccagactctccccttacacctcaggcccataccttttggccccgtgcctcttagcctacaccttcccattcccacaactcactccttaacaaaccccctttcctatcacacacaccaatgacccttggccaatttccttctattcatatgttaactgtagactgcagtcctgattccagctgtactttccccttatgagcagaacagtgaggaaattggctgaaacagaacaacaatcagcccccctcactcctgtgcctactttgcatagagacacacctcatttagactcccacagccttcctgttaatgtctccttcctctctctgctatcgatctggggctctgggacagagaatcttcaatatcccaccagtgcccacacttattaccactacagacacagttattctcattcccatactctctctctctctctctcacacacacacacacacacacaccctctcctatgcttccccaccccagctgtccctggggagcctggattggatttgtgcccacggtctgcagcttccctcggtctgtctgctggtcaccctctgaaggaacggggcccagttttgttcaccctctggctcaaggaccaagtatgcttctactcactctctacctccaagcacctaccctactccgacttaactgcctgacccacaactaaaaagaacagctctttgatcttcacaggtgtggtgaggcctggtgagaggggagccttctagttagtgacctaccacgtttcaggaaccatgttagtttccaggattcagagatgattaaaactaatcacgcaccttgagaaactcacagtggaaggaaaatcagtaagcagaaaaatgctacataaccaggtaaatgctgggacaaatttaggaaggaacgatgtggatacactggagcaggctccaaagcagcatcacctcggaggaggatcttgaagactcaagagttaactgggtcaagaaatatacacactaacacttctgacaggtctgcagaatacagggagtccataaaaatagcacttgggtaatggaagcaggacacaccattccatgcccacagcattactttctgtgtgcagtgcactgtgtgatgatctacagagattaaataagccgaggtctccgcttccagtcacttgggagagacgcacaaggtaaattacccaaatagaaggcaaactgcccagggctgtaattaacatacaatatgcgccgagagggaaaggttaatgctaactccggtcctaagtacaaagatcattgggagtcaggggtgcactctcattagggtacagcatgggtgggtggagagagtaaaaaccagaacaaatcaaggttcagcagttggaagtcagccttagggagaaaaggggcggagactgactgggccagaacagggattgggacagaaaaagagggtggggccagtgggctccacctacccgctccggcccttcccaccaccccccaccccatctactttctacagtctgtggagacaggtgagcgacgaacttctgagacaggtgtgggtgcgagggtcgggagggtcatgggattgggaccgaggtgtgaggagggaatctgcaattccttgctacacagagcgctggcaacttctgacaggctgtttctggggtatgggctgcctcgggttgttgctgttacaaggaaagaaaag

SEQ ID NO: 39525 - DNA, 2300 bp, Homo sapien
taagggtgggcatcgtaagaggaatacaccttgggcccatcctccctctctccctgtagtctctgaggcagagagtctctggtttcctgtcattggcatcagcgggaggaggggtcagaggccaacagaggatcttttgcccacagcagacaaaaaaaagggaaaaagggcttctttcatggaagccaccaatggccttatttctcttccctcagggacaatgaagcctttgaagtgccagtctatgaagaggccgtggtgggactagaatcccagtgccgcccccaagagttggaccaaccacccccctacagcactgttgtgatacccccagcacctgaggaggaacaacctagccatccagaggggtccaggagagccaaactggaacagaggcgaatggcctcagaggggtccatggcccaggaaggaagccctggaagagctccaatcaaccttcggcttcggggaccacgggctgtgtccactgctcctgatctgcagagcttggcggcagtccccacattagagcctctgactccaccccctgcctatgatgtctgctttggtcaccctgatgatgatagtgttttttatgaggacaactgggcacccccttaaatgactctcccaagatttctcttctctccacaccagacctcgttcatttgactaacattttccagcgcctactatgtgtcagaaacaagtgtttctgcctggacatcataaatggggacttggaccctgaggagagtcaggccacggtaagcccttcccagctgagatatgggtggcataatttgagtcttctggcaacatttggtgacctaccccatatccaatatttccagcgttagattgaggatgaggtagggaggtgatccagagaaggcggagaaggaagaagtaacctctgagtggcggctattgcttctgttccaggtgctgttcgagctgttagaacccttaggcttgacagctttgtgagttattattgaaaaatgaggattccaagagtcagaggagtttgataatgtgcacgagggcacactgctagtaaataacattaaaataactggaatgaactcctgatcccaaagcctattgtgttttcaacacaaggtaataggaagccaagcaacttgcatgtctcccaatccctgtctagggacagctgctggtgcaggatggaagacttcctataaacagaatgggcgaccaattgtgtctacagagggggtgggctgagcatgggcacgcatgtccccagcctcctggacgagcaaagtcagtcaaagcgctggtgatccctgctccgcgtgcgtagcagtgtctgtgcctctcctgcccaggggctagagagcagtctccagtgcagggtccccatcctatctgaaaacagtggagtcagtgaccccaggtggagggacttccagttttaacaatgggttggtatgaaggccagaaggagtgaaacatgtgaactttctggcgaggagactccctcttgaatcatccatatgtagccccggggtcacttgcgaagagtctctaacagcttctgcctcactcctaagctctgaccgctaggctttcaccccagccgccggtcctgattcctgagatcccaatattgagcaccaggtttcctggaattgtgtgctgcggctgtgatgtaggtttcggtcgctggaagctgctaaaccatagctgacgccccctcctaagccagccttccttccccgcgcgggcatctgtccagggccttgtcgcgctctcagtctccttcgcagcctggccccaaccgttcaacttcaataaagcaaaactccagccacgcccgtctccgtgaagttatcgccataggccggccagggggcgcgagaggcaccggggtgatttccgcgggaatcgataaccaatcggattcccaggccgaacggagcacacccgcccgccctcgctctttccccgccctttgccccgccccgctccttcccctccttttgtctgtccgccgagcaccccacttcaccccattggaccgcgcggccgccgctagagctctgcgcctgcgcacgcaccgggccggggactgggtggcctggtgtgtgggcgcggcagggcgcaggcgcaggcgcagtgtgcgtccgcgtctgaggggagggatgtgggggaagcgacggcccccggtttgtttgggctgtgggcggtgcgcagcggagagcccgggaaaagcgggaaatggcggcgccgagcgcggggtcttggtccaccttccagcacaaggagctgat

SEQ ID NO: 39526 - DNA, 2300 bp, Homo sapien
ggacgagcaaagtcagtcaaagcgctggtgatccctgctccgcgtgcgtagcagtgtctgtgcctctcctgcccaggggctagagagcagtctccagtgcagggtccccatcctatctgaaaacagtggagtcagtgaccccaggtggagggacttccagttttaacaatgggttggtatgaaggccagaaggagtgaaacatgtgaactttctggcgaggagactccctcttgaatcatccatatgtagccccggggtcacttgcgaagagtctctaacagcttctgcctcactcctaagctctgaccgctaggctttcaccccagccgccggtcctgattcctgagatcccaatattgagcaccaggtttcctggaattgtgtgctgcggctgtgatgtaggtttcggtcgctggaagctgctaaaccatagctgacgccccctcctaagccagccttccttccccgcgcgggcatctgtccagggccttgtcgcgctctcagtctccttcgcagcctggccccaaccgttcaacttcaataaagcaaaactccagccacgcccgtctccgtgaagttatcgccataggccggccagggggcgcgagaggcaccggggtgatttccgcgggaatcgataaccaatcggattcccaggccgaacggagcacacccgcccgccctcgctctttccccgccctttgccccgccccgctccttcccctccttttgtctgtccgccgagcaccccacttcaccccattggaccgcgcggccgccgctagagctctgcgcctgcgcacgcaccgggccggggactgggtggcctggtgtgtgggcgcggcagggcgcaggcgcaggcgcagtgtgcgtccgcgtctgaggggagggatgtgggggaagcgacggcccccggtttgtttgggctgtgggcggtgcgcagcggagagcccgggaaaagcgggaaatggcggcgccgagcgcggggtcttggtccaccttccagcacaaggagctgatggccgctgacaggggacgcaggtaagtagggaacggtcttagggctccttaggggagcccagggaaggggagcgtggcccccaggcgtgcggccctgcagccccctcccctcggagccccggaaagcagccgtgtccgcgcttcctgccaagggtgggacgcccgcccgagccgctccgagcctgactccgcgcaagggcccgcgggcggacctcttggccttgtctctcgtgggaaaagactgccccagcctccctttgttcaacccacgagggttctaaaggggaggtctttgcagtcctgcccgctcttgggttctcttgaagattcttcatcctttcctctggctcccttatgagggaaactataaaaagaccatactctgtctccttaaaaatcgacgagaccttctgcagacctcggtgctctgcctgatgtgcatttgatttgtatcgattgtatcatgatctgcatggctttgcatagaatgaccagattttcaaagaagtcaatacagggtttggaaattgagtacttttggcagaacaagggggttcctgtggctccgagtgtccatgcctctgccccggtcattccatttcatggcagtcatcacccaggagaacattgtaatgcctcctgctcgagactgaagattaaggtcttcgcaaagggaacctgcagaaggacacagaattaagacgtaggaactccgtggtgcccttcgcccctcctccccttccagttgtgtcctgaaattctaaatgattggaaacttttataatgttcacgtttaagactctcatactacagagtagaggaaggagcgggtgtgcagagggggtgatgcttcagattaaaactaaagagttgattgaaaattcaagtctggaactcgagagagttaagaactataagtcagtaagttgcaagtatgggtgagattgtctagggaaaggctctttgaaggggcgtccctaatggaatatcaatattaagggcaggccaaaggccctctaaagaaaacaggaactgggtaggcagagagaagactcccaaagaatgctgtcatggaaaccagaggaagagaacgatttaaggagcgaatactactggtaaactaatggaagaaatctgctgcaccactggttagtatcccagctgcagtgttatatgtgatcgttattactgctttgacgtattcgaaagtgattcattcttaaataggtttttttatttgtatagctctttttcttgtagccagtttttcctgaaagtc

SEQ ID NO: 39527 - DNA, 2300 bp, Homo sapien
tattttagattccacatacaagtgcaatcatgcagtatttttctttctgtgtctgcaatgtttgacttagcgtaatgtcctccaagttcatccatgttgtcacaagtggcaggattttcttctttgtcagggttgaatagtattccattatatatatttatatacacatgacattattcatctgttagtggacacttaggttgtttccatttctaggctattgtgaataatgctgtaatgaacatgggagtgcagatacctctttgagatactgatttcctttcccttggatgtatgggagttgctgagtcatatggcagttctgtttttaccttttgaggaacttttatactgtttttcataatgactataccagtttacattcccaccaacagtgcacaagggttcccttttctctgcattctcactaacatttatctcatctttttatttaatttttttttgagacataatctcactctgtagaccaggatggattgcagtggtgccttcccagctcactgcagcctccacctcccgggcttcagtgatcctcctgtctcagcctcccaagtagctgggactacaggcgtgcaccaccacacatggctgatttttataatttttatagagacagggtctccccatgttgccaggttggtctcgaactgctgggcttaagcattccacccgccttggtcacccacattgctgggattataagcatgaaccataatatccatagccataataatggctatctcttgcttttttgataatagccatcctaacaggtatgaggcgatattgcattatgattttggtttcctgatgattaatgatgttgaggccctagaaaaagtacttttaatgatattggcttccctcctgctttgggtggttccatttagcctaggtcaaaatcacattgtagaccagatgtttggtgtccctaccctgcagtccctgaacttggactgtcctgggacagaccccacttggtaatgcatcctaaactttactttggctcagttcatatcttttctcctacagtgaagagttcatagggaagacatgtcataggaaaattggttttataacgtgatgccaggaagaaaagtttgtccttggccaaaaaagtatttattgacctgaaaagggaagaatagcagagagcacttccccatcatctttcatgtttgtcgggcttgtcatgagaagccctcacccctttcccacctctcccttccctgtgcctctttctactttcgattctcccctgttatctcccttgttatctatctgatggagccagtgtgggcactccacagtccaaatggaagctcagtccctccgggttggcagtgtggctgacacctaacagtctgggaagtgggagaaattctagaacccaaggctattaccgaccctcgacttcccacttcccataagtgttccacacccagtgagtgataaggatgggatcaggggatgcccccaagctgttattagcagcctctggcagacagaagggcaaagagctagagaagaacgctggacatgggatgggctggcagagctggccagacagaaccctgggtggacacagagttgggaacaagctggccaggagatgtggcagagaggcaccagttactttcccaggtgagttaatgtgccagtgtttccagaacttcgagtcgcttcatctttatccagcacccacccctcaccttccgcatcctgaagaagagagatgggcaactggagggcttccatgcagatccggctctacacataggtttgagagcatactcagcagtttctcatcctggtccaggcgatatttatagagggaccagtgacatggagctggaagcctactactggtgactaagaagggggacaatgccactggctcagcagagggaattccctgtggggctgtccctcaggttctcatcccaacccccacccccacactgcactcacacctgcttcgaccccaagcagatcagatgtggcagtggggggtcatgtgacggagaggggtctataaatagctggaggtgggcatgctgccccagacgccttggggacagcaagagcagaggcttaaggagctacactgggggaaggacaggggcaagcaggccaaggcctggccggggctcggggggagggaatatggagcaatcccggtcacagcagcgtgggggtgaacaaagctggtggggtagtgacccccagtaccagtatatgccctttgaacactgcaccagctacggactgccctctga

SEQ ID NO: 39528 - DNA, 2300 bp, Homo sapien
attgaaatagggtatcagaccctgccacgaactacactaaacgattaaaatctaagcagacctgcaactgattattatctcattccttcccgcggttttatagatgtagatttggcttatttcttcatgcacatacaccgaagatggattctgtcaccataatctcatctcctcaatctgcaattcagttgttagtgtcttcttcttgcacatcttcatctgccaccccatgggatgtagctctccattcataatctaaaggttagaaagttgcatccataagacttagcctccctgttaggagcccacaccagggacccctggcccattgccttctctctctgcaacctcggagagacctaaaagtgggcgaggtgcagtcagagcctggatgggcacttgcttctgtgaatgcccacctgcccactctctcacactttgggctttctgggtacaccttagacaaaagggtctccttgccctttctcatgcatcttttctggactccacttcttacctgctgtaaccacagtgctcatttaacccttgcaacttagaccttcatctcctccccatggggcttgaggtatctacctggcccagtcccactagccagaggccaatctttctctctctttgctgcttcgggaccgccttgctttcatttgtccgagaagatcacgtctcagaaaagttaaactggattcaagacgatgtctcctagccagcctcgggtcctgacattgttgttagtctactgcgaatgaactgtcctcctcatattctccaatccccaaccaggcctggaggtcaactatctgcacatccccacacccacccctgaatgtccagcgagcacagagaagtggactacacgattcacttgcaaagacttcaccttctgtttggatggacaaaatagcgcactcgaaacaacagagcccaaagctgtgtccaatcacgttcctgtgtgtgtcccagatgcggccccaggaggaaaacaagtgtttgcggaatttggtggccaaaggcccttgggcctggctttattctcaccaccaccccactttctctcagggcatcccctgaccccggcccgcaaaatccatcaaccagaacctcggggtaggccctgggttcgtgcctcggctcctgaaacccaagccggggttctccaggagagagccccgggagcggggcttggcacgggcgggaggaggggggcggcgacggcggccccagatccccgagggagcgccccggcacggccggagcaggggcggggaggcgcggggcgcagccaatccccgggccgccccctccccggccgcggcgagccgagccggggcgggggagccaggcggcggcggcggcggcggcggcggcggcgacggagctgccgtggggagggatggagaggggaggggggagcggagccgagcggagacagccgcggcgctgcagagcggctggggcggcggcgcggctcccggtgctccccccggcgcgcgccccgagtcggtgagggcccggctctgcggcccccggagccatgggctgcatcggctcccggactgtgggtgggtaccgcggccgggcgggggcagggctgggccccccgggccgccctccgaccccctcccccatccctctcctcgcgcctccgggcgccccgctccgcacccgccttgccctgctagctccttcactttccttccgtccgcccgcggtccctctgtccctccttcctgcccgctctcgtcttgcgcctccggggctgccatcccgctcggctcgcttccttctccccgtcgccctcccgcaggcgcggtcctctccatcctctccatcgccctcctctcctctgcctctcggcccgacgctcggtcccctcatccctgcccctccaggccatccgcctctgctccgccgtccccagcgcctcctcgcatcccccactccggagcagccccccgcgaaggaccctcggcctccgcgccagccccgagtttctttcgcacgccccccacgccaccccccgccgccgcctccatctggctcgggtgctttgccccatctctctctccctctccgttgccttttactgtcgttcctgcctcctccgattcgctttgttcacgtgcgttttccctctggggcgggggcgggatgagcccgggttccacgcccggagggacagggccagggccgggtggagggaaggggctgggggacgcggggaggagatgggggcttcgaggcgctgggaggggtcgggagcccgcggcccgggagggtgg

SEQ ID NO: 39529 - DNA, 2300 bp, Homo sapien
gccaagtatgtatttaaagtccagaagttcttaaactttttttgtgccctggacctctttggcaaggagactgggacaatggccttaactagtgagaagtagcagaatccttgtataagaagacctatagggagcaggaaggaagctggccaggaatatgcctagaatattttactttttttgtgtgggtagtggggagggactggaaataccttcaagacagaatgcaagatgggactgagtctccaagacctggaatccctcatgttaaatcatttggataaatgcagccttatatagttgtgttaaggagaccaaggggagaggtttgcatccaagttggaaccacagtaagagatacgtagtcatatataaatatatgtattactcagggagagccataaggagacagaagtttcaggtgggaaggcaagagcataatggccacgtggtctgttcctccttacctggccagtcccctgtcagcgttttctctgctcaaacaataggggtgtgtgggcattgctagaataatggaagctgtttgttcttttttttttttttaatcatctctccatcttctttcctttgcgactggacagtatattccatgaaagcagaaactatttgatacttcttttatataaccaataatagtagatatgaaaaaagaaaatgctttctaattctctccactattgaaatagggtatcagaccctgccacgaactacactaaacgattaaaatctaagcagacctgcaactgattattatctcattccttcccgcggttttatagatgtagatttggcttatttcttcatgcacatacaccgaagatggattctgtcaccataatctcatctcctcaatctgcaattcagttgttagtgtcttcttcttgcacatcttcatctgccaccccatgggatgtagctctccattcataatctaaaggttagaaagttgcatccataagacttagcctccctgttaggagcccacaccagggacccctggcccattgccttctctctctgcaacctcggagagacctaaaagtgggcgaggtgcagtcagagcctggatgggcacttgcttctgtgaatgcccacctgcccactctctcacactttgggctttctgggtacaccttagacaaaagggtctccttgccctttctcatgcatcttttctggactccacttcttacctgctgtaaccacagtgctcatttaacccttgcaacttagaccttcatctcctccccatggggcttgaggtatctacctggcccagtcccactagccagaggccaatctttctctctctttgctgcttcgggaccgccttgctttcatttgtccgagaagatcacgtctcagaaaagttaaactggattcaagacgatgtctcctagccagcctcgggtcctgacattgttgttagtctactgcgaatgaactgtcctcctcatattctccaatccccaaccaggcctggaggtcaactatctgcacatccccacacccacccctgaatgtccagcgagcacagagaagtggactacacgattcacttgcaaagacttcaccttctgtttggatggacaaaatagcgcactcgaaacaacagagcccaaagctgtgtccaatcacgttcctgtgtgtgtcccagatgcggccccaggaggaaaacaagtgtttgcggaatttggtggccaaaggcccttgggcctggctttattctcaccaccaccccactttctctcagggcatcccctgaccccggcccgcaaaatccatcaaccagaacctcggggtaggccctgggttcgtgcctcggctcctgaaacccaagccggggttctccaggagagagccccgggagcggggcttggcacgggcgggaggaggggggcggcgacggcggccccagatccccgagggagcgccccggcacggccggagcaggggcggggaggcgcggggcgcagccaatccccgggccgccccctccccggccgcggcgagccgagccggggcgggggagccaggcggcggcggcggcggcggcggcggcggcgacggagctgccgtggggagggatggagaggggaggggggagcggagccgagcggagacagccgcggcgctgcagagcggctggggcggcggcgcggctcccggtgctccccccggcgcgcgccccgagtcggtgagggcccggctctgcggcccccggagccatgggctgcatcggctcccggactgtgggtgggtaccgcggccgggcgggg

SEQ ID NO: 39530 - DNA, 2300 bp, Homo sapien
cttttattcctatgagttatcttgaaatcatcttcttaactatctttttttccccaaaggggccatattttgaaggatttgtgatgagacttttggtctgtgaagcccaagacacaatctccaacatgcacaggaaatccagtatcaaatttctaacatgtcttcagagacaggcccagggctggcttgagcgtgtcagagaggtgtgcactgcgtactacccatcatacatggccacacatgcctgtggctgtgagaaatactggtggtgacaaagacaatgagatgccagagaaaaagatcagtggggtttgcaaaagtgattaagatgtcgtcctaggtataattaaagacttaataaggttgaaggaaagagaggacattgcacataccgaggcccctgagagatctgcctggcaacccagaaagggacatatgggggaaaacgccttagtgtaaccaggtcagaattttcattctgggcagaactggaatttgaataataatactgagtcatatagcgcatacagctatgacatttcatttatttctctatataatgcaataaagtagatggattaaccgtgacgtttacagatggagcaggggagaatgaagaggcgtcagtttgggcatcaggctggatcttcacactctgacctcactctgctctatcctgcccagtgttgcttcacctgatatcaggggtgcaaggcaaccagatctgacaccagtttcagtttagatcctgcctttacctgggtgtgacccgggtccatctcttcagctcggcctctgctttctcttcataaacttttggggttagtcctcggatgatctctaaaacatggcccaggtgctccttgccagtagagtgtagccggatttggagggactggacactcagtgtgaacaagacgaaggcctcaggaggcagtaaaagctgacaagaggagagaaaatgaagcgcctacgggtgcatactggactagcgggcgaaaggccatgactccttagtttggagaaagaactggggccgagattggggaagtttcccagtgcaattaaaaaaaaaaaaaaaaagaactagaagaattacccaggtctggcttctttcgtgtagcctggggctgagtcgcaggctgagaaatccagtctggccagtagggggctccaccaagcgcagtctcagaatgcccaagagctccaccgtcgcccggggtctccaccaagcgcagtctcagaatgcccaagagccccaccgtcgcccggggtctccaagaggagtgggtcgtggtgggcgttgaagggccgtaaaagacgagcagcccgcgtccgcgtccgtcctcccgggtctccagtccgcaggcggccgccgcctcggccccgccctcccacctccattcccggccccgcggacccgaacggtccctctcgcaaccgatctgctggctggggcgctggggatgcgaattcctagaagccttaagaggctgcccagcgttggaagttcgtatccccaagaatgctggaggttccggctcacacaccccctccgggcacagagtcagctggggggtgctgggagggagaacgccccgctcctcaccccccatccccgtgcaccctggagcccagctccatacgttcggccaccccaggcggactcggggtggccgggtagcgggtggtggcaggaggggaccgggtaacggcaggcccgagaggaggtcgctgggccgggccggaggcgcacaggggctgcgtggctacctcggcggcacccgccccacctccgccggctaagcccggagggggacggtgagtcagatctcgggcacccgcgggtcgggcggggagggggaggcaggtcaggaaatgacatcagaggcctgtgctcagggagtgggggtctgagccgggctggggcggcgggggcggcagtgagtggggtgggggcgagcggacctcggcggagcctccggcctgaggcaggatcagggccccttcctgggggagtttcctgcctggtccgcccttccccgctctccccgccccctctccgggccgctccttgtatggtctgggcgccgctctctccccgccccctctcttctccctccctcctccttccgtgtgtccctccccgcccggctggaggctgctccggaccgggacgcagagtctgcggacccggcgccgaggcggccacccgagacgcggcgcgcacgctccggcctgcggtgaggcgcggggagcggcagggcggccccacggggagggggcgcggggcgccggga

SEQ ID NO: 39531 - DNA, 2300 bp, Homo sapien
gtcagctggggggtgctgggagggagaacgccccgctcctcaccccccatccccgtgcaccctggagcccagctccatacgttcggccaccccaggcggactcggggtggccgggtagcgggtggtggcaggaggggaccgggtaacggcaggcccgagaggaggtcgctgggccgggccggaggcgcacaggggctgcgtggctacctcggcggcacccgccccacctccgccggctaagcccggagggggacggtgagtcagatctcgggcacccgcgggtcgggcggggagggggaggcaggtcaggaaatgacatcagaggcctgtgctcagggagtgggggtctgagccgggctggggcggcgggggcggcagtgagtggggtgggggcgagcggacctcggcggagcctccggcctgaggcaggatcagggccccttcctgggggagtttcctgcctggtccgcccttccccgctctccccgccccctctccgggccgctccttgtatggtctgggcgccgctctctccccgccccctctcttctccctccctcctccttccgtgtgtccctccccgcccggctggaggctgctccggaccgggacgcagagtctgcggacccggcgccgaggcggccacccgagacgcggcgcgcacgctccggcctgcggtgaggcgcggggagcggcagggcggccccacggggagggggcgcggggcgccgggagggggcgagtgggggtcaccaaggggagctgggaccgcctggggctcctgagcccggctccgcgctgcgtaacccggcgacccaccccagcagcccggcccggccatggcggccccccgcccgtctcccgcgatctccgtttcggtctcggctccggctttttacgccccgcagaagaagttcggccctgtggtggccccaaagcccaaagtgaatcccttccggcccggggacagcgagcctcccccggcacccggggcccagcgcgcacagatgggccgggtgggcgagattcccccgccgcccccggaaggtatgcggcggggcttggggaatgtaccccggcaggagccggggtggggggcagtcgtttcgggaatttggggatgtctggaaaggttgttgccgagggggctgggcgcagccaccctgtcccgagcagatgttcttacctcatcgtggagctcgtggctgggagccagggctcctgggaccgttccaagtcccccgcctgggagtgggagtcgggaatgtggggcacgaatcttcccctccgggtccgttttccgaagtgtaacgggagctgcaccactcctcggcagtgcgcccggcctttcctgacctggtactcccagggcgccctgcgcccctcctttgcttccccacacgctctgggacccctgagagagttcttgggttaggggttagagcggttaactgaggggagcttgggtgaggggtagagggaccccggccgacgtctttctccttcctaccccagactttcccctgcctccacctccccttgctggggatggcgacgatgcagagggtgctctgggaggtgccttcccgccgccccctcccccgatcgaggaatcatttccccctgcgcctctggaggaggagatcttcccttccccgccgcctcctccggaggaggagggagggcctgaggcccccataccgcccccaccacaggtacggaggcctgggaggggcggctgcactggacacccccaaggagaggagaagagggccctttcttcttacctcccctgcacctctgccttgggggtggggggatagaggcatggaataggtgctctgacctctgaccctctagcccagggagaaggtgagcagtattgatttggagatcgactctctgtcctcactgctggatgacatgaccaagaatgatcctttcaaagcccgggtaagggaccggagagtaggaaaagcagggctcagggccagagagactgggcatagaactaaggaggatggtgtcctcctgactgcatctctcttccctctcccaccccttgcaggtgtcatctggatatgtgcccccaccagtggccactccattcagttccaagtccagtaccaagcctgcagccgggggcacagcacccctgcctccttggaagtccccttccagctcccagcctctgccccaggttccggctccggctcagagccagacacagttccatgttcagccccagccccagcccaagcctcaggtccaactccatgtccagtcccagacccagcctg

SEQ ID NO: 39532 - DNA, 2300 bp, Homo sapien
cccaagctccagggagcttgggcagccaggctggggtggggtaggtagcagcagccttgcagggtttgggaaggcttctggatcacatggctagtctgtggggagctgagggctggtaggttgcagatagtgcaggatggctgcggcattgtgtttaggaatagcagccatgaggctggagagacaaccagtcaacacaaagaggaccagccctgttgagaagtttggattttaccatgagtgcagagttgttgtttttttttccaccccgagacggagtcttgctctgtcgcccaggctggagtaacgcagcgcaatctcagctcactgcagcctccacctccagggttcaagtgattctcctgtctcggcctcctgagtagctgggattacaggcacataccaccatgcccggctaatttttgtatttttagtagaaacggggtttcaccatgttggccaagctggtctcgaactcctgacctcatgatccgcccacctcggcctcccaaagtgctgggattacaggcgtgggccacctcgcctggcctggagaaccaattcttaaaagctgtccacaggatggggggacatggtcagagctgcattttaccaaaaatatggcctgagtgtagagaatgaactgatgggggggtgggggagcgctcaggttggggaagcaggcaaggctgttcttcaagtgctttattgggtagccagcctggccaactggcctctgtatccaaccaccatatataaccttgtttctgggagaaaacatgctctaagttccaacttttgaaactatcttttggagcgcaactccctcatacactggagactgcgtgtgctaatctttctggaatgctggatattttttcccccagcagatttactttgctaatggtttttggctctggcgagctttagtacaggaacactcattgtattgtgggtgtcagagtgcaagaataacagccgaagctgaaggtggtgaggaaggactgctcccggaactcaagcagccactatggaaaaaggcaggaccacgcccaggtgccaggcctctgttctcctactttcagcttcctctcagacaggagacttccatgtcttaaccagccctcagtcaggtgcccagaaccggccactccagcaggagaccggctggtgatccccttctgttggggcttcccaggacagtcccttcctataggcctgtcgacatagcaggactgtcagccagtccactgttgtgagcacaccaggaaacaggccaggaagtgggctcagagataatggtggggtcaatccacagtctagatgatctctgtgcccagacaccgaacttcagtgctggctgctgatgctcagaggccaaggccaaccagatcagcccatgtacccgctgtgactgacatgcccatgtcccacaggatgactcttcgcctgcccagcctgagtggctcagatgggatcccatatcgaaccgtctctgagtggctcgagtccatacgcatgaaacgctacatcctgcacttccactcggctgggctggacaccatggagtgtgtgctggagctgaccgctgagtaaggagctggagctgtctgggcaggggagggctgcgggggtggagcctccggactcatgcccccacccttccttgcccacagggacctgacgcagatgggaatcacactgcccgggcaccagaagcgcattctttgcagtattcagggattcaaggactgatccctcctctcaccccatgcccaatcagggtgcaaggagcaaggacggggccaaggtcgctcatggtcactccctgcgccccttcccacaacctgccagactaggctatcggtgctgcttctgcccactttcaggagaaccctgctctgcaccccagaaaacctctttgttttaaaagggaggtgggggtagaagtaaaaggatgatcatgggagggagctgaggggttaatatatatacatacatacacatatatatatttttgtaaataaacaggaactgattttctgcctccatcccacccatgagggctgcaggcactacaaaagagctgactactgagaattctggaaaacaaggtttttttttatttgtagctatagctacaacttggcagcatgggggagggtgggaatgtcctggagggtctcccagccctccgcaagcagagtacaaaggctgctcggggggccggccgagggcgcgggtgcagcagtgaaagcagcagcactaaacctggtgcccccctcaggtggggtgtctgg

SEQ ID NO: 39533 - DNA, 2300 bp, Homo sapien
caactattagggctggatcttccaaacggcccctcctggaggatccactatggtttagtctattagctctaattacaggctactctgtaggagaacagagaacggagccaggactgtaggacccagagggaaagaaagcaagtaaccctgaccccagaaacaggggctggattgaagtctcaagtactggggtaaggaaggaaaccctgagagaaggggttccagagccagagttgtagatgctccagtaacttaggcagccccctaagtggttctgtgaccagctgtgctgctggcagaaagggtgctgtgaattgtaaaatatatatttggtctttgtccacatttcctggcaaacaacccctaaagccctcaaaatccctgaagtgacaaatgtctttttatatgctagtgagctgactgccggggatgggaactagactggggtgggggaggcctgggtggcagaaggcaaccttgtgattggagttgggactttcggccccacccccaacttccagggaaggtagagaggttgaaggttgagctgataaccagtgggcaatgatctaattaatcacgcctatgtaatgaagtctccataaaagcccagaaggatggggttgggagggcttctggatggccatacatgattaggtccctgcagggtggctcgcctccttcacatataccttgccccatgcagctattccatctggtgttcatggtaccatttgtaataaccgttatagtaagccagtaaatccaagtcaatgtttccctgagttctgtgagccatcctagcaaactaattgaacccgaggaggagggtcaggtaaacctgattacagccgatggaacagaagtataggtgacaacatgttacttgtgattgttgtctagaggagggcagtcttgtggggctgagccctcaacctgaggctatctccaggtagatagtgtaagaactgaataagattagaggacactcagctactgtccactgaagaatctgccagagagaactgactgcaggcgggaggaatccctacacgcattttggtgaccacaggtcaccgaagtgatttgtgttgagagtgcagtaggaaaaaactgagtttggttttttgtacatcataagagctgctctctgcatttgagtctgaatatgctctctcagacccacctcacaacctgttcactgagtcttaggaacatccaaggaaggaagggaactggaacaagctctgacactttcaaacagctggaatgcatggtgtgcacgcagtcagcctgaggaggtgtggaggatgagctaagggctcagaaacctttaggggagcagcttttaacttcggaggagtcaaagaccctttgaagaatttgatgaaagctttggctggtctctccagaaaaaaaaatgcccgcttacatatacagaatttagagtacactttcatggggtttccccaccccctgaaacctatcaatgcaacttcattgggatgaatggatctcagattgaggatgcttttctgccttttctatccctccccaagcaaagcactggtctcagccttcaaccatccccagcatggtgcattctctccccgggtatgtgagctcctctccccctcacaagtatcagcttgtattcacaatattcccaagtattcactggaggagccaggccattcaagcgttcatcttgaggtgaagtctgacccccccaccccttgtcccattgaggaggctctgactcagcctcctctccccctccctgaggagacacttccagtttttcctgctcttttctctgttcctccacccacctctccaccccatttcccactggccttcaggagttttccaagatccttccctcttccgacacttaccccatcttttgggggatccagcagccagcccagctctccctgtgccttgcttgtgtccatcagagtaactgaaagtggggagaaaagaagtctgtcacctctgggggaggaggtgcccctgcagcccacattaatcattctggggcctcagccccaggctgcaacatcctgttcctaaaagctgtgacttcctgaggcttaggggagaaaaagggctcaggactgaggagtgaagagctccagggatttcactcttctttgtgtgtgtgaaggaaggcaggtagagtgggacaagggttggggcgctgggtctttgaccaaagtcaatgcaagaagagcagccccacgagacgctcagttacccaggctgctgcgtcctgggacacccatcagctgcaggat

SEQ ID NO: 39534 - DNA, 2300 bp, Homo sapien
cacatgcattacctcaccacagtctggcttatgtcctagcagcaattgtccaacgcttgctccatttccccccttctgttggctttgtacccttcgcccattcctccctgctgaaatcacaaagctctgacccccgccagccagcgtgagcctcctcctccttcctggagtctttaacattagaaaagaggcctctggtgcagagcaatgtgtgtcagatggcccctctgtatacacattttaaaagcatgtaagtgtgggagtagagggagagagggagggaaaaatacacgatggtgtgtacacagcgaggaagcaatcctgggaggacttacaagaaacagttgatggtggttaacttggggaacagaaattagagtgttggagggcagagggttctacttcccattttgtttctgtatgttcaacatgaatttcctaaccaatgtacatgaattacatttatttatgcaaataaggatagtctgagccaagaactgatgggccgtgtttgtcatatacgtatctgcataagaaagcaaaaaaaaaaaacaaaaaacctgagaagcattacattttgaaaatgagaaaaagcacctataatccaccacctcccttcattcacagtaccgaaatgtgcaacaatgtaaatgatagaaaaattatgaacaatttacccagatgggatggagcgaaagaaggaggggccaggagtggacccccagcctctttagtaaatgcatcactcccctttgagctactgtgatccctgtgtgtaccttgcctggggtccactcctgcccgccatttcaatcatttgtgcaattatttatgtctcaacccccagcatccccaaattaatagcttatatagggcaagacattgtccttctgttcttaggtgcttctagagcttcctgcatgcatagcagaaactgaacaaacatttactaaatagaatataagaaagtctcggcagagcgcagtaactcaggcctgtaattccaggactttgggaggcagaggcagggagatcacttgagatcaggagggatcacctaaggtcaggagttcgacaccaggctggccaacatggtgaaaccccgtctctactaaaaatagaaaaattagctgggtgtggtggtgcacgcttgacgcttgtgatcccagttactcgggaggctgaggcaggaggatcgtttgaaccagggaggcggaggttgcagtgagccaagattgcaccactgcactgcagcctgggccacagagcgagactccatctcaaaaaagaaaaagaatataaggaagtccgcaagaaagtgagagggcacgtggtttgacaccactaagatgggttaaaatatccttccctgccacctgtggctggaaccttaaccagatattcatgtctgctgtgtaagtgcatgtcaaggttcaaactccttttcttgtttacccagccctggcccacacctgcctttctgccctgattcccaagacaaatcctgcgccccagcagtcaaactggtccattcaccactccctgggcgcaccttgaggctccctgccttcaggcccttgctggtgcctttcccaatctctgccactgaaaacccaggtcacaccagctctccctgaagactcaactaatgtgccccgatgactgggcttgcttcctcttctaatctccagatgcttcactgcaggttgtaccccaccttgcattgtggtcatctaagcctcccctgctagagggtgaagatatgactcttaccccttgccttccccggccctattacccagctctggggcctgcacaaagacagaaagaggaatataggagtgtaattcaagtcagaggtagaattaggttaaaagctggatcaagattgggttgagtttaggattagaattgggaaaaggttcgtcaattcttaatcccacctactaggcggcgcccgcagtctcattcgggtcaagacgcctccggttcttgaatttgattaccagtctagcaagtttctttcctgccctactgtccctttaaggaggtgaaccaggtgaggccgggactccgcccccggcgctggccccgccccccgcccccgcccggcccgcccggctctcctagtcccttgcaacctggcgctgccatccgggccactgtcccaggtcccggcccggagctatggagcggcgctggcccctggggctagggctggtgctgctgctctgcgccccgctgcccccgggggcgcgcgccaaggaaggtaccgacccccgcccccgcgcccccaaccc

SEQ ID NO: 39535 - DNA, 2300 bp, Homo sapien
catggcagacaagagagagggcatgtgctggggagctcccctttgtaaaaccatcagatctcgtgagacttattcactatcacaagaacagcatgggaaagacccaccccccatgactcaattacctctcaccaggtcctcagcatggttcaggtgggcaaggctacacgtgggaattatgggagctacaattcaagatgggatctgagtaaggacacagccaaaccatatcagcaggcattgaagaacattgttgtaccaagtcaggtatgagatctttaaggaaggtgagacacatgaggttagtaccacatttgccagggttttccagaaaggcatcttcctgaccttggtacaggaaaatgtgacccaaccagaggttagtggtcttggtaaccaaaagaagcaaaaaatagagttcaaagctaataagctggttgggaattgggggttaatgtaccatatgggagagagaaagaaccctggaaatgggtgtgtaaatgccattttggtccttccgtgactctttagctgtgtgacagttggctaagaagaggagagacctagtagaaagcaactgctgggaaagcagaagagatcatcagggactgaaaatttcctggaaacctactgggtttcagatccagccagatggggaaatgttggtaaacaactgagaaacccagttgggaccctaaagattctgtctaaggagaggtacagtatcctaggagtaaggcatatgtcctaagaggaaaataaaatatcattaccatagcacagcttaaaactaggtcttgagagcagcaaggtgatctgcaggtaatataacatctgtccagaaaaaaattcaaaatttttgggcatttctatatcatattatccagaaactcagcatacttttaaaaagttaccacatacacaaaaaagcaagaaatacagactcataaaaaataaatcaattattaaaaacaaattcacagataatccagatattggagttaatagatagggcatcataatatctatgatcaatataaaggaaagaaagaaaaaatgaaagacaaagcaggtcgtgtcctatttccttctggcagctctaaaatgctcactttatttattggcatagatttcgatttcctaaattatgtttgatgtttcaagcaaaaatcatagcattgtctggtgttaatctaaatggatgtaagacaatgatactataaatttgagagggtaaagagacataaaatgacatagggttgctatactacactcaaactggaatacagatgacaccaattgactgtgataatgtatgtataaaggaatatctagaacaaccactaagctataaaaagcaaccagaaaactataaaaaagaagatacatcataaacactatgaataacaaaatggaattctaaaataaatgttcaaataacccacagaaagtcatgaaaaacaagcagagacacaagagttgatagagaaaacaaaaactgtcaggcttatgcactaaagtatcaataattcatttaattatgaatggtctaccaagagacagataatagaagagtgtatgtaaaagtatgaccctttcttatatgtttcttgcatgctgtgtacaagaaactcacttgaaatttaccaatacagggcagaccaaattaacaggatgaaaaaagatatattacacaaacattaatgaaaggaaagcaagagtgcctgtatgtatatcagataaagcaaagaaaattaccagaaacagagagattatataatgatcaaaggtttaattcatgaagaagacagcaattttaaaagtgtattcaccaaaaaataaagcttcaaaatatgtgatgtgaaaactgccagaactaaggcgggccgggctcagaccagcgctgcctcaggatgtgaagtgtaacaagagggccaggggaggtggtgggggacaacatgggcctgtgaggcctgtgggtgcccgcgttccccagctccccccgcagcccgctccacagtggtccgctccggttggttgtcacgtgcgcattcgggttccagacccaaggctgcgtgttctccaccgcttgttgtggccagtgttactgcggtgaccgccagagcagcctcgacgctatggaggagcccggtgctacccctcagccctacctggggctggtcctggaggagctacgcagagttgtggcagcactacctgagagtatgagaccagatgagaatccttatggttttccatcggaactggtggtatgtgcagctgttattggattttttgtt

SEQ ID NO: 39536 - DNA, 2300 bp, Homo sapien
cctcggcctcccagtagatttctttgtcatgttatttgtcggtcctaggattatttctcctgattgcacaaatatccattgcctaggtgctttaaacatgagacattggatatttgttcaacatttaaaataattgttatcaattattgggtgtgtaccagttattgtagtgattcctttctatagattgtttcatttaatcttcacaataatctcatgacatggcaaccattatcactcccattttattttatgaacgagagaactgaagttaaggaagataaggtaaattatctaaggctatattgctaataagtggttgatctgggatttgaattcaggcattctgattacagaatgggcattcataactacagtgctttgaatgaccccatcaatgggtaaataaagaagccgaccagcaaaccaaaggatcattatgttcctacttgccagagctttggctgcatatacttacctatcatctacttttatcagaacaaaaaatcattttgtttatcccaaatgacaattcaaagaatttaaggtaggctcctgaagtgcttcccaatagatagtgctggagtgagccctttagcatcagccagatcttttaggttctgcattactcaaatttcagttattctttctagggtaccatgaaagtgttctctagtttgttggattttgaatgatggactatttcagtgaagtgcctgactcccagagatcccaaacactgcatgttctcagagaggaaattagatcctccatctttgagaatatgtgtatccatccttgccctctttaatatatttttagcagtacatcccggggatatatttaaaatataaagttatccatgttacttccgtgtctaaaagcctccactggaatttctaatttgagataatggagtaaacataagtttaccttccctccctccccaggccccactgaaattgaagtcaagaaatgcaaaaaggaactgacacatctcagcaaagaaaactgaagggatttggttataagtggagaggatctcagcatatttctggaagatagaaagtggatgaagcatgataatgaaagagtgaagaacctttcagataaaatgtaagctgatctgaacaacataaccccaaagagacttgcgcacctgaaaagcttgtctactgaagaattactccagttgtaagattgagccctctcctactctcccccaactcttatgcacagaacacaggcagtctccactattgataccagttaaaaatttcttgttattgttgctgttgttgtttgtataaaggaattgaacaggctgcttgcagagagataagagttggtgctccagaaaaaaatttctcttctagtggaaataagtgcccctacccccagccggtcagctaattctctactgacagctgagacctcctactcaagtgcctgttgccttcaggtatagaagaggtttcctgaagaaacagacctaactgtacaacagcagaggaaacccatgccaactgttatacaagttaacagttatgttgattcttaaatgggaatggtgagttagaaattcccagacatgggcgatggggagggaagaggaataagaaaagtcacgaggtagaattaggggccttgaaaatatgacaaactctgagggaaacaaagacaatgtggaaagaataacttaattttaattccatctccagagagatttgaggtgtatttaagatgaaaaacaggatactacaaagaaacggaaaactcaggagttcgagaccagcctaggcaagatggcaacatcccgtctctacaaaataatttttaaaaattagccaagcatggtggcatgtgcctgtggtcctagctacttgggaggctgaagtgggaagatcacttgagcccaggagttcaaggcttcagtgggccatgatggtgccactgcactccagcctgggggacagagtgagaccctgtctcttaaaaagcaagaaaagaaagagaagactgagaataagaagatctctttgaaaataaaataagactgctaaaagtatttggtatacagtctggaaaataaagttgagggaatctctccagataaagagcaaaaagaaatagatagaaaaatataaagaaagaaaaaagacatagacaatcaatatgtaatgttaggagttcctggaagagagaacagagacagtgtaggtgaagaaataaaaagaaaaagaattgaagaacagagcaagctaagtctccagattgagagggcccaatacaatctacat

SEQ ID NO: 39537 - DNA, 2300 bp, Homo sapien
ttcttttttttttttttttttttttttaggaaccgttatgccgttcctatgttgttaggttccattcctcaggcagctcctgctcccaaatggcaggtactttctgctctctgaccctggaaaaatcacctttgtttaaagcccctttcttctattagagcaacaccaaaatactctcaggagttaatttagaacaatagtagtactttaccatgaggagtgaggttgatgtaggtggagactggttaaaacctaagagtacaaacacacaaaagataccgagccagctttttgttgttgttgttgagacggagtctcgctctgtcgcccaggctggagggcagtggcatgatctctgctcactgcaacatccgcctcccgggttcaagcaattctcctgcctcagcctcccgagtagctgggattacaggcctgtgccaccacgcccggctaatttttgtatttttaggagagacggggtttctccatgttggccaggctggtcttgaactcctgacctcaggtgatccacccacctcggcctcccaaagtgctgggattacaggagtgagcccccgcacccgggcctgaatcagcttttaacgtggaactttactgacccactttctttgatgtccatctcccacttcagctcccaaaggtcagttgttccctgatatgaagcctaagaactcaacgtacttcaccgcacgttggatttctagccggaattattccaaattctggcaagtcttatccacaatttcttttctgtgtaagtttctccttgctctttatttctgaaacctgaatgtatttggtcctctgccaatcagatttccactagtcctccgaagagtcagttattaactcactaattcgacagatatttttggacgttcactatatccttatttatttagcatatatttagttatttattaagaaactaaagcctattctatgtcagaaatgaaaataggcaatgaggactcaatggtgggcaaaatgcagacagactacttttttcccctcattctagcacagtcatcactttcctaggtaagacgttcctaaactccagactacaccaaatcctcctcctgaccacacccttccaccttgattttcaccttctgacctctcttgcgtagaaattcgagcaccagccactctatagctttagcttaatttctccagccatgcacggacgaatctgtgttagtgatgccacaggcacgtttccctcccagcaagaatataacttgctgggcagcatttctgtggatactttgagagaaaaatgccctagttgagcaccccgcaccatggccataagcatccaccgggctcgaagtgcatggcccgcagctgaccactagggggcagccctccacgcagaggctcgagcgacggaggcgacgcggcggctaccggctctgctgagcccaccccaagatcggagggaagggagcctgattccacgcggggcctcccccgtggcatacgttgttgttagggaactattcgccccaaatatggtttattggagacttagggtttgcttttcttatcaagtgcgacagcaaactggctgggtcccctctcgcatccaagaacccgcagagaccctgagggagccggtttggggccccatgcaggccaaagcatccctccgggaaggcggggtcgctcacctggtaggcgccccgagagcccgcagcacggcccgaggtggggtccaccgatggaacgggagaccacgggcgtggctcagggagcggtagccgcgccccgggcccgcctcagggtcggctccgcctcaccccagcctgtgccccgcctccgggacagcccagtttccgagacctcctagcctccaagacagccccgccgccagaacagcctctcctccaggaccggccagcctacgagagagccccgcctacggtacaacccgcctccgggaccgcaggactccacctccgagacagctcagtccccaggacagtcccgcctccgagacggccccgcctccaggacggcccctacctccgagaccgccccgcctccgggaccgccccgccccgcctcgcctccgacccgtcccccgcgcgccactgcagagcctgtccgtcagtccctaggtatccgcactgctcaggggtgagttttccaatcccagcgggtcctggggtgggggcggtagctgagcacctagggcactgggggtcgccgcaaagtgctggaggccccagaccatacccggcgtcagggggtgtccctcccttcttaggtct

SEQ ID NO: 39538 - DNA, 2300 bp, Homo sapien
ggctggtcttgaactcctgacctcaggtgatccacccacctcggcctcccaaagtgctgggattacaggagtgagcccccgcacccgggcctgaatcagcttttaacgtggaactttactgacccactttctttgatgtccatctcccacttcagctcccaaaggtcagttgttccctgatatgaagcctaagaactcaacgtacttcaccgcacgttggatttctagccggaattattccaaattctggcaagtcttatccacaatttcttttctgtgtaagtttctccttgctctttatttctgaaacctgaatgtatttggtcctctgccaatcagatttccactagtcctccgaagagtcagttattaactcactaattcgacagatatttttggacgttcactatatccttatttatttagcatatatttagttatttattaagaaactaaagcctattctatgtcagaaatgaaaataggcaatgaggactcaatggtgggcaaaatgcagacagactacttttttcccctcattctagcacagtcatcactttcctaggtaagacgttcctaaactccagactacaccaaatcctcctcctgaccacacccttccaccttgattttcaccttctgacctctcttgcgtagaaattcgagcaccagccactctatagctttagcttaatttctccagccatgcacggacgaatctgtgttagtgatgccacaggcacgtttccctcccagcaagaatataacttgctgggcagcatttctgtggatactttgagagaaaaatgccctagttgagcaccccgcaccatggccataagcatccaccgggctcgaagtgcatggcccgcagctgaccactagggggcagccctccacgcagaggctcgagcgacggaggcgacgcggcggctaccggctctgctgagcccaccccaagatcggagggaagggagcctgattccacgcggggcctcccccgtggcatacgttgttgttagggaactattcgccccaaatatggtttattggagacttagggtttgcttttcttatcaagtgcgacagcaaactggctgggtcccctctcgcatccaagaacccgcagagaccctgagggagccggtttggggccccatgcaggccaaagcatccctccgggaaggcggggtcgctcacctggtaggcgccccgagagcccgcagcacggcccgaggtggggtccaccgatggaacgggagaccacgggcgtggctcagggagcggtagccgcgccccgggcccgcctcagggtcggctccgcctcaccccagcctgtgccccgcctccgggacagcccagtttccgagacctcctagcctccaagacagccccgccgccagaacagcctctcctccaggaccggccagcctacgagagagccccgcctacggtacaacccgcctccgggaccgcaggactccacctccgagacagctcagtccccaggacagtcccgcctccgagacggccccgcctccaggacggcccctacctccgagaccgccccgcctccgggaccgccccgccccgcctcgcctccgacccgtcccccgcgcgccactgcagagcctgtccgtcagtccctaggtatccgcactgctcaggggtgagttttccaatcccagcgggtcctggggtgggggcggtagctgagcacctagggcactgggggtcgccgcaaagtgctggaggccccagaccatacccggcgtcagggggtgtccctcccttcttaggtctaggtctttggtttcatttcgttttgttagtctggtgctatttgcagtttgtctcaaaacacgtttctccctcctatttgaacttgtaaattacgaatttgacaaagatgtgcatggtgtgtgcgtgcacgagggcacatttcgttgcggaatgctgggtcagctttccgggacatattactcatctgaggttttttgtctgtttttgtttatcctgtcaaactggtactgccccagaagtgaaagacgtcgcttgtcttctgggaggtagctagcacgatcttgagctcaggcttccggatctctctcggctgcttttttccactggtaacttctgaggctgagatcaggtacccgcattctcaatgctctgccgagtattggctctcttttgtgaatttctttcccgcgagcagtattaagaaaaaggtggcggataggaagggaagaggggaagagatggaattctacaggaaatgcagggcatgctcagaatgc

SEQ ID NO: 39539 - DNA, 2300 bp, Homo sapien
tgcagtcattttaattagctgtggagaggatatctgcaagtaactgcagctttccatattgaagttttactaccattagctgaggctttgccaggtgcctgtgagaagatgctaagaacacttcgagtggaatttttcattattaagtcttgtagctcaatgtcattaactccccaaaatatcttgagttccaacaggtaacaaaaagccacaggcagaactgatacctgaactctatgacatttgccatgtgagtctgaaaatgggatgacaaaactaagacatgccatctcctcattttcatgctgaaaagaaattaaagagaatctgcacaagagttacatttttcaataatgtgttactactggaataaataaactatactttttaaaaaatataacatttaatttttaattataagagaaatagatgttaattttaaaatttgagagaataaagttttataaagataattaaaatgacctaaaatcccaccagccaagacgaccactgaagacattttttttaaacaaagatattttgataaatatgctttaggttctgcttctatgtctggtttcttggttttttattttttttaccccaaaatttggcttatttagagcatggtatcctggaatctaattttaaaactttttccattaagcatttttcaaattacctaatatttattttaatcactatatggtttgcaatctattgttaaccataatttatttaaccaacctcctattgcttgacatttacagtatatacaaattgttttaaaaaaattcttgaaatacaaagccttttcttgattcattacattttgaccattccttaagaagaagaagtgaatactctaaccagatctaagtgaagttttaaaaacagtgtgtgtttgtataaatcttcaagcgtagtgttaaacaatttaattgtgatgtgttcctagatcagaactaccctacggagagtccagatttggtgtttttacagccttcctttgcagaaagttagatcgagaaattcataagcagtaccacattctctgggcataataaactagtttttctaacttgtttatatgtttaattattttaaaagtcaagaaactgaagccaaaatattcaacacatagttgactaaatgggaggaattcctggaggtgttcatttagaaaatgtggattttaagatatgcaagtaagggcactacctctatagcgtttcctcaaatctatgacaaattgattgtgagaaatgccattattttatgtatcactaagaaagaccaggccgggcatggtggcttacacctgtagtcccagcactttgggaggctgaggctggcggatcaaaaggtcaagagatccagaccatcctggccagcatggtgaaaccccgtctctactaaaaatacaaaaattagctgggtgtggtggcacgcacctgtagtcccagcttctcgggaggctgaggcagtagaattgcttgaacccggtaggtggaggttgcagtgagccgagattgtgccactgcactctagcctggcgacagagcgaaactccatctcaaataaaaaaagaaagaaagaaagaaaagaaagaaagaaagactaaacgttgccaattaaatgataatatgccatcagttgtaaaaacagtgaaaaaatatgccttaaacatgataaaaataaatgatattagcatgctaaaatcctaacattagtaagaatgtgaagattgacatgaaccgtgcaatcttcttacctgcacatagatttctctactcaatgagttcgattcagtggctcattaactgactgtagcctcattgtttctcctgtctcttccaggtatggggaggatgtcaggcaggaccagcagcagctcctggaggggatctcagagctggacatcaggacagggggagtcccctcacagctgcttgtacatggagccctggccttccctctggggctggatgcctcactcaactgcttcctggcggctgctcactatggccggggccgggtggtcctggctgcccacgagtgcctgctctgtgctcccaagatggggcccttcttgctcaatgcggtgcgctggctggccagaggccagacaggcaaagttggggtgaacacaaatctaaaagatctgtgtcctctcctatcggagcatggcctgcaatgcagcctggagccccatctgaacagcgacttgtgtgtctactgctgcaaggcgtacagtgacaaggaggctaagcagctgcaggagtttgtggctgagggtg

SEQ ID NO: 39540 - DNA, 2300 bp, Homo sapien
ggctggtcttgaactcctgacctcaggtgatccacccacctcggcctcccaaagtgctgggattacaggagtgagcccccgcacccgggcctgaatcagcttttaacgtggaactttactgacccactttctttgatgtccatctcccacttcagctcccaaaggtcagttgttccctgatatgaagcctaagaactcaacgtacttcaccgcacgttggatttctagccggaattattccaaattctggcaagtcttatccacaatttcttttctgtgtaagtttctccttgctctttatttctgaaacctgaatgtatttggtcctctgccaatcagatttccactagtcctccgaagagtcagttattaactcactaattcgacagatatttttggacgttcactatatccttatttatttagcatatatttagttatttattaagaaactaaagcctattctatgtcagaaatgaaaataggcaatgaggactcaatggtgggcaaaatgcagacagactacttttttcccctcattctagcacagtcatcactttcctaggtaagacgttcctaaactccagactacaccaaatcctcctcctgaccacacccttccaccttgattttcaccttctgacctctcttgcgtagaaattcgagcaccagccactctatagctttagcttaatttctccagccatgcacggacgaatctgtgttagtgatgccacaggcacgtttccctcccagcaagaatataacttgctgggcagcatttctgtggatactttgagagaaaaatgccctagttgagcaccccgcaccatggccataagcatccaccgggctcgaagtgcatggcccgccgctgaccactagggggcagccctccacgcagaggctcgagcgacggaggcgacgcggcggctaccggctctgctgagcccaccccaagatcggagggaagggagcctgattccacgcggggcctcccccgtggcatacgttgttgttagggaactattcgccccaaatatggtttattggagacttagggtttgcttttcttatcaagtgcgacagcaaactggctgggtcccctctcgcatccaagaacccgcagagaccctgagggagccggtttggggccccatgcaggccaaagcatccctccgggaaggcggggtcgctcacctggtaggcgccccgagagcccgcagcacggcccgaggtggggtccaccgatggaacgggagaccacgggcgtggctcagggagcggtagccgcgccccgggcccgcctcagggtcggctccgcctcaccccagcctgtgccccgcctccgggacagcccagtttccgagacctcctagcctccaagacagccccgccgccagaacagcctctcctccaggaccggccagcctacgagagagccccgcctacggtacaacccgcctccgggaccgcaggactccacctccgagacagctcagtccccaggacagtcccgcctccgagacggccccgcctccaggacggcccctacctccgagaccgccccgcctccgggaccgccccgccccgcctcgcctccgacacgtcccccgggcgccactgcagagcctgtccgtcagtccctaggtatccgcactgctcaggggtgagttttccaatcccagcgggtcctggggtgggggcggtagctgagcacctagggcactgggggtcgccgcaaagtgctggaggccccagaccatacccggcgtcagggggtgtccctcccttcttaggtctaggtctttggtttcatttcgttttgttagtctggtgctatttgcagtttgtctcaaaacacgtttctccctcctatttgaacttgtaaattacgaatttgacaaagatgtgcatggtgtgtgcgtgcacgagggcacatttcgttgcggaatgctgggtcagctttccgggacatattactcatctgaggttttttgtctgtttttgtttatcctgtcaaactggtactgccccagaagtgaaagacgtcgcttgtcttctgggaggtagctagcacgatcttgagctcaggcttccggatctctctcggctgcttttttccactggtaacttctgaggctgagatcaggtacccgcattctcaatgctctgccgagtattggctctcttttgtgaatttctttcccgcgagcagtattaagaaaaaggtggcggataggaagggaagaggggaagagatggaattctacaggaaatgcagggcatgctcagaatgc

SEQ ID NO: 39541 - DNA, 2300 bp, Homo sapien
tattttcgttgttgttgttgttgttccgttttcttttattttaggtttctagctgcctgaactcacggtttttagtttctgtctctagtgaaaggggaaaagagggatgaggaaggggttttactcgcctaaccaaaaacagaaactaagaacccatgactgtattctctctcggacaccctttagtcagaacgtaaatgctggttaccatctttaatcttttttttcttcttttttttttttttttttttttttaggaaccgttatgccgttcctatgttgttaggttccattcctcaggcagctcctgctcccaaatggcaggtactttctgctctctgaccctggaaaaatcacctttgtttaaagcccctttcttctattagagcaacaccaaaatactctcaggagttaatttagaacaatagtagtactttaccatgaggagtgaggttgatgtaggtggagactggttaaaacctaagagtacaaacacacaaaagataccgagccagctttttgttgttgttgttgagacggagtctcgctctgtcgcccaggctggagggcagtggcatgatctctgctcactgcaacatccgcctcccgggttcaagcaattctcctgcctcagcctcccgagtagctgggattacaggcctgtgccaccacgcccggctaatttttgtatttttaggagagacggggtttctccatgttggccaggctggtcttgaactcctgacctcaggtgatccacccacctcggcctcccaaagtgctgggattacaggagtgagcccccgcacccgggcctgaatcagcttttaacgtggaactttactgacccactttctttgatgtccatctcccacttcagctcccaaaggtcagttgttccctgatatgaagcctaagaactcaacgtacttcaccgcacgttggatttctagccggaattattccaaattctggcaagtcttatccacaatttcttttctgtgtaagtttctccttgctctttatttctgaaacctgaatgtatttggtcctctgccaatcagatttccactagtcctccgaagagtcagttattaactcactaattcgacagatatttttggacgttcactatatccttatttatttagcatatatttagttatttattaagaaactaaagcctattctatgtcagaaatgaaaataggcaatgaggactcaatggtgggcaaaatgcagacagactacttttttcccctcattctagcacagtcatcactttcctaggtaagacgttcctaaactccagactacaccaaatcctcctcctgaccacacccttccaccttgattttcaccttctgacctctcttgcgtagaaattcgagcaccagccactctatagctttagcttaatttctccagccatgcacggacgaatctgtgttagtgatgccacaggcacgtttccctcccagcaagaatataacttgctgggcagcatttctgtggatactttgagagaaaaatgccctagttgagcaccccgcaccatggccataagcatccaccgggctcgaagtgcatggcccgccgctgaccactagggggcagccctccacgcagaggctcgagcgacggaggcgacgcggcggctaccggctctgctgagcccaccccaagatcggagggaagggagcctgattccacgcggggcctcccccgtggcatacgttgttgttagggaactattcgccccaaatatggtttattggagacttagggtttgcttttcttatcaagtgcgacagcaaactggctgggtcccctctcgcatccaagaacccgcagagaccctgagggagccggtttggggccccatgcaggccaaagcatccctccgggaaggcggggtcgctcacctggtaggcgccccgagagcccgcagcacggcccgaggtggggtccaccgatggaacgggagaccacgggcgtggctcagggagcggtagccgcgccccgggcccgcctcagggtcggctccgcctcaccccagcctgtgccccgcctccgggacagcccagtttccgagacctcctagcctccaagacagccccgccgccagaacagcctctcctccaggaccggccagcctacgagagagccccgcctacggtacaacccgcctccgggaccgcaggactccacctccgagacagctcagtccccaggacagtcccgcctccgagacggccccgcctccaggacggcccctacctccgagaccgccccgcctc

SEQ ID NO: 39542 - DNA, 2300 bp, Homo sapien
ggtttcagaaataaagagcaaggagaaacttacacagaaaagaaattgtggataagacttgccagaatttggaataattccggctagaaatccaacgtgcggtgaagtacgttgagttcttaggcttcatatcagggaacaactgacctttgggagctgaagtgggagatggacatcaaagaaagtgggtcagtaaagttccacgttaaaagctgattcaggcccgggtgcgggggctcactcctgtaatcccagcactttgggaggccgaggtgggtggatcacctgaggtcaggagttcaagaccagcctggccaacatggagaaaccccgtctctcctaaaaatacaaaaattagccgggcgtggtggcacaggcctgtaatcccagctactcgggaggctgaggcaggagaattgcttgaacccgggaggcggatgttgcagtgagcagagatcatgccactgccctccagcctgggcgacagagcgagactccgtctcaacaacaacaacaaaaagctggctcggtatcttttgtgtgtttgtactcttaggttttaaccagtctccacctacatcaacctcactcctcatggtaaagtactactattgttctaaattaactcctgagagtattttggtgttgctctaatagaagaaaggggctttaaacaaaggtgatttttccagggtcagagagcagaaagtacctgccatttgggagcaggagctgcctgaggaatggaacctaacaacataggaacggcataacggttcctaaaaaaaaaaaaaaaaaaaaaaaagaagaaaaaaaagattaaagatggtaaccagcatttacgttctgactaaagggtgtccgagagagaatacagtcatgggttcttagtttctgtttttggttaggcgagtaaaaccccttcctcatccctcttttcccctttcactagagacagaaactaaaaaccgtgagttcaggcagctagaaacctaaaataaaagaaaacggaacaacaacaacaacaacgaaaataaggtgggttggataagcttcgaaatggttactgcttatgcaaaggtgcaggccccagatctttccttttacttgggagaaaacagacgccattcagtgaaagtcaacatatccttactggacacttattctgtgaggcactctgggagatagaaatgctattatggtcagtaaatctagagaggaaaaaagacaagaaaacaactataccaaaattggctacgaatcaggtgcaagggcacataaaagaagcagcaattatttctgatcaaaggattagagaagaatgtgcacagaaggtgacacagaaactcagcttagaaaaatgtatatttgcggggagataaaggggaaggtattacaatgtgaggctgtataagattccaaagcacagagatatgaatgtgaaaggcttaatttgagaaagacaaaatgttcatagtgactgaaacttgttagcagaacttgcatagtgctagctctaaagagaagtttgggctcggtttagagggactttggctgccatactagggagtttggattccattctacagtgtggaggaagattttttaaaagcaccatttagtaaacactgtggttgcctcctcaacatctattccctacactacccctattgtcctttctaaccaaatccattttttttttaaatcagataatccacctctcctttatgagattcaggggacaatgaattcatctccatttccaaggatagatctgtattagcttaaatcaggcaggctaactcatacttcttgtgcttccatgacagactctttctgggttatacgtaataaatatacataaacaatattatacttcattgtccagcatatacaagaggcaaacacaaatcagaaatattatctttaccagtggtacatgagtccattttttgtcaaatagagagcaattgctgcagtaattgcagtttatcactaagccagatgcaggggttactcatacatatgccttctaattgtgggctactattaatagtcactggcctccttcttaaattattttcagtcatgagcttaacttaatgtggtaccatatattctttcttttaaggaccttaagaatctgggaagaattagccacactctaatttaggaacagagatggatgaatccacctatggacatttactggtatgagtcactggggaagttcactaagtcactatttaagatgatccagaacaggtgtctacagctgccttaagaatgagtactatggt

SEQ ID NO: 39543 - DNA, 2300 bp, Homo sapien
cctcggcctcccagtagatttctttgtcatgttatttgtcggtcctaggattatttctcctgattgcacaaatatccattgcctaggtgctttaaacatgagacattggatatttgttcaacatttaaaataattgttatcaattattgggtgtgtaccagttattgtagtgattcctttctatagattgtttcatttaatcttcacaataatctcatgacatggcaaccattatcactcccattttattttatgaacgagagaactgaagttaaggaagataaggtaaattatctaaggctatattgctaataagtggttgatctgggatttgaattcaggcattctgattacagaatgggcattcataactacagtgctttgaatgaccccatcaatgggtaaataaagaagccgaccagcaaaccaaaggatcattatgttcctacttgccagagctttggctgcatatacttacctatcatctacttttatcagaacaaaaaatcattttgtttatcccaaatgacaattcaaagaatttaaggtaggctcctgaagtgcttcccaatagatagtgctggagtgagccctttagcatcagccagatcttttaggttctgcattactcaagtttcagttattctttctagggtaccatgaaagtgttctctagtttgttggattttgaatgatggactatttcagtgaagtgcctgactcccagagatcccaaacactgcatgttctcagagaggaaattagatcctccatctttgagaatatgtgtatccatccttgccctctttaatatatttttagcagtacatcccggggatatatttaaaatataaagttatccatgttacttccgtgtctaaaagcctccactggaatttctaatttgagataatggagtaaacataagtttaccttccctccctccccaggccccactgaaattgaagtcaagaaatgcaaaaaggaactgacacatctcagcaaagaaaactgaagggatttggttataagtggagaggatctcagcatatttctggaagatagaaagtggatgaagcatgataatgaaagagtgaagaacctttcagataaaatgtaagctgatctgaacaacataaccccaaagagacttgcgcacctgaaaagcttgtctactgaagaattactccagttgtaagattgagccctctcctactctcccccaactcttatgcacagaacacaggcagtctccactattgataccagttaaaaatttcttgttattgttgctgttgttgtttgtataaaggaattgaacaggctgcttgcagagagataagagttggtgctccagaaaaaaatttctcttctagtggaaataagtgcccctacccccagccggtcagctaattctctactgacagctgagacctcctactcaagtgcctgttgccttcaggtatagaagaggtttcctgaagaaacagacctaactgtacaacagcagaggaaacccatgccaactgttatacaagttaacagttatgttgatttttaaatgggaatggtgagttagaaattcccagacatgggcgatggggagggaagaggaataagaaaagtcacgaggtagaattaggggccttgaaaatatgacaaactctgagggaaacaaagacaatgtggaaagaataacttaattttaattccatctccagagagatttgaggtgtatttaagatgaaaaacaggatactacaaagaaacggaaaactcaggagttcgagaccagcctaggcaagatggcaacatcccgtctctacaaaataatttttaaaaattagccaagcatggtggcatgtgcctgtggtcctagctacttgggaggctgaagtgggaagatcacttgagcccaggagttcaaggcttcagtgagccatgatggtgccactgcactccagcctgggggacagagtgagaccctgtctcttaaaaagcaagaaaagaaagagaagactgagaataagaagatctctttgaaaataaaataagactgctaaaagtatttggtatacagtctggaaaataaagttgagggaatctctccagataaagagcaaaaagaaatagatagaaaaatataaagaaagaaaaaagacatagacaatcaatatgtaatgttaggagttcctggaagagagaacagagacagtgtaggtgaagaaataaaaagaaaaagaattgaagaacagagcaagctaagtctccagattgagagggcccaatacaatctacat

SEQ ID NO: 39544 - DNA, 2300 bp, Homo sapien
tggaagaagtctggaaggatctgtccattctctggtaatggtgaacattcacatagggttttccatgtgccagacactgctttaagagctttatctgtattaagtcatttaatcttcataaaaattccatgaagtagagacaattattatccccaatgttacagatgaaaacactaagatagaagttaacaagccctctgtgataggcagaaaaatagctccctaaagatgttgatatggtttggctatgtgcccccacccaaatctcatcttgcagctcccataattcccacgtgttatgggagggatctggtgggagatgattgaatcatgggggtgggtctttccccaaccgttctcatgatagtggagaggtcgcaggagatccgatggttttaaaaacggcagtttccctgaacaagctgtctctttgcctgccgccatccacataagatgtgacttgcttctccttgccttctgccatgattgtgaggcctccccaaccacgtgaaactgtgagtccaattaaacctctttcttttgtaaattgcccagtctggggaatgtctttatctgcagtgtgaaaatggattaatacagatgtccagatcctaattcccagaatttgtgatacgcaatgctacatggcaagggagaattaaggttgcagacagaatgaaggctgctaattagctgaccttgagatgggaaattatctagattatctggataggcacaatgtaatcacaaggtccttctaagtgaaagaaggaagcaggagactcaaagaaggagatgtgacacagaagcagaggctggagccatgagattgctgactttgaagatgaaggaaagggctgcaagccagggaatgcgggagcctctggaagctggaaaaagcaaggaaaatagatttgtccctagatcctgcaaagagaaacacatccctgcctacacctggatgatagcccagtgagacctgtgctggacttccaggacctacagtcctggaagatagtagtaaatctgtgttgttttaagccactaaatgtgtgaaaatttatcacagcagccttagcaatgaatacactgcccaacttgtaagcagaggatgtggtggcttcaaagtccaggctttttccctgctactcctttctttctttcctccctcatgcccaatatctgtcatctgttgattggttagtaacattctcaacgccttactgttttattaaacttataaaaacaatgtattggtttaaaaaaaaacaattcagtggttgtgaaggtaagaatcaatagacaatttctccaccgttagccccgcctcttatagaagcacatgcagcatgtcttcttcatacacgaatgtaatgctaaagctgatgcagtggctcaggcctgtgatcccagcactttgggaggccgaggcgggaggatcacttgagccctggcgttcgagaccagcctgggcaacaaagtaaaaccctgtctctaacaaaaaatcaaaaagttagctgggcgtggtggcggcgcacttgtggtcccagcctctgaggtggaaggatcgcttgagcctgggaggttgaagctgcagtgagctgtgatggcaccactgcactccagcctgggtggcagaagcagaccctccccctggaggggaggggaggggaggggaggggaggggaggggaggggagggggaaagagagatcctactctccattttaatacaacttgcttttttaattaaaaactatagctagaaccgatagatttcactcgtccttaaaaatagtcctgtattattttatataaacatctctcgctatttatcaaggccgtcacttgttcagaagtattctcacttttgttttgttttgttttgttcttaacaatttgctccctatattcctgggctggcgcctaggcctgcatccgggatttggcgccacatctgcgggcagggcctctgaggtctaggggagggacggcgccggccaagtcccgcccccgtccgcgtcgaccaatcagctccctggaaggcccctcctcaccaccccccacccccgcagtctccgcctaagactttccaagtcctgtagtttcgagcccgctgccctttgcctcctgggcggagaagctgcttcctcctgggaacaaccgcctcccgctcctagcaggttgctactgccccgaacccgcgctgcagggaacagcggggcaaacagtgagtggggttcagcgtagactctggaccaggagaggcccgcggtgaccgaggcctgggccccgggttag

SEQ ID NO: 39545 - DNA, 2300 bp, Homo sapien
actgggtctaataattggactcagattatatgaaaagtcaaccaaatcaagacaggaaatagacaacaaggtctcaaagaagaaagactaattgtcttctcaggatatctaaaaccatctttgagatctcacccacccagtggcacttgggttctgggtgtccaaatgttaggatgatggaaatacttctgcccatgatggatgcattcagcgtatacaaccaagtgctcaaccgcaggtcagatgcaccttcctctaaatgaaatgaacatttctaatgacagcccaagtctgtaaaggaaggtgtctggtttatttagagcagcatgaaagaaaaacgtatgtttttttgtgggacttaaccttcatgtgctctgttgaatacagagtattcagagctctatttgcctcagctaagattgtagaggactccaataagaagggcaaataggattaaaactcagtggagtattagaatcatggtgtactcattttctggagagaaagtttttggctttttagtccttagctttagggaattatcactataatgaataagagaatattggtaatatgccccgaagcctcagtatgtctcagaataaatttacaaggctcttacaaggttttatttaaccatgcactctttgaattgatgtaaatattggaaaggattatattcagaaatatatttttggaatgtgagacattgaggaatgcttttctggcgtgcatacctcctgagtctttccaagtcaacacttccctcttcctaatatggaggaaaagggagaagttaatgtcttaagccagccagtcaatagaggtagaaaattatgttagatactttaaaatgtataatacactgactggggtaggatagcaaatcatggaactcaatgttgcgaatggaaaatatacctaggtgtcaagccctggacatttgattccttgcaagaataaattgaatatatttcagtcttggtccacagagtagcaatggaatttaaatgcaattaaaaataataaaacaaaaatgtgaacagcagcacgtgaagacatttccagagccccacaaattatgatcctgtctgcgtggcaccaacacagtgataagttctgtcaatgcctgattgatctttaactatgggtctggcttctcatcttttacttgatgaacagtggctcatggttcctccaacgtcttctcatttcattaaagcagcaatagggggaggatgtggcaaaaggctgaaaaggaactttaggggagaagtcattgttgcttggggctgtaccctttcttctcagcattctgcagagctgtagggagctgagcatggatggcacccccatctcggagatcaactcttcagggttaaataaaattctaacagactagttggcggaatgattgcataatttcaaaataccagatgtttacaacaaatattaacatatatcactgcctaagaatttactatgagtaagatatttaacttcacttaagatcttgcctttccctgtgttctttttaagaaggggagaggaaaaggcaattttagaacaggggccacatctgctggaaggcaggcctgaatatagagagctacagagacttgcatggagctttttggctcatagataaggggttagaatataaattcagagaaaggaaggcaggaacgtctatatagcccaattttatctaccccatccagataaaggctagtccaggtttgaacatctgctaacatggttctgtgaatttttcactcttcatcttcttcaggtgacatatattttcagtcaaagatattataagatggtagtcgattgaaacaataagaaaaagagtaatgggtgaatttaccgagataggataggttgaaaaagaacatttaatttgttgcaatttagatttaatttttataataaagaaaatagattccatggaatcaatgaattgatttgctttactaaagagagatcttgactgattgaaatttaactgttaaattagagtttttttgttatgtaaaatgaactgtgtgaggaatctaaacacttatttttttgttctttctttgtcgttgatagaagaatatttcagtcctgatatttgctgtaactaataattactggataaacagagaagacacatggaggatattttacctgggtccaacaaaagtaattttgttttatttatttgtttgacaaataaaaattgtatatatttatggcatagattttaagaaatcttgttacaaaaataatatgtatgtgatgtgatgcat

SEQ ID NO: 39546 - DNA, 2300 bp, Homo sapien
gctggcctcaaattcctgaactcaggtgatccaccggccaaggcctcccaatgtgctgggattgcagttgtgagccaccgcacccgacccagaggtcaacagcttctgccctagatcagaagtttactcactttgctcactcggtataaatcaaggaccctctcatacctgggaatgagttttgtattccagcctagaagtagagccagtcccagtttgaactttttgcctttctgtactcccagttcttacccttttgctgagcctaggacacatgcaaggcctgcccttcttaatccagatttttgagtcttaatcccaatttttcctatagtttcccatacactccatggcagcttagagtaggctgaaaactgctgaactgtttaagacttaatccttcagagtaacatggcagaagtagcacacttttttaacataaagctgttcaggactctattacagaagaggctatacttccttaattacattctattctacagccacctcaaaataactagtgaacacgttcaaccaggatcattggcaacagccaatgggcacagtgatctagaaatggtctagccaagctgtttgggctgtagaccatggcattcctaagagctaaataggcaaggagtccattaatatttcacttgacttatgtcaccatggaaacccctggagtagtgaatggctttggggagtggtcagattcaaccaaaaataacagaaatctctgtcccccaggtaaaggattcctactttgtgtgtgtctgtgtgtgcacacaggcacactcgagagacttttggcattctttgaagtcactggaggggcacagagataaacccactcagccttggcctccaagactaacagaacaaaacgtttccctgaaagaataaaaaaaaaatacaggcataagaaaacacacaaacatgggcttagagatttaaatacacacacacacacacacacacacacacacacacacaggccctagaaggaacatacaccctgagatacgcactcattctaaaataaactcgggaatacagaaggacacgggcatgtcctttcagagaggcacacttctaggccctaagtaggagaaggaagaggggagaggaagaggcagggagagggacagggaggggggaggagggagggagagagagagagaaacgaagaagggggcggaggaggagatggaggagacactctttattctataggaggagacatcacggaagagaaatcaacactgaggccttggccgggcgcggtggctcacgcctgtaatcccagcactttgggaggccgaggcgggtgcatcacctgaggtcaggagtttccagaccagcctggccaacatggcgaaacccggcctctactaaaaaatacaaaaattagccgggcatggtggcgcggacctgtaatcccagctactcgggaggctgaggcaggagaatctcttgaacccggagacggaggttgcagtgagccgagatcgcgccattgcactccagcctgggcaacagggcgagactccgtctcagaaaaaacaacaacaacaacaacaacgaacaaaccaaaaaccaatgaggcctgaagataaagacacatgtacaaccacggatgtcagacttccagaggcacggccaaggcaaaagacaaacacatacagactgcagcaggcagacaggccggttccagagtcaggctccggtgaagctccgaagaaacaaacacgcagggagatttcggaggcgtccgaggacaccgtggggcccggctggctccctctgtctctgtgcgcgccccttccccgggtcaccccgcctgcgcccgacctgcgcccgcgcaccgcgccctcggggctccctgggacagcccgcggcctggcccgtgcgcccgggctcccctctccgccggcccggcacttcccagctctgacgcgggagcttctttcacaccaatggggctcgcgcgcggaggggccctgcccctcctccgggaaggtgtgtccctgtttcctcacctgaaacttcctaggagaacccgatccctccctcccgtcgggcggccaggggcgggccgcgggtggggcggccgggcctgcgctggggacggctctggggactgcggccggcgccgggacctggaggggacgctggggccgaagcagcatgtgacaccgaccaggtgggtgccctcctcccgtctcggccctgggctcccggcggctgtggagcccggcggaggtggggcagggacaggaaggaagaggaagccaggc

SEQ ID NO: 39547 - DNA, 2300 bp, Homo sapien
gtttataaggtgtaaattcaaatgcatttcacaaccaaatatttcatatgctttgcgtgttttccaattaaatgtagaaggttggcctaggagagtatttttttaatagaatcctgaaaaaaaaaatataacccttggccatgtgttatgaagttacaatattcactagaatttatttgtgtcttgctgataataatcaacaatttattgataatgcttataagtatacaatcatttgttaccactggaaaaggatccagtgggaacgttctttagggctccaattagattagttttttaactttttcttttctaacttttaagttcaggggtacaaatgcaggtttgttacataggtaaacaaacttgtgtcttgagggttttttgtacaaattatctcatcacccagatattaagcctagtacccattagttattttttgtgatcctcttcctcctcccaccctttaccctgtgataggccccagtactgtgttgttcccctctatgtgtccatgtgttctcatcatttagctcctgcttatatgtgagaacattcggtatttggttttctgttcctgcattagtttgctaaggataatggtctccagctccatccatgtccatcaaaggataagatctcattctttttttatggctgcatagtattccatggtgtatatgtaccacattttctttatccagtctatcgttggtggacatttagggtggttccatgtctttgctccaatgacagctggaccagggtcttatcaaaagcagcatatttccttaatctggagaagttctccttaatccagagaagctttttcttcagagataagcaggttcaacggctcagccgcaggttatttttgcctagcaaaggcactaacaaaaacatgtgcactggcaaaatactggatttctacatggtatattgaggaaaatgttatctaggacttaaggacaaaaacccaaatattatttggcacatcaccaattcacaaataccaattacctgacaatttattgctataataatctgcaaaataatgaagtcactaaattagctctttgcaaaaaaagttttaattagccacctgtaaagtgtttagcaattcttatgttgctgaagcacaattaattttttatgaatggtcatttctggtgtttttgaaagatacttcatttaaattttttctccatagtttctttcattctacatgtaaaaagaacatcttacttaaacacaaatggattaaatttaccaaagggttggcaaaagtgaaaggagagactagaaaagaaatgatatataatgcagtggcaaacataacattcaggcattgtgaatgttttaaatgatacgtatgtacaaactcgcccagaaaaatctaatttctacaaattgtgtgagttgttattcaaaaccagtttttggtaaatcagtaactgtgcatcaatcagtagattaactgccaaatcaccaattatcggttcctatttatgacccattgtaaaataaagattgcaattagaacccatttgtagcacatccattagttccttctcaggaacccaaacaatcacaatgtcattaaaattgttttttgtctttctacttcttctgttattatataaactgctccagagtgcaaaggttgatttcagatgttgaaagcaaaatagttgatatttctactgagaaactgggattacatcatctttttttctaggactactctaattcccatatttggagttcttccattactgattatttctacacttcaggaattctcttagtaatttttatatgtgcagcttcaagacaatccttattagatggtcattttacttccacttttggtacgacattctttcttcccatgatgtgtcaatggctctatgtatcctatcattggtgacacaatcccttctataacactggatacttacaatcagtaattaacttaatgtgtagctcaatcactaatgttaaaagtttatcttttaaaaatgactaaattcataaaataatgtctaggtgttttttgacaatctggtcctaagtgatctttttctttttcacagggaaatgggggaaaatcagacaatggtcacagagttcctcctactgggatttctcctgggcccaaggattcagatgctcctctttgggctcttctccctgttctatatcttcaccctgctggggaacggggccatcctggggctcatctcactggactccagactccacacccccatgtacttcttcctctcacacctggctgt

SEQ ID NO: 39548 - DNA, 2300 bp, Homo sapien
gacttacttcacatcagatgcctctgtctagggatcacaattcatattagcatagtgaatgctgtaaatatttctctaggaaagaataattctataccagctttaagccagtgttttctaaacttatgtgagcacataaaatttcctttgtaatacttagtaacagtttcctggaacaggagatcttgatattaattgactcattgtgaatacttcctacagcccccttctagggcagaatgatttcttttttccttgcaaagtgagcctctaaagagatgtagttctgagcattatgcctcgatcagtctgtaaaaatccgggttctgtttggatacagaccgtgagggaccctgtctctactgttcaatggtagatcatctaaagaaaataaatgcaatcctgtccttcatcatggatcggcattcctgctatagaagcttcaggagatgacctcattcaacctcacaatcttctaaatttgagatttttaagaaatatgattcagtatacatctgcctgtgtttgccgctgaatgaaatcaatctaatttttctaattcagggttttcaagataaacccagatttctcaagaaagaaaaatctagaaagatttcaaaatccaccacctacacacttaaaagttgtagcagcttcttatgccatgggaaacatgtcattttgagatgatgttttttctaggtttaagtttggtcttaaacatttatatttaatttctcattgtcttagttcaaagaatttacttttatattttaaaataactttttacacaataactcagtgtcatatcatgttagatataaaactatgtcctaaaactattttatcctttttttttttttttgagacagtcttgctctatagcccaggctggagtgcggtggtgcaatctcggctcactgcaacctctgcctcctgggttgaaacaattctcctgcctcagcctcctaagtagctgggactacaggcatgtgccaccacgcatagctaattttcagtagagacagggtttgtatttttagtagagacagggtttcaccgtgttggccaggctggtctcaaactcctgacctcagttgattcacctgcctcggcctcccaaagtgctaggattacaggcatgagccatcctgcccagcctattttatactgcttatactatttatatagtataaaaatagttttaaaactattttatggtatactttttataaagtaaaaagtatactgtagtataatttttatactatataccatattatatttttataaagttgtttccatttgctactaactttttcttttgtatgtcagtttcctgatttctacatttcctgcaggtcacctggaacatcaaaagaaaaagaaaagctgtaatattgatgggtggcctactgtgcaacaagattttcatatagtgtttttggtgttatatggatgtttcttctcgcagtggatgtgtagagtcagagcacagatgggcatactctcaaaccttaataactgtgccacattgccctttgagtttattctaaaccttagcaagtcagagatcacactgtatggaactaacttctatctaaattgcatgattgattgataggagatttccaaataacatttggactgccttacatccagtaaaagaactcagcaaaatacaaataaatatgataatatcttagacagcaaatcttctcatcccacaagaggcaggaaactgctagaggaagctgccttggagaggattctttcctcccctcccgaaaggagctgaactcaaaatctctccatttcacaatagacattggagaacattttcaacagtggatttgcaccggtgttttgtgtcctagaaaaacgttcccttcaggtaggttctaataagccccactgggacattttggacacccttgtctgctctctgcctctctaaccttagagggtcccttggaatcaactaatatttcaggtcctttcttcccattactgttgccacacaaggaacccagattacatcagggagaggctgagctccagaggttcacaccaggagcttattcattgtcacactgttcctgcttcctgacaggttcacttgaaccatctggagattggggaacaagggcaatgtgagtattcatgaaattcaaatcatgccaagtattccgggatgggaatggttgtctcagaggtgtgctctgtggttgactgaccttgagcttgcgttttcttccttttcttttttttttaaattatactttaggttttatggtaca

SEQ ID NO: 39549 - DNA, 2300 bp, Homo sapien
gaaataaataaaaaggtacacattaaacaaaaatcctataaaaagaaaatttaaagtattattaattattacatcgttttctcactttgctcactcggtataaatcaaggaccctctcatacctgggaatgagttttgtattccagcctagaagtagagccagtcccagtttgaactttttgcctttctgtactcccagttcttacccttttgctgagcctaggacacatgcaaggcctgcccttcttaatccagatttttgagtcttaatcccaatttttcctatagtttcccatacactccatggcagcttagagtaggctgaaaactgctgaactgtttaagacttaatccttcagagtaacatggcagaagtagcacacttttttaacataaagctgttcaggactctattacagaagaggctatacttccttaattacattctattctacagccacctcaaaataactagtgaacacgttcaaccaggatcattggcaacagccaatgggcacagtgatctggaaatggtctagccaagctgtttgggctgtagaccatggcattcctaagagctaaataggcaaggagtccattaatatttcacttgacttatgtcaccatggaaacccctggagtagtgaatggctttggggagtggtcagattcaaccaaaaataacagaaatctctgtcccccaggtaaaggattcctactttgtgtgtgtctgtgtgtgcacacaggcacactcgagagacttttggcattctttgaagtcactggaggggcacagagataaacccactcagccttggcctccaagactaacgaacacgtttccctgaaagaataaaaaaaaaatacaggcataagaaaacacacaaacatgggcttagagatttaaatacacacacacacacacacacacacacaggccctagaaggaacatacaccctgagatatgcactcattctaaaataaactcgggaatacagaaggacacgggcatgtcctttcagagaggcacacttctaggccctaagtaggagaaggaagaggggagaggaagaggcagggagagggacagggaggggggaggagggagggagagagagagagaaacgaagaagggggcggaggaggagatggaggagacactctttattctataggaggagacatcacggaagagaaatcaacactgaggccttggccgggcgcggtggctcacgcctgtaatcccagcactttgggaggccgaggcgggtgcatcacctgaggtcaggagtttccagaccagcctggccaacatggcgaaacccggcctctactaaaaaatacaaaaattagccgggcatggtggcgcggacctgtaatcccagctactcgggaggctgaggcaggagaatctcttgaacccggagacggaggttgcagtgagccgagatcgcgccattgcactccagcctgggcaacagggcgagactccgtctcagaaaaaacaacaacaacaacaacaacgaacaaaccaaaaaccaatgaggcctgaagataaagacacatgtacaaccacggatgtcagacttccagaggcacggccaaggcaaaagacaaacacatacagactgcagcaggcagacaggccggttccagagtcaggctccggtgaagctccgaagaaacaaacacgcagggagatttcggaggcgtccgaggacaccgtggggcccggctggctccctctgtctctgtgcgcgccccttccccgggtcaccccgcctgcgcccgacctgcgcccgcgcaccgcgccctcggggctccctgggacagcccgcggcctggcccgtgcgcccgggctcccctccccgccggcccggcacttcccagctctgacgcgggagcttctttcacaccaatggggctcgcgcgcggaggggccctgcccctcctccgggaaggtgtgtccctgtttcctcacctgaaacttcctaggagaacccgatccctccctcccgtcgggcggccaggggcgggtcgcgggtggggcggccgggcctgcgctggggacggctctggggactgcggccggcgccgggacctggaggggacgctggggccgaagcagcatgtgacaccgaccaggtgggtgccctcctcccgtctcggccctgggctcccggcggctgtggagcccggcggaggtggggcagggacaggaaggaagaggaagccaggcctttcccagggatcagcccccgctgggtccggggcgcaggctccggaaatgggggggctg

SEQ ID NO: 39550 - DNA, 2300 bp, Homo sapien
tggtctacagcccaaacagcttggctagaccatttccagatcactgtgcccattggctgttgccaatgatcctggttgaacgtgttcactagttattttgaggtggctgtagaatagaatgtaattaaggaagtatagcctcttctgtaatagagtcctgaacagctttatgttaaaaaagtgtgctacttctgccatgttactctgaaggattaagtcttaaacagttcagcagttttcagcctactctaagctgccatggagtgtatgggaaactataggaaaaattgggattaagactcaaaaatctggattaagaagggcaggccttgcatgtgtcctaggctcagcaaaagggtaagaactgggagtacagaaaggcaaaaagttcaaactgggactggctctacttctaggctggaatacaaaactcattcccaggtatgagagggtccttgatttataccgagtgagcaaagtgagaaaacgatgtaataattaataatactttaaattttctttttataggatttttgtttaatgtgtacctttttatttatttctgcttttcctcccgaggcacatcttcacaatgaaatcttcacaagctcagaaccatcaacttgctacactgtgttcctccagtgcccagttcacaggaagcactcaagagtaggatcaattgttatcaacctctagcagattattgaatagacggtcgttacatgaaactgacactcagttcttcatggtccacgatagttcttatatccagaaaacgtacttacgttatcaactctgactccataagacaactttgcaaagtcttggctcataactatgtaagcaatgagataacttacttttcatttctcacttgttacttacaagtaaacagccctgcagctcagctgagctacagattaactacaggtaatcacttcagcgattctgctttacccatgcccaagattttaaaaaagaacctgacagatcattaaattttgagatttgctttttaaaatgcaggttccataaagttacgctgttttgcttatatatacagcaacaaatgccttcttagatatttactttaaaattctagtttccttaccatgtattagccagataatctgtcattttttaaattctgaaattgtacacatataaattaatgtacatctctatgcctgaaaggtacatttggaattacaacgtgtgtcaaggtagagcaaaatcccccagtccactccttccaaccccctagaaatttactctgtttggtttcctcttgattgtctttaattaacaataagtatgtcacataggtatcaaataaaataagaaaaaaaatagataaaagagaagtgattcaaaattcaagtgtttaaacactttatgaatcttcccgttgttcttgacacatttttaaaatttcattttaattcagatcattagggatgaaattctcctgaattgtagcattttattccctttgggaagaaggggctgaatttggcataattatacttgactataccgtaaaagaaaccagatctaatataaggacatcaatacttagttattaattcatttgcttatatttatatgtcatttgaaaatgtgtattaacatacacaattaaagggatataaaaatgaacatgccctctccatttctttaaaagaaatcaaggctgaatcaaacaggactactgttctgaaagaatactcagactatgaggtaccttattttccttcttttacacctgtctttcagttggcttcaaaaaatcatggcttttactgtgtttcttttttcctttatgtcttccttttgagggaaatgaaaaattgagaaaggaaattattattttataagtgggtgggtttgaatacatctttcacagtcaaatatttttctatgccttatgagcttaaaaaataaatttagaaagtttgataaacacagaaattttttattttatgttattttatgagatgagggcttgccatgttatccaggctgtcctggaactcctgggctcaagctatcctcctgctttcagcctcccaagtagctggaactacaggtgcatatgacggcacctactgagaaatttttactatcaacctaaaatttaataagtcctggtcacaagtgaggaatttttaatttgttatttagattatttttgtgtcaaggtaacttgatcacctatcaataatgcttataagaaaatagatatctcatctgttgctgttagaaaggaatctgtctctttccccagttcttgcttc

SEQ ID NO: 39551 - DNA, 2300 bp, Homo sapien
agaaggggtttcgccatgtttggccaggctggcctcaaattcctgaactcaggtgatccaccggccaaggcctcccaatgtgctgggattacagttgtgagtcaccgcacccgacccagaggtcaacagcttctgccctagatcagaagtttactcactttgctcactcggtataaatcaaggaccctctcatacctgggaatgagttttgtattccagcctagaagtagagccagtcccagtttgaactttttgcctttctgtactcccagttcttacccttttgctgagcctaggacacatgcaaggcctgcccttcttaatccagatttttgagtcttaatcccaatttttcctatagtttcccatacactccatggcagcttagagtaggctgaaaactgctgaactgtttaagacttaatccttcagagtaacatggcagaagtagcacacttttttaacataaagctgttcaggactctattacagaagaggctatacttccttaattacattctattctacagccacctcaaaataactagtgaacacgttcaaccaggatcattggcaacagccaatgggcacagtgatctggaaatggtctagccaagctgtttgggctgtagaccatggcattcctaagagcaaaataggcaaggagtccattaatatttcacttgacttatgtcaccatggaaacccctggagtagtgaatggctttggggagtggtcagattcaaccaaaaataacagaaatctctgtcccccaggtaaaggattcctactttgtgtgtgtctgtgtgtgcacacaggcacactcgagagacttttggcattctttgaagtcactggaggggcacagagataaacccactcagccttggcctccaagactaacagaacacaacgtttccctgaaagaataaaaaaaaaaatacaggcataagaaaacacacaaacatgggcttagagatttaaatacacacacacacacacacacacacacacacacacaggccctagaaggaacatacaccctgagatacgcactcattctaaaataaactcgggaatacagaaggacacgggcatgtcctttcagagaggcacacttctaggccctaagtaggagaaggaagaggggagaggaagaggcagggagagggacagggaggggggaggagggagggagagagagagagaaacgaagaagggggcggaggaggagatggaggagacactctttattctataggaggagacatcacggaagagaaatcaacactgaggccttggccgggcgcggtggctcacgcctgtaatcccagcactttgggaggccgaggcgggtgcatcacctgaggtcaggagtttccagaccagcctggccaacatggcgaaacccggcctctactaaaaaatacaaaaattagccgggcatggtggcgcggacctgtaatcccagctactcgggaggctgaggcaggagaatctcttgaacccggagacggaggttgcagtgagccgagatcgcgccattgcactccagcctgggcaacagggcgagactccgtctcagaaacaacaacaacaacaacaacaacaacaacatcaacaacaacaacaacaacaacgaacaaaccaaaaaccaatgaggcctgaagataaagacacatgtacaaccacggatgtcagacttccagaggcacggccaaggcaaaagacaaacacatacagactgcagcaggcagacaggccggttccagagtcaggctccggtgaagctccgaagaaacaaacacgcagggagatttcggaggcgtccgaggacaccgtggggcccggctggctccctctgtctctgtgcgcgccccttccccgggtcaccccgcctgcgcccgacctgcgcccgcgcaccgcgccctcggggctccctgggacagcccgcggcctggcccgtgcgcccgggctcccctccccgccggcccggcacttcccagctctgacgcgggagcttctttcacaccaatggggctcgcgcgcggaggggccctgcccctcctccgggaaggtgtgtccctgtttcctcacctgaaacttcctaggagaacccgatccctccctcccgtcgggcggccaggggcgggccgcgggtggggcggccgggcctgcgctggggacggctctggggactgcggccggcgccgggacctggaggggacgctggggccgaagcagcatgtgacaccgaccaggtgggtgccctcctcccgtctcggccctgggctcccgg

SEQ ID NO: 39552 - DNA, 2300 bp, Homo sapien
gtggtcctggtggcatacacacagataacattagtgtgagtgacgtgtttgtgtattaacacagaccttgagggtgactttgttccagtctaccttgcaggcactataagtgatcggctcctgcttactccacagacactgtgagtgacccagcccctgtctacactagagctgttggtcacctgtttgtctacaccactgacacttgagtaatgctgctcccgttgaacccaagaccctacgagtgactccattcctgtccataccacatagcgactgacctctccagacaccacaaatgacgtattcctgtctatcccacagacaccacgtgtaacgtggccacggaacctcagacagaccgcgttaagggcactgatacactctcaggacctctaatatatgaacactcttctctctattgagaatcactatattctgttgatgagagggattcctttgcactcctcctgatttctctctcctccccactaggaccatgacatacattcctcctgcatatcagtctcacccagaactgacacgccctcatcccatcttcccagctccccaggactccttcactagccatggcttcacttttaggcccacagattggttaacaaatgacacccattttgctaaggcctatgccaggaacttcttcatgctccaaatgtggataaaacaagacgtctgagacagaggccacatcaagagctttttagctggagctgggacctctggattaggcccaagatgcaaggccagacagtggagtgcagtaggggagcaagctagggaggaagctcgaaaggaaaaccaccctctctcatctgtttgacacacccttctctctcaaccagacaagagtcctggccagagttcacttctaggtagacaggagggcaaatctgtctttggaacccaagatccaggaagggaagaaagggactgagatctggaaatgacgtagtatcacaactggctctcctccggtagtcttgccggaaggcaactgcaaaagatgctcaggggttctagagctctgcgtccgcattctagcaccccaacgcctacctcagcccccaactctaaataacttctttccaccttgctaagaatgcaacgttgtgattcacatcaagctttaggaggctccccatatgtagggaactggggtgaggggcagggcaggattcactgttccaggttacggagctttggttaacacggagagaagctacacatagactcacacagtatgcaaatacctatggagatacataaggaaaggccccggcctggttaaggaaaaggagccgataaaacctctccaggtaaggaacagcctagaaagggaatctcagttattccttctgatatggcttagctttccccagggcgcctactttgaagaaagagccctgattattggcccggggaacgtctgggggcagggtgcccatttcctaggcgggacccgaccggaagcaaacttgtaggcaacaacatttcctctagttcctctcctcttccccaccagggtcctcagccacacaccccgagccctgcctgcgggcccagcccccccatttccggagcctgcgccccggacccagcgggggctgatccctgggaaaggcctggcttcctcttccttcctgtccctgccccacctccgccgggctccacagccgccgggagcccagggccgagacgggaggagggcacccacctggtcggtgtcacatgctgcttcggccccagcgtcccctccaggtcccggcgccggccgcagtccccagagccgtccccagcgcaggcccggccgccccacccgcggcccgcccctggccgcccgacgggagggagggatcgggttctcctaggaagtttcaggtgaggaaacagggacacaccttcccggaggaggggcagggcccctccgcgcgcgagccccattggtgtgaaagaagctcccgcgtcagagctgggaagtgccgggccggcggggaggggagcccgggcgcacgggccaggccgcgggctgtcccagggagccccgagggcgcggtgcgcgggcgcaggtcgggcgcaggcggggtgacccggggaaggggcgcgcacagagacagagggagccagccgggccccacggtgtcctcggacgcctccgaaatctccctgcgtgtttgtttcttcggagcttcaccggagcctgactctggaaccggcctgtctgcctgctgcagtctgtatgtgtttgtcttttgccttggccgtgcctctggaagtct

SEQ ID NO: 39553 - DNA, 2300 bp, Homo sapien
cgaagagtagacagggagagacagaagatgacataatggagtctagagagaactgacaactgggagcttctgggcactctctgacaatggtcctctgctataatttaattgttcattatgacctgtttccctcacaagaccacagtctccatgacgacaagatctttatctcattcactactgaatgccccacacttaacagggtcgctaggaaaatatttatgaaataaatacatcaatgacaagttttttagaggctattgcttattttgttgagaacctgttgtctcaaagaatgaccctaaatggaaccaaataaatgcatcactcttcttttttatggtctcttcctctgataggtaaaagcagagttgttagaaacatttgtctttgattcctccttaggattcagccctgatggaggctgaggaggcccagcgtggagcctctcctcccatctctgccatagaggaattcagcattatccctgaggctcccatgaggagcagccaggtctctgccttggggcttgaagctcaagaagatgaggacccatcctataagtggagagaggaacacagactctcagcaactcagcagagtgagttaagggatgtgtgtgactatgcgattgagacgatgccctcttttcccaaggaaggttctgcagatgtggagcccaatcaggaaagccttgtggctgaggcctgtgacactccggaacactgggaggcagtaccccagagcctagcaggccgacaagcaaggactctagctcccccagagctctgggcctgccccattcagagtgagcatctagacatggccccattttccagtgacctgggaagcgaagaagaggaggtggaattttggccaggacttacttctttgacattgggatctggacaggcagaagaagaagaggaaacctcttcagataactctggtcagaccagatattattctccctgcgaagagcatcctgcagagaccaaccagaatgaaggctctgaaagtgggactatcaggcagggggaagagctgccacctgaggagctgcaggaaagtcaagggctcttgcatccccaggaggtccaagttctggaggagcagggacagcaggaagcaggatttcggggggaaggaactctgagggaggatgtttgtgccgatgggctattaggggaggaacagatgatagagcaggttaatgatgaaaagggagaacagaagcaaaaacaggaacaggtacaagatgtgatgcttgggagacaaggagaaagaatggggctcactggggagccagagggtctgaatgacggtgagtgggagcaggaggatatggagaggaaggctcagggtcagggaggtccagaacagggagaagagaggaagagggagctgcaggtgccagaagagaatagggcggactctcaggacgaaaagagtcaaacctttttgggaaaatcagaggaagtaactggaaagcaagaagatcatggtataaaggagaaaggggtgccagtcagcgggcaggaggcgaaagagccagagagttgggatgggggcaggctgggggcagtgggaagagcgaggagcagggaagaggagaatgagcatcatgggccttcaatgcccgctctgatagcccctgaggactctcctcactgtgacctgtttccaggtgcctcatatctcatgactcagattcccgggactcagacagagtccagggctgaggaactgtcccccgcagctctgtctccctcgctagagcccatcaggtgctctcaccagcccatttctctactgggctcctttttgactgaggagtcacctgacaaggaaatagatcaaaacagccagcaagaggaatccaggctgaggaagggaacagtgtccagccaagggactgaggtggtctttgccagtgcatctgtgactcctccaaggacaccagattcagctcctcccagtcctgctgaagcctaccccatcacacctgcctcggtatctgccaggcccccagttgcctttcccaggagggaaacctcttgtgctgcacgtgctccagaaactgccagtgcccctctctcaatggatgacccatctccctgtgggacttctgagatgtgcccggctgccctctatggcttcccctccaccgggaccagccctccgaggcccccagccaactccacaggcaccgtccagcacttacggagtgactccttccctggttctcacaggacagagcagactccagacctggtgggaatgttgctttcctactccca

SEQ ID NO: 39554 - DNA, 2300 bp, Homo sapien
cctataagtggagagaggaacacagactctcagcaactcagcagagtgagttaagggatgtgtgtgactatgcgattgagacgatgccctcttttcccaaggaaggttctgcagatgtggagcccaatcaggaaagccttgtggctgaggcctgtgacactccggaacactgggaggcagtaccccagagcctagcaggccgacaagcaaggactctagctcccccagagctctgggcctgccccattcagagtgagcatctagacatggccccattttccagtgacctgggaagcgaagaagaggaggtggaattttggccaggacttacttctttgacattgggatctggacaggcagaagaagaagaggaaacctcttcagataactctggtcagaccagatattattctccctgcgaagagcatcctgcagagaccaaccagaatgaaggctctgaaagtgggactatcaggcagggggaagagctgccacctgaggagctgcaggaaagtcaagggctcttgcatccccaggaggtccaagttctggaggagcagggacagcaggaagcaggatttcggggggaaggaactctgagggaggatgtttgtgccgatgggctattaggggaggaacagatgatagagcaggttaatgatgaaaagggagaacagaagcaaaaacaggaacaggtacaagatgtgatgcttgggagacaaggagaaagaatggggctcactggggagccagagggtctgaatgacggtgagtgggagcaggaggatatggagaggaaggctcagggtcagggaggtccagaacagggagaagagaggaagagggagctgcaggtgccagaagagaatagggcggactctcaggacgaaaagagtcaaacctttttgggaaaatcagaggaagtaactggaaagcaagaagatcatggtataaaggagaaaggggtgccagtcagcgggcaggaggcgaaagagccagagagttgggatgggggcaggctgggggcagtgggaagagcgaggagcagggaagaggagaatgagcatcatgggccttcaatgcccgctctgatagcccctgaggactctcctcactgtgacctgtttccaggtgcctcatatctcatgactcagattcccgggactcagacagagtccagggctgaggaactgtcccccgcagctctgtctccctcgctagagcccatcaggtgctctcaccagcccatttctctactgggctcctttttgactgaggagtcacctgacaaggaaatagatcaaaacagccagcaagaggaatccaggctgaggaagggaacagtgtccagccaagggactgaggtggtctttgccagtgcatctgtgactcctccaaggacaccagattcagctcctcccagtcctgctgaagcctaccccatcacacctgcctcggtatctgccaggcccccagttgcctttcccaggagggaaacctcttgtgctgcacgtgctccagaaactgccagtgcccctctctcaatggatgacccatctccctgtgggacttctgagatgtgcccggctgccctctatggcttcccctccaccgggaccagccctccgaggcccccagccaactccacaggcaccgtccagcacttacggagtgactccttccctggttctcacaggacagagcagactccagacctggtgggaatgttgctttcctactcccactcagagctgccccagaggccccccaaacctgccatctacagctctgtgaccccaagaagggacagaaggagtggtagggactacagcaccgtttcagcatcccctactgccttatccacgctgaagcaggactctcaagaatccatctcaaatctagagagacccagcagtcctcccagcatccagccctgggtctccccacataatccagcctttgccacagagtctcccgcctacggttcttccccatcctttgtctccatggaggatgtgaggatccacgaacctctgccccctcctcccccacagaggagggacacccatccctccgtggtggagacagatggccatgctcgtgtagtggttcccacgctgaagcagcatagccaccctcctccattggccctaggttcagggctgcatgccccccataaaggcccacttccccaagcctctgaccccgctgtggccaggcagcaccgacctctgccatctaccccagacagctcccaccatgctcaggccacccccaggtggagatacaacaagccgcta

SEQ ID NO: 39555 - DNA, 2300 bp, Homo sapien
aagcaggatttcggggggaaggaactctgagggaggatgtttgtgccgatgggctattaggggaggaacagatgatagagcaggttaatgatgaaaagggagaacagaagcaaaaacaggaacaggtacaagatgtgatgcttgggagacaaggagaaagaatggggctcactggggagccagagggtctgaatgacggtgagtgggagcaggaggatatggagaggaaggctcagggtcagggaggtccagaacagggagaagagaggaagagggagctgcaggtgccagaagagaatagggcggactctcaggacgaaaagagtcaaacctttttgggaaaatcagaggaagtaactggaaagcaagaagatcatggtataaaggagaaaggggtgccagtcagcgggcaggaggcgaaagagccagagagttgggatgggggcaggctgggggcagtgggaagagcgaggagcagggaagaggagaatgagcatcatgggccttcaatgcccgctctgatagcccctgaggactctcctcactgtgacctgtttccaggtgcctcatatctcatgactcagattcccgggactcagacagagtccagggctgaggaactgtcccccgcagctctgtctccctcgctagagcccatcaggtgctctcaccagcccatttctctactgggctcctttttgactgaggagtcacctgacaaggaaatagatcaaaacagccagcaagaggaatccaggctgaggaagggaacagtgtccagccaagggactgaggtggtctttgccagtgcatctgtgactcctccaaggacaccagattcagctcctcccagtcctgctgaagcctaccccatcacacctgcctcggtatctgccaggcccccagttgcctttcccaggagggaaacctcttgtgctgcacgtgctccagaaactgccagtgcccctctctcaatggatgacccatctccctgtgggacttctgagatgtgcccggctgccctctatggcttcccctccaccgggaccagccctccgaggcccccagccaactccacaggcaccgtccagcacttacggagtgactccttccctggttctcacaggacagagcagactccagacctggtgggaatgttgctttcctactcccactcagagctgccccagaggccccccaaacctgccatctacagctctgtgaccccaagaagggacagaaggagtggtagggactacagcaccgtttcagcatcccctactgccttatccacgctgaagcaggactctcaagaatccatctcaaatctagagagacccagcagtcctcccagcatccagccctgggtctccccacataatccagcctttgccacagagtctcccgcctacggttcttccccatcctttgtctccatggaggatgtgaggatccacgaacctctgccccctcctcccccacagaggagggacacccatccctccgtggtggagacagatggccatgctcgtgtagtggttcccacgctgaagcagcatagccaccctcctccattggccctaggttcagggctgcatgccccccataaaggcccacttccccaagcctctgaccccgctgtggccaggcagcaccgacctctgccatctaccccagacagctcccaccatgctcaggccacccccaggtggagatacaacaagccgctaccccctacccctgatttgccgcagccccaccttcctcccatttctgctcctggtagctcaaggatctacaggcctctacccccactacccatcatagaccctcccaccgaaccacccccattgcccccaaagtccagggggaggagcaggagcactcggggaggacatatgaactcagggggtcatgccaaaacaagacctgcttgtcaagactggacagtccccctccctgcctctgctggacgcacctcctggcccccggccacagctagatcaacagagtctttcacttccaccagcaggagtaagagcgaagtgtcccctggcatggctttcagcaacatgacaaacttcctatgcccctcttcccctaccactccctggactccggagctccagggacccacctctaaggatgaagcaggggtctcagaacaccctgaggcccctgcgagagaacctttgagaaggacaacccctcagcaaggagccagtggcccagggaggtcacctgtgggccaagcaaggcagccagaaaaacccagccatctgcacctggagaaggcgtcc

SEQ ID NO: 39556 - DNA, 2300 bp, Homo sapien
aaagattttattatgtttttaagtgttattataaagaagatgtagttatcactgctgcaatcctagtgggatttgtacacattggtgtatagcttggtataaaatttgagtttataatggaaataaatatttaaaaagttaacacttaaaaaagaagttaagtggtatgagagtttttataatgaaaccttttagacatttagagaatagcaccacatccccattgaaaatttaagtgaaagagagagagagaatgtgtgtgtgtgtgtgtgtgtgtgtgtgtgtgtgcacatgcctaccagttttttactatggagtctctgttttcttaagttataaatagaaacaacaaaaatatcttattagattactgtgaggataaaataatatctaaactggaaggttgtaattacttgataaatggtagccattattagaattgttattattaagaacaatgtacagtttctatcttttcagcatcttaaggaatttcataaatgtcatatacctatggtcccatgaacttatcctccttcttatgtttaaggactataattagattatttccttaacttgattcagtattacgtttgttctttcttaagagcaaaaccgaaagaaaaacacaaatttaaaaacaattttatcaaaattgcaaatgcagttaagaacttcgacaaaacaataaaaaagaagcacccaggggaaataataataatgtctataattatattatccagaaatatcctctgctaacaccttggaccatttctttctagttttgtgtgcataggcatgtgatcttatttactaaaatggattcatattgtagatatagtagcatttcagatgtttaatgatgatgatggtgttgatggtggcagtgacaatgatagttaacaatttatcatgtttactatgtgtcagtcactgtgctgagaccttttcatagattgactcatttaactcttaccctgagaagcaggtgctcttattatcttcatgtaacagatgaggaagttgagattaatgatttgctcaagatcacatagcaagtcacatgtgctcaaggtaacacagccagtggcagagtgggcttaacccctaatttatacgtatctgctcaattaaactttctattaagtcattagtgattcatctccttttatcatatgaaaagttaatgattacaacatataatatagtaatttgttttggaaaatgccctctttcaaacactgttagtgtttcacaaaactttaaaaaaaaaaaaacttactaggggccgggcgcagtggctcacacctgtaatcccaacactttgggaggctgaggtgggtggatcacctgaggttgggagttttcaccagcctggccagcgtggtgaaaccctgtctctacttaaaaaaaaaaaattagccaggtgtggtggcgcgcgactgtaatcccagctactcagttgcagtgagctgagattgtgccattgcactccagcctgggcaaaaagagtgaaactccatctcaaaaacaaacaaacaaaacacacacacacacacacacacacacatcttactagggaaaacagactgtaaacttttatctagttatattgttgtttgtaatgtgacaaaacattttttcaggctttgatttggatcttagtgcttaaatttgcagcagtggtttgcgcttgggattcaacacattcagcatccctaagagcttaaacgtatgctctgcatcccaaaacagttccaggaaaacaaatgtcttaagggtctcttatgttttagattatctcagggactcagttaaccatttacactttattaaagataatttactgagtcttaactaaagtttaagatgaactacagtttaagattaataatatttgatgttcgtgcagtcagttatatgtcacatttttattaggatgcaatgaccaacggtaaaatatttagttaatatttaaaacatcggttaatatttattcagttagttaatatccactaataaatgttaaaatatcagttaatatttagagaatatttacagcttgcccaaggtgtaaactttcataaatatattttacccaaagtactgtgcattttatgtactgcttgactacaacatcgtttgctttggtatgtcttgatattattctatgaataccttttaaaaaacatagcatttgaatcatttttttatgtttattcttgacatcatgtaaagcacacaggcttatggaagggcagggtagaatgaggtagggtttttcagtttgtttttaaata

SEQ ID NO: 39557 - DNA, 2300 bp, Homo sapien
tgatctgttccagtgcatgtaaatagcgaggattcttgctaatccctcctttgctattccttagattatttcttccctacgtagtaggcaagtcagtaacgaccctttgattacaaggaagttttaaaatggcccaatgacatattttaaccagtttggatggaatgagcccatagctcctttattttgtttagttcatgaactgatatcactgtaagccagacgactgtttggagggaaagatcatttttaaagaagtgagaattttaatatatacattggaaatggaatcaatccaaagtaaatatacagaattccattatgcctctaattttgctatttgttagccactttccttatgttgcctgtatagagtgataaaagtgagaggtggccaaattgaattgttctgttatttaacattagggaattacacattactctgctagtaacttttatgggatatttatgtatatgtgtatttatttatttcagagaccaggtcatgctcttgctcaggctggagggcagtggtgtgatcatggttcagcatggctttgaactcctaggctcaagtgatcctcacgctgtagcctcccaagtagctaggacctacaactggtgtgcaccaatatgtgtggctaatttttaaattttaatttttgtagcgatggagtcttgctttgtggcccaggttggtctccacctcctgtcttcaagtgatcctcctgcttcagcctcccattgctggcgttacaggtgtgagccactgtggcaggcctgaaatcaggaataaaaaatgcagcacaactagaattttttttcaattatatgaggtttgaacaattattcttggcttaaaacttttaaatgattttttatatagataaaattatgatcatttcccctttgacaattggagtaaaatattctgcaattggaatgtcatgctaatgaggcatgtcttttggccaaaataggatataatgaaacatgctttatgtagggaccagccccacagggtcggtgggtctctccctgtgtgcggcgacgagagagtgtagaaatagagacacaagacagagataaaagaaaaggcagctgggcccaggggaccactaccaccaatgcacggagaccggtagtggccccgaatgtctggctgcactgttatttattggatacaaggcaaaaggggcagggtaaagagtgtgagtcatctccagtgataggtaaggtcacgtgggtcaggtgtccactggacagggggcccttccctgcctggcagccgaggcagagagggagaggagacagagagaaagacagcttatgctattatttctgcatatcagggactattagtactttcactaatttactactgctatctggaaggcagagccaggtgtacaggatggaacatgaaggcggactaggagtgtgaccactgaagcacagcatcacagggagacggttaggcctccagataactgcgggcaaacctgactgacgtcaggccctccacaagaggtagaggagcagaatcttctctgaactcccctggggaaagggagactccctttcctggtctgctaagtagcgggtgttgttccttgacacttttcgctactgctagaccacagtccgcctggcaacgggcgtcttcccagacgctggcgtcaccgctagaccaaggagccctctggtggccctgtccgggcataacagaaggctcgcactcttgtcttctggtcacaccttactatgtcccctcagctcctatctctgtatggcctggttccttggctatgattatagagcaaggattattataatattggaataaaaagtaattgctacaaactaatgattaatgatatgcatatataatcatatctaagatctatatctggtataactattcttgttttatattttattatactggaacagctcatgtcctctgtctcttgccttggcgcctgggtggctttccacccacactttatgcttcaacagactgtggacagttgtctctccatcatccttctgaaggggccactcttggcatcctggaagcgtgttaatgccgaatgtccttgatatgtcatttttttgtttgtttgtttttgttttgttttgttttgtttttgagacggagttttgctcttgttgcccaggctggagtgcaatggtgcaacctccgcctcccaggttcaagcaattctcctgcctcagccttccgagtagctgggattacaggcatgtgccaccacgcccggctaattttgtatttttag

SEQ ID NO: 39558 - DNA, 2300 bp, Homo sapien
ttgctacctatattccatatataaactggtactttttaactctgtatcccctctctccctcccaccctacaagcccatctaagttttgctttataactgtgcctggagaatagcaataggtaattttaattaaaacagtacggaagttttccataggggactacatttaatagaattgttttggctgtttactttgaatattggattaagatttatttgttttcaaattgctaaactgatattaactctattattcttagcctgaaatatgctctctaccgcatatttcttttttctttttttgagatggagcttcacactgttacccaggctggagggcagtggcgcgatcttggctcactgcagcctctgcctcccaggttcacatgattctcttgcctcagcctcctgagtagctgggactacaggtgtgcaccaccacgcccggctaatttttgtatttttagtagagacagggtttcaccatgttggccaggctggtcttgaactcctgacctcaagtgatcctcctgctcagcctcccaaagtgctgggaatacaggcatgagccaccatgcctggcctctactggatatttctatgtaagtctcttacctgacacatttgaaaccacatctttgtcttaaaatcagaacttcggtggacttacctccttttttattcactaaggctcactctgtggagctatttttaacccacgacttccttatttttttttcatccttatgggtatgatcaactattgtcaagtttttctttacagtgttttcatattgttctcatccatttttacttcctacctaaactaatctcttcttgatgctaattctgtcctatttcagctgttctctgagttgtctgcttctgattattttccagttacatttatgctgcacgttaccttttagattcatttgtctatgttcttgttctctcagttcagaagctttgcaggtgtaaacatttcctagagcgtgacatccagcttccttaggctttaagaagtgtttacaatttatatttgaaatttctttcccatccttactcatatatgtgtgtcttcacaggtagactgagcataaagtctttggcttctctctctttatgttggtgcttcgtatagcaccttgcatgttgtgcgccgttggagattgtgttgaagaagagaatctctttctaaagaaaatatttaaattgatgcatattagttgtacatgtttatgtggtacatgtgatatttgatatatgcctacagtgtgtcatgatccaatcagagtatttagcatatccattgtctcaaacatgtatcatttctctgtgttgggaacacttcagatcttctgttttgaaatatatattattgttaactgtagttacactactgtgctattgaatactaaaacttattctttctatctaactttatgtttgtacccattaaccagcctctcttcatctgcctgtgccatagccttcccagcctctggttactatccttctactcactacctccatgagatcagcattcctagctcttgtaatctctgttacttgtacatttctgtttttctgcctgcccgcacttctttctgtgtgtctggcagcctgcctgtctgcctgcttatgcccatttatttactgtgacttcatgttctacgttttccatttgaggaaaattggtctgatgtctactggctacttcaatttgatccccccctcctttttttcggtgagcacataaacaagttttttttttcttcaatgtttacttttcttctaaaatttaaagacttctacaaccagttttttttttttttccagaatatcattgcattgcttccttgagtcccttatagcatgggagctctctgcatgttgtatctcaagggaaattatccttgtagtgtatacagtatttttaaagtgtttccgtggaaagcagatggactctttattttgtgtttctctgtatttctgattatccatgcagtggaagtgattaattaatatagataatggcaagattgtcacagaaccattgacttttacattcaggtaacttattcgtaatactcttttggcagttaactgccaccaagtggtggttgtatgccatagctctgtaacatgaacagtgtttccaataaactgtccaccgcaaaacccgtaagtttctatatgttaatatccagcatcttaatgaaaaattacacttagcattgtatagtgaattgaaaaccagtatttttcaggaaacattaaaaaagtaaacttttttc

SEQ ID NO: 39559 - DNA, 2300 bp, Homo sapien
gaaagaatagtattctttatgagtatttaatttaaagtatttatttaagtctgttatctaactatgtggaatattgtaaaatacaggtatctttcaatatgccaaaacaacaacaacaacaattccaaatccagataaattaaggaccattttctaattttggaaaaaactaaatttctcctaactttattttctcaggaaatggagtctttcctatataaattttataaaggtaaaggcaataatgttcttttgagcttttggagataagcattatatagtagcaaataaagtgaagatttatgctagaacctaggaggtagaggtcgcagtgagctgagattgcgccattgcactccagcttgggtgaagggacaagactgtctcaaaaaaaaaaaaaaaagtgaagatttatatttcatgagatttaaatttattaatacagcacagacatagattataagcaataattaagcttttaaatggccacattaatgtcagaaattgaggctacatttatttttcccttcagcttttgtctgcttccaattccttttgctacctatattccatatataaactggtactttttaactctgtatcccctctctccctcccaccctacaagcccatctaagttttgctttataactgtgcctggagaatagcaataggtaattttaattaaaacagtacggaagttttccataggggactacatttaatagaattgttttggctgtttactttgaatattggattaagatttatttgttttcaaattgctaaactgatattaactctattattcttagcctgaaatatgctctctaccgcatatttcttttttctttttttgagatggagcttcacactgttacccaggctggagggcagtggcgcgatcttggctcactgcagcctctgcctcccaggttcacatgattctcttgcctcagcctcctgagtagctgggactacaggtgtgcaccaccacgcccggctaatttttgtatttttagtagagacagggtttcaccatgttggccaggctggtcttgaactcctgacctcaagtgatcctcctgctcagcctcccaaagtgctgggaatacaggcatgagccaccatgcctggcctctactggatatttctatgtaagtctcttacctgacacatttgaaaccacatctttgtcttaaaatcagaacttcggtggacttacctccttttttattcactaaggctcactctgtggagctatttttaacccacgacttccttatttttttttcatccttatgggtatgatcaactattgtcaagtttttctttacagtgttttcatattgttctcatccatttttacttcctacctaaactaatctcttcttgatgctaattctgtcctatttcagctgttctctgagttgtctgcttctgattattttccagttacatttatgctgcacgttaccttttagattcatttgtctatgttcttgttctctcagttcagaagctttgcaggtgtaaacatttcctagagcgtgacatccagcttccttaggctttaagaagtgtttacaatttatatttgaaatttctttcccatccttactcatatatgtgtgtcttcacaggtagactgagcataaagtctttggcttctctctctttatgttggtgcttcgtatagcaccttgcatgttgtgcgccgttggagattgtgttgaagaagagaatctctttctaaagaaaatatttaaattgatgcatattagttgtacatgtttatgtggtacatgtgatatttgatatatgcctacagtgtgtcatgatccaatcagagtatttagcatatccattgtctcaaacatgtatcatttctctgtgttgggaacacttcagatcttctgttttgaaatatatattattgttaactgtagttacactactgtgctattgaatactaaaacttattctttctatctaactttatgtttgtacccattaaccagcctctcttcatctgcctgtgccatagccttcccagcctctggttactatccttctactcactacctccatgagatcagcattcctagctcttgtaatctctgttacttgtacatttctgtttttctgcctgcccgcacttctttctgtgtgtctggcagcctgcctgtctgcctgcttatgcccatttatttactgtgacttcatgttctacgttttccatttgaggaaaattggtctgatgtctactggctacttcaatttgatccccccctcctttt

SEQ ID NO: 39560 - DNA, 2300 bp, Homo sapien
actgcagtgagctacgattgtaccactgtgctctggcctgggtggcagagtgagaccctatctctttaaaaaaaaaaaaaaaaaaaaaaaaaaaaaaagacaacctcagttttgaggcacatgacgcgccttcatgtgcctcagtctcagtccctcttttctcagcaggagatacgccttacaggtggtggtggtggtgggggacacaccatttctcttgactgctgttcagagcagtgcctgaacaaggtgtgctctgaaaatacctgttgaaagaacaaatggacaatttcccttcttcctcttacttccctctcctatttaggatataagattgtttctatattgaaaatattttatctcgactttgttgcattattttttccatttctcacagttaactttttatattttaaggaaaggtgactattcttccttcttaatcaactcctgactgttcactaattccttggtcacttcactatcttgagtctccctctatgaattttcagattttctttgagatctccctcccctcggcctcttgttcaatctccttgacatttctgtagcatgctgtgttatcggctgcatgttcttggaaataccttcttatccttctgcctttatgggttttccttctgtattttctctgttgacctccttcggctctgttacggtgaggaaaacacaatgtctttgctttcgtctttattcttttctctctttgccctcccctgctttgtgcagtatctcagtggcttgcctactcttttaccttcagctctgatctctatatggattccgaattatataaattgtgtttactactcattactgcatcactctttttgtagaggaatttaagttggtgcctcaacttaaattcctacgttatcttaaacattatgtttaaaattactgatgttagtatcacatcattagggcattgcttctgaaactgttcattggagtaaccctaatggataaggagagcagcttctcgtgggctgtttttcttgtctagaaagccccttcctttattctttgcaccttctttctctttgaaagatcaagttcaaaaatctacatttcacaaaaatctctgggatgacaccagactttattggcttcctagcctttgaactcccgctatactcatttatctatttatctggcattcctcctgtgcttctgttatattgtattttgaataaatcatctttattttaagtgtctcatctcacagcttgtaatcttatccctctttgtactcccagtgcctggtatacaattggcacttaataatatttgctatggatgatggcataccctttttatttacttattgtgttccatttctaacagtgagattgcttaaaaacaatttttcttaaacatttaatttttcacaaatgaaatggagggtgcttggactgaactgaatgacagattttcaatacctgattgtactttgctttgcactattttaagtacattataaaaggtgtggaatgattgtcttaaaagtaaacttttcttcatctttgtctttggagtgtcattaaaaacctggaataagagaatcatgagaagacctagtaggatttctgaaagcacacagggttttgctttggaaagttcaggatagggtaagcgtggaaggaaagagagaaaaagaatatgaatgaatgtgaaaatacacacccactagacccataccatttgataaataaggtcaggatgatataaaactagccaggtagaaggatagttgtgtcaaagtagtagatatattggaaggatgagaatttatatcaagaacatttgtgctcttcaccccctacaaaaagtttacccagttgtttctatgatacattgctcaacaatatggtaatgtgacagatacactaagtaaaataggacccgtttatgtatgatgccttttaaaattaaggtatgggaaattcactgtgattgaactttagttctgtgtatactgaaaatctggactagtagtgtatgattttagactcatataagaggaacaaaagactcagttcacttatgtattttattttgctttctttttttctctagggaatttgaagtactgccttgtaattcttaatcagcctttggacaactattttcgtcatctttggaacaaaggtaaccttaattagcatttctgtttctttgctttcttactttatttgtgactgaccaacatgactattaagtaccctgaaacctgactaaaaagtggaattcataataaggtgattcaattattaatg

SEQ ID NO: 39561 - DNA, 2300 bp, Homo sapien
atagacctgcttgatgcaggcttgccacaaactttcaatttgtaaaagcggtatctgtaaagcacaataaagctaaacacaataaaaggaggtatgcctgtaattcctggtatgaagtaccataattctccatttttttcccattatttgttaatttatttcacatttactgaacttatcttggtgagacacactgtgtggctggagaaatagcagggaaggaaatagacaaggctcctgcccttagagagctagctctctagtagggggagacaaatcattaacaagtaaactgtgctagagtgaggattcaagggccaacaactaaattttggtccttgttttcctggagcctacattttagggtaattaaataaaatataaaagacctcaacactgactggaacataataattgatcagtaagtgtaaatttttattactgcttaaaaaattggttacaatctgccattgaattcattgttcaagatttcgttctgaatattggtgatgtgtttttgccatttgactaccttctataatttgccttgcctgtttatatccttggtcataatttttctggtttgccttttactaatggacatgtagttctgaggcagaatagggtctggaggcagggaatgttaaggccgattcatgctgacttcctggaactaaatcaaattgcagtacttcagcaatgacaggaaacatcctctccatttacacagggcttatatccagtaaatgactttaaaatttacttcatcctcttcatttacatagggcataagccaagtaaccaatggaaacctctagctggcatttaaaccccagaacattctctaacggcactcttgagcccctatcctcgggcgctcccaacctatggggtgtactttcatcttcaataaatctctgtttttgcttcattctttccttgctttgtgcgttttgtccaattctttgttcaagacgccaagaacctggacacatcaactggtaacagctcttcataggataaacacatggcaaccacttgtctattacatgtgcagatagtttccttgtaccccaattgtcttttaggttcattaaggtcatatttaaacatggacttttgaaatttgttgtagctaaacccgtatataagcatttaggcttcctccttctttgggtcttttcttgtggactcccatgcacatagctgtaagcttttcccctgttaaactgtcttaagtcaatttaacctcttaggcccaggtggaaaccttaagagggtagagggagattaggttcgctcactattggaaaagcctgtattgcaacagtgacgctctgcagctgcagataggtggcttaaagtttcttccaacaaaaacattctgtttccacaaagcaaagtaaggaaagctcttaacggagtgttccctaaagaaagctttttttttttctttgagatggagtctcgctttgtcgcccagactggagtgcactggtgtgatcttggctcactgcaacctccggcctcccgggttcaagcgattctcctgcctcggcctcccgagtagctgggcctacaggcgcgcgccaccatgcccggctaattttttgtatttttagtagagacgaggtttcaccatgctggccaggctggtctcgaacttctgacctcatgatccgtccgcctcggcctcccaaactgctgggattacaggcgtgagtcaccgcacccggccaggaaggaaagcttttaacccgacggctcagggaggacaccggtagcaggactagaagcagcacagtggaaagtaagtttggcttggaagctaggtcaagcatgggtgatagggaattcgccacttagtttgaagcaaatggcctccttgttaaagctgagtgcagagggcccggcagcagtactacagctagcagaaccagcccagaaaacgaagccttggagacttgaggtgggtagtgccggacgcagagcacagggcgcggctcccacttgcctccggctcccggaagcgggcggggccacctcgcgtcccgggggctaaaacctgcgagcgaggaccgcgcgccaaggctcctcagccgagcgccgagcggtcgatcgccgtagctcccgcagcctgcgatctccagtctgtggctcctaccagccattgtgtaagtgcgactgctgccgggcgcgcgggccgcggaagggggcggccgcctctcgctccccaggttcccggatggtgatgggttcgcggagagaggcggcaggggcaacccctcggacctcatagc

SEQ ID NO: 39562 - DNA, 2300 bp, Homo sapien
gtatgatagttaaaatggagaggcatagttaaataatagattgttctgaaaagttacgctttctgacagtttttttttttcctatgacttgtttctttgagctcttagaaatggctgatggcagttctttactggagtgttttggcaagtggtcattgacttttgacagtctgtgataattcaaacagcaaagggacattttataatccataagaatgcatttgctgtattattttacaggaggagtattttatagaatgaggaggcagttcacctcccattagtcatctgtgtgtttcttcattttccatattgtacccaatctgcagttcttactaggacaaagcatccttttaaattaacaagaaacaaagatcaaataaaaagcgctgaatcagacccattaacaccatattaattatgcagtgaatacacagtactatttacagtggacctttctaagaccaaacaatgatgttaaaaactcagtttattccaggattaggcaagcctccataaattttctatttatctttaaatgcaaatgcttattcattgcataacatcgaaagacatggttactcctacttagtcctccacaaacatcattagatatttagatgaccaataatttttaattgtgtcaataaagtcagtggaatgcttggctctgcagagacataagaattcaaatactttaagtagactagatggaagaaaaacatatggagggtagagtgtgaagagctgtgagctggggagaagagcttgataattattattaaaattatctaaatgtgaaaaaatctaggtctctctaaacattcttaattcttagtgcttgcaatgcctcaggtaccttgaaatagttacccatatgcctgcttatgtatttccgttttgtgtttgtgtttgtatgcgtgtttgcctaagtgtagtttctcctggcagcagcgtgtgtttggtgtacgtgtgcatatgtatgagtacgaattaattacatatcgaaaacatgtgcattaacggcatctgcagtcctccctccctgctccagtcagtcgggatgtttagcaccgtcacttggtgttaggaccactcggaagacctgcctgtcggacgcctgactgtggttcccggggggccggagctccaggagcctgtaccatctttatctgaaggggaggagagaaggaaaggagaaggcatccgagcgagggtgttctccttcctgcagccgggtagggggcagccaggtttggagcagggttctaggattacacggcaaatccccaacttcagcaccgcggacagcatcacctcccgcccagggagaggcgcgcgcctccttgctccgcccccgccccagctgatggaccccggccggtcggctcagtctcccttttgctttcaaacgaggccagggcagggcagaagggttttgacagccagaggggtacggtaaggaggaggaagaggaggaggaggcggaggaggaggaggagccgaggagggaaccgagaagggaagagaagggagggcttccctccgcctcgctcgccgcccgggctcacaggagctggcggcggcggcggcggcggcggcgtctcctgctctccgcggctgttgctgctgctcgcgctccgccgcccgggagatgcttcctcgcgcggcgcagcgctgaggccgtgcgtgcgccccggctgcgctgcgcgctccccacatacacaagctctccatgtgagctgacaggcgagtggaaacccctcgagtcacgctgcccggcggcggagggagcgctcgcccgcagtggcaacagctgcaccaccgtccccgtcgctctgccttcctcttctgcagcctctgctcttctgattacctccctcccccgtcctttggtgatttttttttttcaagaaggagagggcggggtaggtgtccgttccctcccctcttccccctcctttgccttcttggtttgaatttcctcccccggcgttgcactggcacacagtgcaagaggcaatacccgcacggagggagaacgaaggctgagactcccctgccgctccaagcccggaagaactggagcctggaggggggtgaggggagaagaggaagcgggaggggcttggcttcctcgcgtatttgaggacagcccatctcccttcaagaaccctacggagagtcggactgcatctccgcagcgagctcttggagcgccgccggccgggaggcgaaggatgcaggcggctccgcgcgccggctgcggggcagcgctcctgctgtggattgtcagcagc

SEQ ID NO: 39563 - DNA, 2300 bp, Homo sapien
aacataacatatatgtattatgacagaaaatcaagcaggatgtggatacagagactgatggcaacaaaatgctgggtgaactagcaaaccctgtcctcagtggcaaaggtcacattgagcagagacctgtgacaagagaggatacttggagtagtagttgcaaaggcttacagcaggggtaggattgtttttaaaggaagaggaggggccaggtgcggtggctcacacctttaatcccagcactttgggaggccgaggcgagcagatcacgaggtcaggagatctagaccatcctggctaacatggtgaaaccccgtctctactgaaaatacaaaaaaaaaaaaaaaaaatagctgtacttggtggcacacgcctgtaatcccagctactcaggaggctgaggcaggtgaatcgcttgaacccgggagacagaggttgcagtgagccgagctggcgccactgcactccagcctgggcaacagagtgacactcggtctcaaataaaaataaaaaagaaaaaagaggaaaggggccatggtggctagacaggaatagacaagaacatggggaaagagataagactagtgttgtggccatcataggccactgggtggcggggtagcaggggttgggcaggggtactttgaacagtaggccaagttgagagcaggagccagagagcattttgagtacagcagccacaagttcacttacagtttgaaaagtgtttcttcagctgctgccggcaaaactatagcagagtgagaggggaagcagggagaccacacagtcttttgtaacagtgatctctggaagctgtatgtgccctatctgtagctatggagttgaagtgaggcagtaggatttggaacatcccagtatcagaagacttagccctccatgccatttcccagagacccagagagggacggtagactcagaacagtcctggccacgttaacattagaagcacttaggcgttggcaaaatgagaaagatccatcaaaggaatcagagagcaagcagctaatgagaaaaaagagaaaaaaaaatcttaatgacattataaaagccaagtgcagaaagtgttacaaatagaattgaggtattgcctggtttcagtgcagttgattggttgagcatgatgggaactgattaatttttctgtcagtaataattttcaagttgatggttattctgtctttacttgctgatgtctagttctttctttctttgatttttgagacggagttttgctgttgttgcccaggctggagtgcagtggcacgatcttggctcaccgcaacctctgcctgccaggttcaagcaattctcctgcctcagcctcccgaatacctgggatcacaggcatgcaccaccatgaccggttaatttatcatttttagtagagatggggtttctcctgttggtcaggctggtcttgaactcccgacctcaggtgatcaacccgccttggcctcccaaagtgctgggattacaggcatgagtcaccactcccagcctcttttttctattctagtgagaacatgtaacatgagatctgccttgataagtgtgcaatatcatctagaggtataatatttcacaccagatctccagaacttagtcatctcacataactgaaattttatacgtgttggttagcaactccccatttcttggtcttttggctttggtaggagtcctctttgtctttcctcctccaacattagtaattctagttccctgttcctataatgtataaatacctgaagatttccaggagatgccagataccaaagcttattacaggaacaagctcaattttactcatgattctcagatagcaagactgaggtgaagtcctttggagtaatgtgctttgctatggttttccatttgaatatcagggttatataaacagctcctgtgttatattatatttaggataacagaattgcctaaattcctttgctaaatattgtttcaaagatacataaaagacatatcagattcaatgattttttaaccaacacataccaatcgttatttcgaaatcgttgttgagtgtctctctccctctctgtcttttgttttcagaaaaatgtgatgagccacttgtctctggactcccccatgtggctttcagcagctcctcctccatctctggtagctattctcccggctatgccaagataaacaagagaggaggtaagccaaattttgattcttttatcaataaacatgttaaataagaacatgttatatttatagccatatatatatataatcacacaaca

SEQ ID NO: 39564 - DNA, 2300 bp, Homo sapien
acatttatttcggaatttttaaaatctctattcagttcaccttctaattccatttaaaatatcattgtcagtgttctgtccaaattttgatactatataaagatagcagtttagttacaaatagtgataagcaacttgtttttaggcactcttttcatagtaatttatataatattgaggaaaaaatcaattatccctatgagtaaacggaggctggtagctgtggagggtgggagcaggggtaatggcagccacctgtgtcatttcttggagctgccatggcttcaacttcccctctatcctgaccatgtattttaatctctgtgctccaatgctttgacatctggggccttgctgaccctagagggactggtcttcccagagttagccaatttctagagatggtaagcacactttccaaatataaagcaatcaatccagagtccacaccccaactgcttcctttatccagctttctctcttctggaccatgatccgtcttccctattcatcccagaatcaggtacaagacaactaggatcagcctctgtgccccagaactcactggaataattattccagttagccagacctaagcctgcttaccctgctgcacctatcccttcccatggaaactacaataaaggaccttgcccacagttccctcatcccctctacctcctgacagatcctggtgcttccctgagctccctacctctggtctacaccctgtgggatggcctgccacagtaataaaagtaataaagtaaataaatgtcatgtattttaataaagtaataattgtatttatataaaataaaataacttcaatgctcagagaagacaagcagtttatacaaatgtgtgatgctggctggttataaatatcgtatcaataatataaagtattaataaagtaataaaatattagtatcttttcacggtaggtgttttctgatatgttggccttactgtgtctcaaattttctactaataaactatattagaaaacactcagtacagaaaattattttaccatatcttagaaaagaagtgaaaaatcagttttgatcaaacaaaagcctaggaattgttggcaaaagttagtccatagacctgcaaaaagctcctttaaagcaaattttagaaaccattattaaatgtctaagatcaacttctggactctgaagtatcttctacatccataacattgtgtcaagactggggttgtggaagtaatggggtgagttaaaaaacaaacaaaaaacaatacaggaactttccagtgaaaagagaattaagactgagtaagataaattcagacagataggggaatagcacattcgactgttctaaaaacgctcagttgtttgtgactttactacataaggcttacaattcatgtgcagggtgagaattggaagattaaagacttaatgctccctgaggaagctgagggcccatgtgtgtaatgatggtattctaagtggaaaatgcatgtccaggtttgcattggaaagataactcctgtgctagtgagggagaggagaaagggcgtggaaagggcccagaaacagagagaacaaagacccagcctcaaacgagctgatgttcttacagtgttggcaacagttacgcaaagccagaattcagaagatacctatgtcattaaaggatgcaaagcattcagatgatgcattatcactacacagaatttcaaagcagttagggattttatactaactgaagaatttcagatcaaaatttacagttgtggctgactccaggtgtatgataaatccaatattacaaagcctcagaatttaaaatgaaattgacagtaccctgaaaacaaaaacaaaatgtcaaaaattcctctttgaaacacgctacatattcgaattcattttcccaccatcttaatttttacacagaatcttagtttgttacttctttagctatccaaaatttctatgcgctatccttttcaaattcatctgatatgctttgtctctgtttctccacccaaatctcatcttgaattgtactcccataattcccacgtgttgtgggagggatctggtgggagataactgaatcatagggaccgtttccctcatactgttctagtgggagtgaataagtctcacaacgtctgatggtttgataaagggaaacccgtttctcttggctctcattctttctcttgctgccgccatgttcaaggtcccctccaccttccgccatgatggtgaggcctccctagccatgaggaattgtaagtccattaaacctctttc

SEQ ID NO: 39565 - DNA, 2300 bp, Homo sapien
tgtgacactagtttattggtagtcgttactggtagtgaaacaatgactccaattcacttcccagccagccatcctggaggggctctgggtgcccgggcaagccccagcctctcatctgcatgctcaattccactcttcttttgtttcccattggcaccaccattgtccgcctcctggactcatctcttggtcttctccatccttccagctattccagctatcatatcatgaccatatcaggcttggactcccccctaatatttattcgctaccataaactaaattatgttttccatcctaagcacaaacatttcactaacacccgtcatctgtttgtgaggcagcagcaggagcaggtaatccacggttctgctttctctgtactcttctagaaataggggagcttagattctccctggatcccatcttctagagatggcattactggtctcatattctattttctttcatgtattgaaacttttgttattaatagcttctgactaaagtgaaaatgtcaatgtgtaaaatatgtggggtaatgtgttccacaatatacagagaaaagctctgaaacagtctcctgtaattctggattttctgttttcttcttgttttttaaatttccgggttcttgagtccatgtggtctaagtcctgcattaatcctgaacacatggcagcagggataaagggaagacctgaggtccgtgttccaattcgccagggatgtgaatgccctggacgttctccttctgatagggacaggaggcagagaaattctaggcagaaaagggtggatccccaacaaaaccccaccctcaagcctgggaacacagtccaaagtgagaacttacatctctgtttctggctcaaatatttccttttccaaaaccatgtgtggccctgccccatcctgtgcctataaaaacctcatactcaaccagcagagagaggtgaagcagctggacatcagagactgtggctggatgttggagagaagtggcttgacttcagagggagagcttgacagcataactttggagaagaatctggccagagatggccagacgtcaggggaagattaccttcccattccatttgcttttcagctccccttccaactgaaagccacttccattggcggtaaaatccccgacagttgccatccttcaggttgttcatatgacctcatttctcctgaattccaggcaagagcctggataccactagtgtggataaaaaaggctgtcacacttgccctgtgcccctgctggagggcagccacctcatgtgagtaggcagagggacgactcagctgttaacactcaagccgtccacggatggcagagctaaaagagcactgtaacactccctctggagcttcaggggtcatgggcatcacgccagactctgccacggggcctgcatgaagtttgctcctgctggtgcccaaaagcactggctctcggctcctgcctccacttacccgtgtgctccttcccatgagtggtggagcacagcggatccgagtgagtggagctggctcctgcctgcgctgaagcagccagttggttccagtgtttgcgcactccagttctcacctcgttcatttcatgctctttcctgcaaggagttgacggctgtgagctgggcaaatgaggcacccggttgcaagttccatgaaaggctcggggaaatatcctgcttcacttccatatggagctagtgctttgtaaagtgcactgacaataacaaagtgtagaggaggaccggacacaggctgaactgagcttcttgaaaaggctgcagctctcagaacaacgctgagaaaactggtccttcagctatagacacagagtcaagaactccatttttcaaattatatctcatgaaaagctggtgtccagtgacgtttatctgagaaaaagaaatttttttttggccaaaataactagatagatttttgttagactttataatgagaattatgaatttcctgaaagtgggatggaatacagaatgttccccaaattgtttccatggaacagctaatagcacatagagcatgcgtatttgctgtgacatgataaagctcaaggccagagatgtcttgtggggctcccaagtactctaacctcaaggtgcatgccctccactcactaattggctcctctggctgtgatcgagctccaaaagggaaggaggctaattcaaatgggatggccccaaaataagaggaatagtgtgcatttaaaccaggatatgggctatacctgcttacagtaccctttatgcaat

SEQ ID NO: 39566 - DNA, 2300 bp, Homo sapien
tttccttctctcctatgacaagccctggccctaggcagctgaaaacaatcacccaggaagctccttcaccgtcagattccctgacagccctggatctagcgagaatcaggtgatttcgatgtgaaacgaggtttgggaaccactgctttcagtcacattctttttgtttgatcttctcagaatcagcaggcatttccctctgctactttgtccaagatccaacccttctcatctgcgtcttgccagtctctccactttagagctttgttaccagctacttctaacctcttgcacagaaatctctactcaccactgtggagagtgaaaaaggaatgggtttttatgtatttctagccagctcttggccctgcgccatgcagagtatatgctgtacattggactttcgggacacttctctgttaaattctaagccttatgtctgtggtgtctccacagtgagtaagctcttaatcacattccctattgtaccttcttagatgaaagagcaatgggtcagggggactttttaaatgtccttaaacttgattagtttaatctttattatggctacagaatgtttcttaaatttacatacgataaaatccactattttatattaagtagagttatgagttttgacaaacaaatatattcaggtagccaccaccataatcaacacacaaagcaatccattacccccagatttcccttacatcctttgttgtccccctcatcctgtacttccagcccctgagagccacttatctgatttctgtcccgacagtttgccttttccacaatgtcatgttatataaatggagacatacaatatgctgatgtgagcatttagaaagatcatgtatttaaacaattattagagtaagggctggctatggtgacttaattttttggtttctgacacctataatctgatttgaagtgtgtcattctgtgcatcatgatcctttttgcagaacctgtgtctattagaaaatccagatgaagcaggctcttcctgttgtccttcatttggaaaagacagaagaacagagcgctttacgaaagtcaagttacagcttcctaattttctctcccatggacaaactcttccctccccccaccccgacctagcctcttacccactatcctttgcaaattcctatctcttatattgcccagtaattggggcgtgggggggtgaggggggggtgagttactgctgatgaaccaggaggcagagcaaggtttattttgctaaaggcttcagctgctactgcctggacctcaataagcattttctgctctttcctatcactactgtcttccctttctttgagaagcaacataaagataaaaagaaaaatacttgattttgtagcatgccagaatattaagatgctcctgaaaagtgtgggatttaaggcttctcaaaaaagagcagaggagggagtgagagaagaagacggagaaggaggagaaggggaagagaaaggggaggtggaagaagaaaaaaccaccatcagaaactgagtattacacaggacgtaacctgtgctctgagagtgaaggaggccacacagcagtagaaccccgacaggaaaatcagaaaacattatattttttcccagatcccagagtatcagatgttccattcagaaataatccctattgacccagtctctgtgtctctctctctgccaatagcatcaagcacagtaaccctttccatgctaatcccgttattaatgccatccacaacaagcgtagtgtaagtaagacacgaagtgtaaaaaaactttcttccccgcagtccgggctctcagagccctccttgtaggtcaacagtatcaaaggtgcttaacgcagatacaccaggaggctcaaagcccaaacatcgaaaaaaaaaaaaagacccactcttgtgctgtgtgtattgcccacgggtgggaggatgcaagtacaattacgttttttaaaactccagtccagatattggcttttccttggatacttttgtgtggctctcccagtacagtcagatccgccgccgcagcctagcgctccaccccgggttttgcgtcctcccctcacctgcctttcagtggtgcggggtttgatcccgagagcggtggactcaaagctgcccgccgggactcgggctgccggccgacaaaggacggtcctcgggggttctgaagtctgacccggccagtgggaaagccacctgcatcacaaagcgaggggcacacctgaaccggggctggcgggaagaggcaagtattgcgcgcgggctggctccc

SEQ ID NO: 39567 - DNA, 2300 bp, Homo sapien
tttttttagacagagtcccccccccccccctcacacaagctggagtgcagtggcacgatcttggctcactgcagcctccgcctcccaggttcaagcgattctcacgcctcagcatcttggctagctgggatcacaggagcgtgccaccatgcctggctgatttttgtacttttagtataaaagaccgggtttcaccatgttgcccaggctggtcttaaactcctgacctcaagtaatccgcccgcctcagcctcccaaagtgctgggattacaggcgcgagccactgctcatttcagacattgtgtgtttcacctctacaagttccacgttgtctcattttttttcccctcattttgatcatgttttcctttaaacccctgtgcaggtttctaatagctattgtactgtcctcatctgctcattccatgctctgtcctttctgtttctaatagctattgtactgtcctcatctgctcattccatgctctgtcctttctggctctccttctaattgactgatgtttcttctggtcaagtgacattttgctacattttttttctctgaattatttttctctgcagcttgacgttatttagatgtgttttaaagctttttcaggacagagctagagtagtctttattctaggcctattttagcaaacaccttcagcatgaccattctatcaactgtattaaatgctctgattgttcaatgaggtctcttcagtgtggttgttggactataaacatctcccagccctccgtgagctctggttttttgcctggcctgtggacttttattctgtacatgcacatgttagtattattcggccacaaattcagagagacttatgtgcagattattagggttctttctatacatagctctctcgcgcgcccactctatctcccctctccattcagggaaaccactgtgctttcttgtgctgcccctccctacactgctgtccaaaaatcgctgccagccagaaaactaggaaaaatgtaggattcctcctttttgtttctctgttctcagacatcatggttcctttctgcctgttttctaatgtctgtagactgtcatttcatagactgtgtccagtattttagttacttttggctggaagacaagttactcctgtttttcctgttactccttcatggacaaaaacagacatcttacttcatttttgttatctttgttgttttggaggttgtgttttatatgggagagggctgtgtctgacggagctgtagtgaagtggggacagtgttggagggactcccaagccctgtctaacctctcgtgcttctcctttctccgtcaggcgtcattgctgtggtgattttcaccatcctgtgcaccctggtcttcctgatccggtacatgttccgccacaagggcacctaccataccaacgaagcaaagggggcggagtcggcagagagcgcggacgccgccatcatgaacaacgaccccaacttcacagagaccattgatgaaagcaaaaaggaatggctcatttgaggggtggctacttggctatgggatagggaggagggaattactagggaggagagaaagggacaaaagcaccctgcttcatactcttgagcacatccttaaaatatcagcacaagttgggggaggcaggcaatggaatataatggaatattcttgagactgatcacaaaaaaaaaaacctttttaatatttctttatagctgagttttcccttctgtatcaaaacaaaataatacaaaaaatgcttttagagtttaagcaatggttgaaatttgtaggtactatctgtcttattttgtgtgtgtttagaggtgttctaaagacccgtggtaacagggcaagttttctacgtttttaagagcccttagaacgtgggtattttttttcttgagaaaagctaatgcacctacagatggcccccaacattctcttccttttgcttctagtcaaccttaatgggctgttacagaaactagttcgtgtttatatactatttcctttgatgtcctataagtcggaaaagaaaggggcaaagagaacctattatttgccagtttttaagcagagctcaatctatgccagctctctggcatctggggttcctgactgataccagcagttgaaggaagagagtgcatggcacctggtgtgtaacgacacaatcagcacaactggagagaggcattaaagaaccagggaaggtagtttgatttttcattgaattctacaagctaatattgttccacgtatgtagtcttagaccaatagct

SEQ ID NO: 39568 - DNA, 2300 bp, Homo sapien
ggcagtaatgtcattagtagagaggcagatagccttgcctttggtcctaatattcctattaatgatttcgatatagatgcagaagaaatgactgtcaagtgtgggcttatgagacaaaagtgggaagacagacctaatatatagaagaaagtcttaatccaaatgatttcaataggctatcatgctgaactgaaaccaataaagtgaatttcagtagaaataaatagtttagcacttaaattttacttaataaaggaaagagaaaaaaaaatcgggtattttagcttatctcaggtccaccctgagttagcagctggagaaggccgcaccagtcacagtcagcattaatcagagtggagagtccagattctgtatttggtaccactcaggtaacacctggctgctgtattttaagaagggcaaactgaagtaattaagtaataaaatagttatgattgtccccaacataagcaaactaatctactaagtcctcaatatatgttatctctgattttcagagagtcctggaaaaatagacactattgttcacattttacagaaaaggaaaattaaccagagagatcatcacacactctcttcctaccctcccaactccttgaccaaggtaggaagtttagttcaagcttatgtgctatttttattaagcttgggatgtcacctgaagggcatagggcttggaacaaattctttcatcatactgtagggcagcggtcccccatctttttggctggcaccagggaccagtttcatggaagacagttttctcacagacaagggagtgggggttggttttggcatgaaattgctccacctcagatcatcaggcattagttagattctcataaggagcatgcacagttccctcgaatgcacagttcacaatagggtttgtactcctatgagaacctaatgctgtcgctgatctgagaggaggcggagctcaggtggtaatgctctcttgtaccccattcacctcctgctatgcagcccagtttctaacagaccatggtcctggggattgggaacccctggtgtaggggatcagaatatgtcaccccaaaatataccactctggcctaaggattgttttgagctgaagacaattgtggaagagcagatgccaaaaaaagcattctctgcctccccctgcctggtaaaagtaggcttagacttatttgcttcaagacagcgcgaaggaatctatacaacaaacattcctaaaataacctgcatcttctgttagcttcctctgtacatttaccttcccatagtgtgcggtccctaaaagcctaaaccccttagtgttgtcatttctctacaaatttactgttctttgttaagatgctatagaaccttaagttctaatcatcccttccagttattggtcactacctttctcctgcatggatacatgctgtgtatatgaatacactgtacttccttctggttagtctatcttttgccagtttaatttcaagagccccagctggagaacctagaagtacagagaaaaaagttttcctcctctacaatgtgtttactggaagggtgaaatgtacaacacctgaatcagcaagagatgagaaggcctggtccccaccctccgtcattccacggagaggaatggtgggaggcgggggcctccccaccctcccctggtccacagaggagaattgcggggcacaggcactctgcaggacatgcagcgtgggaatctctgttccaggggagcacatacctccttactgccttctccccacttaaaggcaagcaaaggggaatgctgacagtaggagaatagtagatctaatttggattgagattctacaaacctggaaatgtggttagtgtactctcacagtaattcacctgacatatggtttgtcttatctgttttgtgttgttataaaggaatatctgaggctgggtaatttataaagaaaaaggtgtctttggctcatggttctcatgtctgggaaagttcaaggctgggcctctgcatctggtaagggcagaagctgccttcatttcatggaagaaggtgaaggggagctggtgtgtgcagatcacacggcaagacaggaagcaagagagagagacagaggggaggtaacaggctccttttagccatcagctctcatgggaattgacagaacgagaattcactcacccccacccacctcctggaggggattaatctattcatgagggatccacccccatgacccaaacacctcccattaggcctcacctccaacactggagatcagactccaaca

SEQ ID NO: 39569 - DNA, 2300 bp, Homo sapien
ctgcttaacgagttatttccaaccccatccccagccacacctcagttccacgagtgttcgtggctcaatgacctagggaccccaagcattcaccataaataaggctgtttactgacctatttttactaggactactgagatatgctgaaccctggcgggggtgggagtcggggggattgaaggtacacttctccctagcaccatcagtcattgttcagatatttaaatttcacaaacagaatcaatggcctgctgggggcattgtcacttacaccgagcagggccatctgtcgcagcactggcattttcaggcattttagatgacagcattgcgggatctcgttctttgttcgtggatttcaggatgaagtccttcaatggggcttcatgactgaccaaggtttgaaattgataatgtccccagatggggacttgctgatgcggctgcattcacagcaattagaagataatctggtgtaaaaactgtccggagagcgaggggcacagaatccctgagctcaggttgagcaggggaagagaaagccagatctccattctggaggcagagttttccacttttccctaaggggtcgtctcagcagccggcctctcagctacaacgtgcggaaatctcactgcccgatgtgctaatcacagaattgcacaggtactccctgaatccaacttgggttattaaaacaacaatgaggcttaggcatttggctcagtccacccccagggtgaccagctggtcacctcactccgcaacccaaatccaggggattcattcgttgtctaggaataacttcttccaccttgggaattctctgatttactcttacctaggtccactggtcttgaccaaaatgtgaggtgtccttaacttaaggttttgacttttaagaggcagtcgaggaaataatattatgaggtctgtctatttctttagtggtcaaagacagataagtaaaaaggcaaagctagagtccgaatgtatggctgcaggttcaagattccaggccaagttcttggaactccagcacctctagactcaccagccccaccagcccctctggcccctccagccccaccagccccaccagccccaccagcccctccagcccctccagctctgctgcaggaaatcctgcctcagggaatcatgatgcaccacccaaggaagtatttgcagaaaaaagagattccattattgccttccctcaagggtggtgttgagcccattaagcttttccccagcagtacacagagtaatcttagggattctggtgggaaaaatatcccaaattctgcttccttatgcttcaccacatgaccctagggcacacgcactaatcaagaacagcccagggcatcctgtcaccccccacggtgcacctgcaaactggcttttacagcaaccttgtcttccaaatgggtccgtatctttctaggcatcttttgtaatgctaacctgtttggcattacccagaaatgctaacatttctaccactttaactaatcttaagagattaaatcacactccatgatactcctgacaacaaatagcattttaaccagtaatttacgataagaagattttcaatcagtgggctaagcccttccctggtgatttaagaaactgccagcctcgatggagattcttccatcaattcctcatcattataaaagaaacaatggaggaaaaactcatccaattaagtgacaattccaatgtgtaaatcttgtaatattttttgcatttgtgatatgggttctacactaaaaatgcaacttgtctaatctgaatgagatgaaaaatcctgaaaaaggatgttatcctcaatattttgtttgtgcctcttgatttagtaaactcccaaccactttttcatccttccctgccaaaccccgctacaaaatgtttctcattatgacctgagacattaattctgattgtagaggttttagatcatttcttctaggtgttaatcagttctggccatatggtgagggtgaggtaatcattattactttacaatgaatgcccttaattactttttcagtagtaatattagtccttctgtttatttgagtacctaagagctgcaggcaacgtgatctgaattacatggaggacaagctccagctgactttccgtaaactcgcattaggattctaataggagacgacaggagcaggtggggataatgagctggcggaaggggctgcctatcacactgctcggtggcccctctttcacccccactttgcctcaggcattttctactcagctgtgacct

SEQ ID NO: 39570 - DNA, 2300 bp, Homo sapien
tccgagagagacatcaattttgctgagttggggggtaaagatggaggaaggatgttttaaagtagaaagagagcagcaggtggccttgacttgtgaggtaggcggcaaggttatctgcgcaaagtaaatgcaatctggatgttaagtggacgtaaaagtcgatggaataaatttgctgctaagaatgatcgtgtaggcaggtggagagtaaagaatagaaaggagttaagaaccaggaatggaggcagtgagaagagagagggtggtgtgggtggaccaaatactgctattaaggaaaaagagagggtggaggaaacaaacaatacagggaaggttgacccactcagcccttctattcagctggaggaagtcacagaaaaggaggctatattgaatggtaagattggagaagactggttagggaataggaagataagctgttgtctaaaaaacgcagtctccagtaaaaggaagaaattgggacatttttttaaaaccccacataggtacactggaaaacatgggccacagggataaaccttccatttttacttccaaccttaccatgtgctcacaaaaaaaggtgttaaatacatgtaagttttgacgaggttatttaaaagtgtaggatataaaccaagaatttttcacaccccaaaaccccgcacaaattaagggattacatatctgagtgacaagtacatacaaacgcattacttctagagatacttagatgtagataaaagaccacatttcaatagaaggatcacacagaccagtgggatgtttcttctgagataacccactttatgcaggaaacagtgtggactctggggacggcctctgctctggctgaggatttctgtcccagagcggtacaggaatctgcgtagtgttttagtttggagaaaacaggaagttacactcatcacatcttttgcccagatgatagaattcgaaatccccccggggttgttcatggaatgagccgctctgttatgttgtgagccgtggtattaatcagccacccctcactaggtgttggggttccaccacgcttcctccaccccccgtcaccacagcagcgggtagtatttaggttgaatattccaaatagtcaattatgacagttaatttcaaatgagatgacttcgaagtacacgtgaaaacaatactattttatatcacgactcatgccatccgtatgtgtaatcaaagccttctaagtcttgatatgtccttacaaagacgaaggatagagtgaatgtcaaaatttgccaaacaggagttactgaaagtctgaaggggaaagcctagttaggttttatcttagaagtgatttttaaaacgaaacacgcagataagctcgagctttctggagccgattcctaaggccttgcaggtggtaagggggtcgagaattggctgaggttcctcggaagtccgcgccgattcggagggccacctctgactttctgatctggggtgcaacccccagtccctgtcccggtcgacaaaggtgtggagtcaggttccaggcaagctgggggtgggggtgcgcacaagggaggggcaggggactgggaccccctcttcttcggggtgcttcgggccgtttctccagaggctggtggtgtccccgacccaagcagctcagccccgctcgcgaggtccgaagtggcgggaacgggtcctccgcggcggtcccaaggcgagggaggctgtaaaacctggcagagaatccggcgcgccgggtcggggatgtctcgggtgccgggggcaggggccgcaggctcgcaggtagaagcttccccacgcgagcgggggcctcggccgcggaaggggcgcccccggggccgccggcagcggcgagcgggcgggagggagctttccgggcccctcccgcgcctcgggctggcggggcgatggcgacgacggtttcccggctcccccgccccggacgccgatggcggtgcgttccggccctcccccaacagcttctcccccgcggtcgccggagccggtgaggccgagagggcggggagccgcgcagggaaggcgagagggcggaggttgcgtggtgcaggcggcggcggcgggaggaggagggccgggcgggcaggggaggaggaggaggcgggcgccgtgtcgcacgcagctccaggcggggcagccccggtagctgagggacgcagctagaccttggcgggacggggctttcgccggggcccaggcccagggaccaggcggaggcgtcgcgggagcctttggggcaccacagagatgcgggtgagtgtcgg

SEQ ID NO: 39571 - DNA, 2300 bp, Homo sapien
agcatgtggctctcagggagggaggcttttataaattggtgaaaaaccctagcatatctaaatttggtttgttttttgacaaaatcgtttttaaaagatgaagccaatgagaaaaaaagtttaacatatttagaaagcaattcagccatccctctcaagcttaaggaacactctcctgaaacctccaaaaatgggcattaatagagttaaagcgagccagtcttgtgtttgcatgctttggaatttgaaatgtaacgcaactatttcgactcaccatggaaaacaacaaatagaaccttcaagtaaaacatttttcaatatccaaaaacaaaccttctttaaacaaagaaaaatctcatctccaaatatctttttcaaacagaatgactggttttacattttaaacatcattacatattttactacgtaatacactctccaggatttcagaaaatcgggtacattttcgggtgcaccatgaaatgaagtgttaaacttaaaactgcacacacttctgcgaggcgttaagctatgcttaggtcctagaagctcatggcttgaagtaaaaaaggaatctagttcctcttctgccgcttcgttaagtgcattccaaaaagtgtgatcgtttactccactcagaacttttgacgattttaatgctactacaggaaagagcaattacacagagcaaacaaatatttaagtagactgcaattcagtatttgcgcacttaccactaacccctactacgaaccagaagcaaccaagagtgacccaatcggaaaagagaatcctctttttggcaaagccagccagggagaaaaccctaactttggggattcatttcaaggaatgtctacaagcattcctctctttcttatcttatgtctgcgctacacaatactgcacgggtggcagaaacgggggtctttcagatcttaagggaaaaaaaagcgacgacccccgagtctggggaccccaagtcccagcggcctggcgggcgcacggctaccctcagggtcagggcgcgcgctcccgttgggaccgggggcgcgccgaggccgcagcgcagggcccggcccgactagcgagcgataggcgggcgccggggggctctgtccggttcggccgccgggctagcatccctgcgcgcatgccccggcccgctctcccaggagaacggggcaaaagggcgactgttacccaataatagcgccctgcacgttcgcaacaatgcaggcggggaacccgagagccgcgggcagggaaccggaaagcgagagagcccggctccgcggctgctcctgcgcttgagcccagagctcacaggggaacacgcgtcggccggaaagcagcgccgggaagaagcgtgggcgcgagggggcaagggcacgggtcccggcgtcccgcggaggtcgcctcaccaggcgaggcgcggacgcccgagccgccccgggccacacgtcggcccaccctccgagaacccagcccggtcgcggcggggaaaggggccggcgccaccaggccgccgcctccaggcgcgatgaatcgtgctttttcccagtgcgtagtccaggcctggccgccccggcccgtccggggtgactcagggcccggccccgctcgctcctctgccaccttcggcgtcctccgcccacgagtcccccggcccggccgccattctgcccggccgcgtttcggcggctcaggcctcgccaggcgcctggtttcggccgtcgcggcccgagtcactgcgacaccgcggctcggggccgggcctgcgccgccgccgccgccgccacctcctctcggccccggcggctgccgacactcacccgcatctctgtggtgccccaaaggctcccgcgacgcctccgcctggtccctgggcctgggccccggcgaaagccccgtcccgccaaggtctagctgcgtccctcagctaccggggctgccccgcctggagctgcgtgcgacacggcgcccgcctcctcctcctcccctgcccgcccggccctcctcctcccgccgccgccgcctgcaccacgcaacctccgccctctcgccttccctgcgcggctccccgccctctcggcctcaccggctccggcgaccgcgggggagaagctgttgggggagggccggaacgcaccgccatcggcgtccggggcgggggagccgggaaaccgtcgtcgccatcgccccgccagcccgaggcgcgggaggggcccggaaagctccctcccgcccgctcgccgctgccggcggccccgggggcgccccttccgcggccgaggccc

SEQ ID NO: 39572 - DNA, 2300 bp, Homo sapien
aaagagcaaagctaatgtatttggtattacaaatatacatcccacaaaacctccagtgtatgcctgggaggatgcaaaaccacaggataaagggtggcaaatcttactcaataacttagggagcaattgtgtttacattacaacaaacattctatcaggaaatagaacaactatgagataaaacatgacccttcaagaaatactctgcaaattctagccagttgagagcagttcaaattccctgggtctgtgttcacttttctctattaggagtgttttacaggaaacatctaagaatatttggcttgtctttccaaggatggctttgaagagtgaaccatgttagtgtttctaaaagatttgactgtctcatgcgattgagactgatctgagctacagaaactctgtatgactactgtaggtttctaatgtcattttttaaaaactttaaaaatataccatacttcattaatttgcttgtcttttttggtttttattttccttttgtttttactgagaaccgatcctagtgaattaataaagaccatctttaattgcatacttttatttagtcatttgaatttgaccttggtgttctaatacaacagtctgccaagtacagtgatgatcaggagcctatttgacttggaatcattagagaacctaaatggctgtcctttctgaaacctgatgacaatacctacgaccttggtttccttgccaatatataaaataagctagtgttgaggccccttggccatgaatgtttctgtaatcacctaggcacctgttcactcttcctgccccctcagcccctgcaggaagggtctgtagactaagaggtggagagccgtgcctctcagaggatgaatcaggaatggcatcaaagcctaatctttcatctcggaaggggtaaaactatgttttgctgcctgagatgattatgttcttccaagaaagagttataacttaaaacagaaaaagtggtgctgtttggtttgcatgttctatattccaccagctttaggttcttgagttatcagtcttagtggaacattagatataaagcagcatttattgttttaaaatatctttataatcagaaaaacaaaattacacattaactgtagactttttggaaaatacaaataacataaacctacaagcctggggcactgttgctgattatataaaccacattggaatcatggtataggtttttcgtaacttgttcactaatgatttgttattagtagttggtgtttattttagtgggtaatcatagttcattaactgaacatataataactgcctcttattggaaatgtattaacttcaagcttttttctatttcttcatttatgagttgtcttttcttccttgtgtttttatttggttgtactcactgctttgctggagatcattatgtattaagaatattgaccttttgatacatactgcagatattttccaagtttatttttcacatttagctatttagaacgtgtaataaggttctgacttacgtggtttaaacagttgtcccattattattagttcttgatagtacaagtcccgcctaatcattttttcattttattttttcttggctcttgagtattgattcattaccagttgaatttttccagatttctccaaaattataccaaatttgaaaatctgggcaaggcacggtagctggacagcctataatcccagaactttgggaagccgaggcaggagaattgcttgaagccaggagtttgagaccagcctgagcaacatagtgagaccttgtctctagaaaaaattaaaaagttagccgggtatggcggcatgcacctgtagtcccagctgcacagggaggctgaggcaggaggatcacttgagcccaggagtttgaggctgcagtgagctatgattgtgccactgcacttcagcctgggagacagagccaagatcctgtctctgaaaaaaatatatttaaaacaaaaatcattttggagagtattggcatttttataatgcaaaatataattctctttactcagatcacctgaataatttattgaaatttcttccttgctttgataatttaatagtttctctctaaatttttgaacagtctgatttctgatgatgatttccatgtaatcacttcagggcttatatttgtgtgactcttggcttcaagtagtttttaatctaaagtaccacatcttagtatctgcacagaagatgcattcatttcttagagtggcagagacattacctcaaaaagataaaataccattctctga

SEQ ID NO: 39573 - DNA, 2300 bp, Homo sapien
cgtgaatacacagagggtcctgaatcaaacccattactactttatttttttaaacctcaaacctttgttctttgctttcttgaaaaaacatccatttgatccagctgatctctctcctctctgttttataacctgtcttcgttgtttacctcctgaatgctaaatctactccccttttgaacatcttttctctatttgctgactagttccttaaaattctctcccgtatattattctagtgtgttgtctgcttcttgaccagttcctaaatggcttttctctgaacctcaaatgctaaattcacattttcaaggccagattttttttttttttttttttttgacagagtctcgcaccgtcacctgggctggaatgcagtggcgcgatctcggctcactgcatcctccatctcccggttcaagcgattctcctgcctcagcctcccgagtagctgggattataggcgcctgccaccaccctcagctgatttttttgtatttttagtagagatggggtttcaccatgttggccaggctggtctagaactcctgacgtcatgatctgcccgcctacgcctcccaaagttctgggattacaggcatgagccaccgcgcccggccaaggccagtgttttgacacttttcctttagtaggttccatgcaagtcctcccatctcaccagccagactgctgtagttgaaagaattttggaattggagtctgaagacttctttactcctggagatttggctttccatgtgagaagttgttcctggcattccttgggaaattggtatttttccaaattacaaatctgaggaaaaatggccaaaacattttgagaaaatacagaaaagtattataatttggaaacgttatagtcaacatagagacatcactggttcagaggagtccaccaatgacaagtcgcaagcaagagcgtgagtaagttgaggctggcgttttcgggaatgagggtgaaggcgtgtggcagggaagccgtgcaggccgagtggtcaggctgccaggtgggcaaggccttctaagtgtggatctgtagcccctctgctgctaagggtgaagtcattcttgcaaataaaataagtattaatatttatatacataacatgctatatataaaccctgtgaggggtcttccaaaaaaatagcaagttttggaagcaaattgagtccttcaattggcagttgtgacacgcagttctttgtagggccgttaacttgttaaggatcctgcatgttaccgtattcgaaaactacccaatagcgtttctagcattttccagtgtttgaatcctcgctgtaggctggagcactttgtaaatactgtaacagaaggaaggcagagagaagaatatgtgaatgttctggaataatttgacatgaaatctgaaagtgatctaaaatctgaattggcagaagcaatatctatttcagtgacaaaaccacaattaggtcaagcagaaaatattttcattgtttaaaagaagcaagcttatatgaagtaagatatggcccaacttggaggtgcttttggttcactctgaagattaagaccatccaggcaaagtggaagaagtttccctacgtctgggatagccatgaaacaaagagcaaggctatctggtagtgcagttcacgctctgtgtgttttaacatttttaagatggtaattttaaaatattaaatatctgcaatactgcctttcaatattaagtgatttttatttggcaattattttgcattaagttcccttttaatgttttctcttatcaaatgtttatgtcaggtggagaccatatttatatcttattgaacttagcacaatatattcataataaaccttgcatttattatatagagctttttttaacaggaaacttctgacactcttaagtgtaaccctgttgcagaaaaatcattcatccttactgatactcattgttatttaaaaacaagtaaatcaaatgttataaaaaatgcagaataggtagaattgggaatgctgatttctggcacctgagccctgcagattaatgtatcgtgatgtggaaacatgggcgtgccgcggcgcctggatctgtgcttggctgggggtgacccggagctccctcccaccaaccttcccagccgggctccctcgcagcccggagccaagcctgtgcctgccaccatttcctggcagtgtgcttagctgtgacagtttctacgtctgtagaatggggatgaaaacagcacctgctgcccagtgtgggctttcgcggtctcatgaagggtggtgg

SEQ ID NO: 39574 - DNA, 2300 bp, Homo sapien
aaaggcgggaaaattatgggctaaatcatctgatgaaaaattctggcccagcgcagtggctcacgcctgtaatcccagcactttgggaggccgagacgggcggatcacaaagtcaggagatcgagaccatcctggctaacacggtgaaaccccgtctctactaaaaacacaaaaaattagtcgggtgtggtggcaggcacctgtggtccccagctactcgggaggctgaggcaggagaatggtgtgaacccgggaggcggggcttgcagtgagctgagatggtgccactgcactccagcctgggcgacagtgtgagactccgtttcttaaaaaaaaaaaaaaaaaaaaaattctggctagttattaaattcattaaaaatatttcttcagatttttaccccaacagttcataggtgaccttttttcagtttccagtatgaactctcaatatggaatctcagtttacatgacaatggtattttaccccatagatacatcctagtaaaaataaattcggaatactcttaactgcattgccacatgaagcaataggagagactgtatcctaagcagaatccctctaattcctctgggttgaggtagcttgaccccccataaccaagatcaattttttttttttttttgagatggagtctcgctctgtcgcccaggctggagtgcagtggcgtgatctcggctcactgcaagctccgcctcccgggttcacgccattctcctgcctcagcctcccgagtagctgggactacaggcgcccgccaccacgcccggctaattttttgtatttttagtagagacggggtttcaccgttattagccaggatggtctcgatctcctgaccttatgatccgcccgcctcggcctcccaaagtgctgggattacaggcgtgagccaccgcgccttgcaaatatcctcacactttgcagaggcggcaagtgaacagtgctcatcttgataaaggatttttaacactgacacgtgcttagaactacgaacagtggaagggtctgaaatggcagcaatgtcgccctttcacaggtttctagggcgataagcactgcaagctcggccagccaaagtccagcggtgggggaaaaaacggccaaggcagcagcagacataatcaaacagggcccgggtcggcggcggtggctcacgcctgtaatcccagcactttgggaggccgaggcgggcggatcaccagaagtcgggagttcgagaccagcctgaccaagacccgtctctactaaaaatagaaaattagccgggcgtggtggcgcatgcctgtaatccagctactcgggaggctgaggcatgagaatcgcttgaacccggaaggcggaggttgcggtgagtcgagatcgcgccattgcactccagcctggacaaccagagcgaaactccgtctcaggagaaaaaaaaaaaagtagtaacgggtccggcggcagcgcgcgggccgggcgagcgtctcccggcaaacgcggcgccacagctgagccgacctccggggcccgcgccctcccctccccgggcaccactaggagcggccagcccgggcctcggctccgcgcgcggggaaacgagcgcggcggttaaaaccgttaccacccccgagttttgaactggttcaaacttggcttccagcacccgccccgcccctcccccgcccgggaactctgcggcgccggttcccgccaagagccgccggcgcttcgtcccgcccttcggccggttcccgccacctatcctccccgcctcccgtccgcggcgggctccgggcccccgcgatgtctcccggtccccgcgtgcctgcacaccgccttcctgagaggcgccgtgtgttcagcgaaagaacaaagagacggcggcggcgcttccacacggccagtggcgtcccttacagcgaaccccgccgccgcccgcgcgcgcacgcgctgccagtgcccgcccgcccacgagccctgagcgcactctgcgtggggctggctcggcgcctccgagcccggcgggccctgtgattggacgggcgcccgcctcgcgtcccgccaatcggggcggcgcttgattgggctgggggggccaaataaaagcgatggcgattgggctgccgcgtttggcgctcggtccggtcgcgtccgacacccggtgggactcagaaggcagtggagccccggcggcggcggcggcggcgcgcgggggcgacgcgcgggaacaacgcgagtcggcgcgcgggacgaaggtaacgcgccgctgcgggcggcccggccggcggggctccgg

SEQ ID NO: 39575 - DNA, 2300 bp, Homo sapien
aaggcatatctattattgaagaagcagcaagctagctgtacgggaaaagcctcgggacttagattgaggagacccttaagtcttgacttcctgattcagttacctctcaccaggttccccctcaacacctgagaattacaattcaaggccgggtgtggtggtttttgcctgtattcccagcactttggagcccgaggttggcggaccacctgaggtcgggagttcgagaccagcctgaccaacatggaggaaccccgtctccactaaaatacaaaaaattagctgggcgtggtggcacatgcctgtaatcccagctactcgggaggctgaggcaggagaatcgcttgaacctgggaagcggaggttgcagtgagccgagatcgcgccattgtgctccagcctggggaacaagagcgaaactccgtctcagaaagaaaaaaaaaaaacaaaaaaccccacagggaagctcttgggaaacccacatgtgccctcaaggtgccttgggttactttcacctataagaaaaatttaaatattcttttgttgtatacacatttgtggcagtcacactgtactgcaacaccaccacaatctcatcaaacaacactttgcctcgaggctgttaggaatgtatacttccatgtagcgaagagggaaggaagatcagtgtaatgaccctttgtttctgatgaggaggcagctgcgtggctttctaaaggctacataagaacctaagggctgaaccaggattagaaagtggctctggtgcctcacgtggtgagcatcccgcaatgtactctgccctcttccgccttctctattttcaaactcttggacttggtttgtcttcctccaaaatactttctctctgaaaatgttcacatctcttagcttcaaaacttaactggattgtcgactttgaaatgcctcttaattttgtccattgagtgttgtatcatcaaataccagtccttaatcctactgatattaaaacattaaaaaaatcctggccgtgcgcggtggctcacgcctgtaatcccagcactttgggaggttgaggcaggaggatcacttgaggttaggagttcaagaccagcctggccaacatggcgaaacttcggtctttacaaaaatagaaaaattagccaggcgtggtggcgcgcgcctatagtcccagctactcaggaggctaaggcaagataatcgcttggacccacgaggcggaggttgcagtgagccgagatcacaccactgcactccagcctgggtgacagagactccagcctgtctcaaaaaaaaaaaaaaaaaaaaaaaaaaagaaagaaaagaaaagaaaaagtacaagaaaaagaaaaacccctattcaccctcatcccatttcctgtctttgatctcttaggacatactataccatctttaccaataattggtccgtagtatctattactatttatttgatttttgttttctttttccttcttgtctgtgatgggttttcccaaatttactgtttgtttctggaagaaaagaatagtacttcgttttccccctgtattccatgctttatttaatgatgctgactttcaacattttaaaattgagatgaaaacaagaaacgagggatgccaggagagtggaaactctcgtaaaagactagtcaagtgcagtagtgagaaggggggaaagagtagaacaaggagttcgatctgtaactgactgtgaacaatcaattgagataactcactaccttcggaccagccaataagtcctcctactgtttgaactatttaaagcccccaaatttgttcattttccccttacagtgatattctggtttcagtttactgatgactatatttacaatattaatgatatatatatactctaagaattccctggcacatctatttatcaatagctggaaaaacgtactgaataacaagaatcagacgtgttgctaagcatcctgggaaagagatatgcaaaattagcatttcgtcatcagggcgtctttcccccggtttgtcttgagtggctcagccaccgcaaggtaccagagagccgcccaatctgcgctggcctcctttatctgtttgctgtgtgaccctccggacagctctgtgggacctggaggaaactgtgagccctacagataaagtctgtgcttccagcgtcggtaaatcccagcaagcgccactacctggaggctgacactttcccatcttggcagtcagctccctacagaggtgcttctcccactgcccaagatccctgcctcctccttaaaccccaactgatag

SEQ ID NO: 39576 - DNA, 2300 bp, Homo sapien
attctcctgcctcctcagcctcccaggtggctgggattacaggcacgcgccaccatgctcagctaattttgtatttttagtagagacaggatttcaccacgttggccaggctgatctggaactccccacctctcatgatccgcctgcctcagtctcccaaagtgctgggattacaggagtgagccactgtgcccggcctcatatctatgatttgacagacagcctctctacgcttacaacaaccaactgtggagatcttggatatagtcatggaagtatcatttctcatctctctccattctgaccctcaacacagtgctgtttgtacccataacaaaattgagtgaaaaatttagggataaagagaaaggagctttccaacttgataaagttctgttttgttgaatgaacttctatagctataccctaaatgctttcaaaaagaacattgttactttaatgtcacaagatatatgtgtgtttatacacatatacagacagcacttcaagagccttcttcctatctttgtatcaacaaaaggccagtgaaattgtgtttctcccaccactgagcaaatggggtcctcattcctctcagtttaacagtgtcataggaaacaagaagaaagatgagaactctgacttgtctttttgaagaacaggtctatctttaacatgatattaaggctgggcacggtggctcacacctgtaatcccagcactttgggaggccgaggtgggtggatcacttgaggtcggtcaggagtttgagaccagccaggccaacgtggtgaaaccctgtctctactaaaaatataaaaattagcagggagtggtggcgggcgcctgtggtcccacctacccgggaggctgagacagtagaatcacttgaacccaggaggcggaggttgcagtgagaggagatggcgccactgcattccagcttgggtgacagagcaagactcttgtctcaaaaaataaaataacatgataccgaactgtctggtggcccacattcatagcactctaataaatcagtgtgtacagttgcataatgttctgccctacaaaattgaccaggaaccatcagattaataggcattcaacaaaaaaattaagtatttttaattgctaaggtctgtgagttatcccttttttcttcctcacgtaataatctgcacacacgagaaaatattcctgaacttgagtttctattttttttcttttccctatttgccttctcaaactcccaggtgttaaaaaaaagtctcaaacttaatgcacattacaggcttcttttctgacatacaaaaatcgtcatcttaacctagttttcttctccaaagtggtcaagagggaaaacctcaagcttttattcagatctatgtaaaccactagattgcctatctggtatttccttttgcagaaaatcactagaaaactaaataagacgaggcaaagtttagacaagaatctgatggcttgtttctccgagatgcaaccttggagagaggcttccccagattctagtctggattcactttactgcatgctcttccccgctctctagctcaatactccggagagaaatgaaacttttatttgctcgagcagaaaaagaaattaagaaggccacgaacatgcagcggacttggagcccctttctagcaacaaacaggctcgtgctcctccgcccgcgttggtctccagcttcccagagccccggcgggttgcgaggaccgccctgctcgccactgctccccaccgctccggtaccgacacgtgttcttactgccaagttcggccgcaggatgctgagccgagccccgccccgctccacatttcccaggctccgcctctcctgccccgcccccggcaccgattgccaatagcgccccgaggcgtagccaggtcccgcactccccgtgcccggcccgccgcctttgttctcccccgctctccctcttggcctgtgcgctcccggcaaaccgagtggcagccgctgattggtggttgtggcgcagccaatcagaagggggcacctcacgttagggctcggagttttaaacgcgcagccgagggccgcgcgcaggagtagggagggcctagggcggcggagccgactcgtcgcggccgaggcgcgcgcggtccgtgccggcgtcagtctgggattggccggcccgcgacttcctccgccccctgccaatcgccggggacgacttccgtgggtttttccggctcccccgcgtcgctaaggagcgacgggctgtcggccagaccccgagttctcggtgcgctca

SEQ ID NO: 39577 - DNA, 2300 bp, Homo sapien
gctggagtgcagtggtgcgatctcagcttactgcaagctccgcctcccgggttcacaccattctcctgcctcagcctctagagtagctggaactacaggcgcccgccacctcgcccggctaattttttgtatttttagtagagacggggtttcaccgtgttagccaggatggtctcgatctcctgacctcgtgatccgcccgcctcggcctcccaaagtgctgggattacaggcctgagccaccgcgcccggccagcaggagaatcacttgaacccagaggctgcaatgagctgagatcgtgccactgcactccaacctgggcaacaagggcaagacttcgtctaaaaaaaaaaaaaaaaagttcatagcagtatacattaaaaaattgtactgtatacacttcgggaggccgaggcgggtggatcacctgaggttgggagttcgagaccagcctgaccaacatggcgaaaccccgtctctactaaaatacaaaaaattagccgggcatggtggcgcgtgcctgtagtcccagctactcgggaggctgcggcaggagaatagcttgaacccgggaggcggaggttgcagtgagccgacatcccaccactgcactccagcctggcgacagagcaagactctgtctcaaaaaaaaaaaaaaaaaaaaaaaaaaaaaagccaggcgcggtggctcacgcctgtaatcccaacacttggggaggccgaggcaggtagatcacaaggtcaggagtttgaggccagcctgaccaacatggtgaaacctcgtctctactaaaaatacaaaaattagccgggcgtggtggcaaatgcctgtaatcccagctactcgggaggctgaggcaggagaattgcttgaatccaggagacagaggttgcagtgagccgagattgcgccacagcactccagcctgggtgacaagagtgagactttgtctccaaaaaaaaaaaattgtactgtataacagttgtaaaaataaaaaacgttaaacagtaaggtgcatgtacatttcacgattctgtggcaaacacagatgcgtatatgctcctcagcctacgcagggactattttatttcttatgcacatcctctccaaactacacacttttcctttgctacttcagcctgacacctaagacatgactaagacagaatgcgaggttgattttctggagacaatcgccacccccttcctcgccctctctcctttctgtctcttcctggtttccccacctctcccctgttcttgcgttctcgtgtttctcacgccctgtgtcatggcctcctccgtcttctcctcctactctgtctctgtctcctgccggggcccggggtgcccgaccgcagccttgggccaccctgagtccctgcaggcggccctgaggccggggtggcttccgcatggggtctctgcccaaggccgttctctgctaaggaaggagcgtggccgcccggggagcccggagggctctagacccacggcgaccggacctggtgggcggaccccgcctccgcgtccccggcgggacaagcatggggcccccacggcctccgcgcccccggcgggacggatgccccgggccaccgcgggcagcgcgcgccccccacccactttccggcctcgctggattcccgggaccccctcacagacgaagcctgtctcgggggcggctttgggaggaaccgcaccggaggttcccctctcgctgcctctcagtctgggtttctgtggagcgcgtctccctgtccctgtccctgatctctccctgtccctgtccctgatctctccatgtcctgcccctccgtttcccctccggccagctcctcagcttgtctctgaccgcttccctccccagatcccgggaatccgagggtccctcaaagaccggcgtgctgcggcctgctctgagggcgcccgggcccctgggtccctcctctgaggaccgacgctcaggcagcgccgcttcttcctcccgcaggaggcgctgtaggactgagcggcagccgcggccgggcgccgggtcccagcatgcaccgcgcccggccggcgctgcgtttgggggccacccgggctgtgcgtgggagtcgggttggggcggagcggaggggagtcagtgcgcagcagggcaggttcctgcggagccgccggagacggtcgggtttgccagggccgggcgggaccgcggggaccatggcggagccgcctcgggtaagcgggctagcctgtttggacgcccggtttcggggtcgtggtgggtcctcgggttccgggctcgcccgtgtc

SEQ ID NO: 39578 - DNA, 2300 bp, Homo sapien
cggctaattttttgtaattttagtagagagggagtttcaccgtgttagccaggatggtctcgatctcctgacctcatgatccgcccgtcttggccacccaaagtgctgggattacaggcgtaagccaccacgtccggatggccttgttatttttacaatgtgatttcaaccaaattcctctacagttttattgtacctcacccatatttttttgttgttgttgttgttgttggttttgtttttgagacggagtttcgctcttgttgcccaggctggagtgcaatggcacgatctcggctcacttcaacctctgcctcctgggttcaagcgattctcttgcctcagcctccccagtagctgagattacaggcatgcaccaccatgccaggctaattttgtatttttggtagagacgggctttctccatgttggtcaggctggtctcgaactcccgacctcaggtgatccgcccgcctcagcctcccaaagtgctgggattactggcgtgagccaccacgcccggccacccatgtgttttccacctataaaattcccatttatgaccacatttacaattagcattaaactgctacagtggaaaggaaaatcaagaaaacgatttttccttgcctatcccaaataatacattagccaataaactgttaccacattttctataaattcaatgtacaaagaagagctaccacaaactttcccagaacagagaggaatattccaggagattcccaatcacttaaagaggagagaaaaaaagaaagcctggctgtagaaacaaagcttggagaaatcagaaaagaatctgtacctgccaaaggagggtggggaaaaggagtgggaagcaaaagggaagaatcaaatgcaaataaggagcattacattcctaagattataaaatttcattgggggcacaagaaaaacttgcacacttaagcaagttatacttaactgaatgtaacagggtttcttggattaagcctcaggatacgcctttcaaactctaaaaccggtgctcaaattttcaatactacattacaatactacagcatttacggtaaattcgatttacgctaaccacccaattcattttaagttttctgtcctttcctagagggagcggtctccaatttctctcagttccagctttccttctcctttttctcatctgcttaacactgatgtgcttctctgaaactaccttcagcaggagagcacgggccccagagagaccccgaggttcagagccccgacactgaaggcagggacagcgttgttgatctgagcctacaacaggccgagaaacagatctttcccacccggattctttctcccaaaccaacttttatttatgtattaaacagacggggtctggctgttgcccaggctggagggcagtggctattcacaggcgcgatcccactaacgatcagcactggggttttgccctgctcggtttccgagctgggccggttccccctccctggggaacctggtggtccccgctcccgagaggtcaccacacagatgcagaactcagaggcaccgcgcgacggacctagcgcatatacagcgcagagctcccgggctcaagcgctgctcccgcctcagccttccgagtggccggggccacagacgcgcgcggccaagcccggccagaccagcttttccccaggtcaattccagaacagcacacgcagcaagactgcaccttctccagcccagcccggagctcagtccgtgggccactgccaacccccaggcccaggccccggccgccccactccctggacgcggaccccaatccagctgcgacagggacccgagtttcgacagagcctgcatcctccaccggcccttcttaccgaagccggctcggccatggcggttccgcacgaaccggccctgcctggcacggcctcccctccgctccgccccaacccaactcccaggtacagccctgctggcccccaaaggcagagccggccgggcgcggtgcatgctgggactcggcgctcggaagcggaagccgctccgccccatagcgccccctgcgggcgggaggagcggcgccgccagagggagtcggtcctcagaggaggggcccgggcaccctccgtgcgggccgcagcacgccggtctttgagggacccttggactcccggatctgcatgcgagggatgcggtcgaagacgagatgagggagctgacgggaggggaaacggaggggcaggtgaacatggagagagcaggaacagggagagagtagggacagcgactgggag

SEQ ID NO: 39579 - DNA, 2300 bp, Homo sapien
atcttggtctccacaaccccttatcttaacccagacactcctttctatgaacctggtcttcagatagccaattgccaatcagaaaatcgctgaatccgcctgtgacctgtaagcaccgcttggagttgtcccgcctttcctgacagaaccagtgtacactttacatgtattgactgatgtcttaagtcttcccaaaacgtgtaaaatcaagctgtaacccaaccaccttggatacatgttcttaggacctcttcagacagtaccttggccttcctcactcatatttggctcagaataaacttctaaatattttacagtttgactcttcgtaaacatggatgaatcacaaaagcattacgcttttgaggagccagtcacaaaaggttatatcatactgtatgattccatttatataccatttctaaaaagagaaaactaggtttcaagagcagatcagtccttgccaaggatccaggtgtcggagggagtgaccataaagcaaatgaagcacagaagagaatggcagcacaaggagtttcagggtgggacagggctcttccgtatcctggttacagtggttactacacgtatacatacatatgtgaaaattcatagaactttacacccaaagaaacgttagtttttttgtttgtttgtttttggtttttttgagatggagtctccctctgtcgcccaggctggagtgcagtggcgcgatctcggctcactgcaagctccgcctcccgggttcacgccactctcccgactcagcctccctaggagctgggactacaggcgcccgccacaacgctcggctattttttttttttttttttttgtatttttagtagagacggggtttcgccgttagccaggatggtctcgctctcctgacctcgtgatccgcccgcctccgcctcccaaagtgctgggattacaggcgtgaggcaccgcgcccatccgaaacgttagttttaatgtaaggttttttttttttaaccctttaatcagtaaggtgcatctacatttcacgattccgggacaaatacagatgtgcacacgctcctcagcctatgcagggactactttctcatggacatcctttctaactacacacttttcatttgttactttagcctgacacctaaaacatgactaggacagaatgcgaggttgattttctggggacagtcgccacccccttccttgccctctctctcctttctgtctctccctggtttccccttctgcgtcttcccacctctcccgtttttgcgtcttcgtgtttctcacgccctgtgtcatggcctcctccgtcttctcccgctctgtcacagtctcccgccgggggctaggggtgcccggcccgcatccctgggcgaccctgagtccccgcaggcggccccgaggccggggtggcttccgcatggggtctctgcccgaggcctttctctgccaaggagggagtgtggacgctcggggagcccagaagggcgctgcacccacggggaccggacgtggtgggcggacccctcctccgcgtccccgacgggacatgcccggggcccacacggcctccgcgcccccggcgggacggacaccccgggccaccgcgcgccccccaccacctacccggcctcgctggattcccgggaccccctcacaaacgaaaccctcgagctcatccctgacttgggggcagctttggaaggaacagcaccggactctcaccctctcgctgcctctcagtccgggtttctgtggagcgcgtctcccagtcgctgtccctactctctccctgttcctgctctctccatgttcacctgcccctccgtttcccctcccgtcagctccctcatctcgtcttcgaccgcatccctcgcatgcagatccgggagtccaagggtccctcaaagaccggcgtgctgcggcccgcacggagggtgcccgggcccctcctctgaggaccgactccctctggcggcgccgctcctcccgcccgcagggggcgctatggggcggagcggcttccgcttccgagcgccgagtcccagcatgcaccgcgcccggccggctctgcctttgggggccagcagggctgtacctgggagttgggttggggcggagcggaggggaggccgtgccaggcagggccggttcgtgcggaaccgccatggccgagccggcttcggtaagaagggccggtggaggatgcaggctctgtcgaaactcgggtccctgtcgcagctggattggggtccgcgtccagggagtggggcggccggggcctgggcctgggg

SEQ ID NO: 39580 - DNA, 2300 bp, Homo sapien
ggctgcacttcggcctacttccttgttgctaatagtcacaaggcactagatactgacatttgcatctctattgttcctatagataggatttcagacatcagactaagaattgatttgcatccctgttgttcctgtagacaggatctctgacattagaatcataaggcttttgtttaaggatcgcttaagatgtttttcagaccacgagttccggtgaaacagttgagttcaaccagtttgaagaccccccacagaggaatgggatgagcatgagaatgtagtttcttcatctccttgtaccacgatttcaccagcactctcccaccaatcagtcaactccattacccttacaaactctaaccccaaattcccaaattcctagcagagatggatgtgaggcttcttcctgtctcctccttaggtggccctatgattagacctctttctctgctgcaacctggtgtctctgcatatagacttgctatgtgcattgggcaaggaacctactgctgttacacacactctgttgacttaaaacacaacctcaccagaaaacactttgttctcgcaggtcctttttttttttttttttttttaagatggagtctagctctgtcgcccagggtggagtgcagtgctgccatctctgctcactgcaacctccgcctcctgggttccagcgattctcttgcctcagcctccggagcagctggaatatcaggtgcacgacaccacgcccggctaatttttgtattttttagtagagacggggtttcaccatgttggccaggctggtctggaactcaggtgatctgcccgcctcggcctcccaaagtgctggaattacaggcgtgagccactgcgctcggcctgttctcgcaggtccttttgctcagacgcagcaaaccgtaaccccaagctcgatctctgctgctctcaggaattccacttcctccagcttgggcaacatagcgagaccctgtctctacagaaaaataaataagtaaataaataaatacaaataaataaaacattagccgggcttggtagctgcgcctgtagtccaagatgctcgggcaggctgaggggaaggatcgtttgagcccagcagtttaaggctgcagtgagccttgtttgtgccacttgcactccagcctggacgacagagggagactgtctctaaataaatcaataaataaggccgggcgcaatggctcacgcttgtaatcctagcactttgggaggccaaggcgggtggatcatttgaggtcaggagtttcagaccagcctggccaacatggtgaaaccccgtctccacttaaaaaaaaaaaaattagctgggcatggtggtacatgcctgtaatcccagctacttgggaggcaaaggcaggagaatcggttgaacccggaaggcggttgcagtgagccgagatcccgccactgcactccagcctgggcgacggagtgagactccgtctctaaataaataaataaacaaaaattaagaatcctatttccagaccaggccccggagagtcaataatccgagatgtgaaggagaccttaaaatattattgatcccaacacaggccgcgtgggacctgaaccgcctcaccttggcaaccacatttgtaatttccgcaaatgatctatatcttcttcattccaaaattgtgcctctccgtcactcattccacccataggctcccttcagccgtgtcccccttactctcaccctgcacatttccgctgttctaaatacggctgcccttcagcagaagctgttgcctgcagacggcgcctgcgtatcgagcctccgtgaagaaaatcactccccagaatgagcccggctttgcggctgggtcctaaactgcggtgagctgaaccttctcgtgggaatgtgagaaagcggaacacacgtgggccccaaataacaaccctccccacaccgaagcccaagagctgggggggaggggcggaggcgacgcggggggcgctggccgcaggggccggcagggggcgcgctggccgcggtggctgggcagcgcgagcctgcggcgcgtctaggcccgcgcggttcccggtgcactcgctgcccacaaagcgccagctgaggggccgctgcgggtggagtgcggcggagtcggcctcgcgaccccagcttgatccgccgcctgctgcaccgcgcctccgccgcgttcctgcgcgtcccgagccccgacggccgcgtgagtcccgtccgtgcggggaaggcagggccgggtcggcgccgcctgtggagaggacccggcggccgggcc

SEQ ID NO: 39581 - DNA, 2300 bp, Homo sapien
attttatgaagtgcagtggaacttaaaggtactagcaggtctgcttccacacaaggtgatgagcctcagagatctcttccttaacaagacagggactggtcctttaggaaaacaaagtaaatactattttgagaataattacaaaaacaccttttgggggtaactatctttgcagaatgctcgctatgtgccaggcacaattctcatttaattttacaacattaaaatagagttgccattattttcttcatttatatatgaagagaatgaggctcagagaagttaaataagttgctcaaagtcatagctagtgagtggtgattttgggatttaaactcaggtgtatgcaactgcaaagctcaccctcttcctaaacagtacctggcacacagtaggtgttcaataaatacatttggaatgactgaattttcccctcctccatcttcatcagcttatactggcctctccctggctcctcctctgacctggcctgatgtttcaaagtgacactgacctgcctttaaagggttttatttgtagagaagggatctcgctgtgtcacccaggctggtcttgaactcctggcctcagccttggcctccaaagtgttgggattacaggtgtgagccaccatgactgcccgatttaaaggtttatttatttatttatttgacacaggatctttgctatgccgcccaagctggagcacaacggcacaatcacagctcactgcaacctccaactcctgagttcaagcaatcctacagccttagcctcctgagtaactaggagtacaggcattagccatcatgcccgggtaatttttattttttattttattattattattattatttttttttgagacggagtcttgctctgttgcccaggctagagtgcagtggcgcgatctcggctcactgcaagctccgcctcccgggttcacgccattctcctgcctcagcctcccgagtagctgggactacaggcgccgccaccacacccggctaatttttttgtatttttagtagagacggggtttcaccgtgttagccaggatggtctcgatctcctgacctcgtgatccgcccgtcttggcctcccaaagtgctgggattacaggcgtgagccacggcgcccggccttattattattttttgagatggagtctcgctctgttgcccaggctggagcgcactggcgcgatcttggctcactgcaacctccgcttcggaggttgaagcgattctcctgcctcagcctcccgagtagctaggattataggcccacgccaccacgcccggctaatctttttgtatttttagtagagacggggtttcaccatgttggccaggctggtctcgaactcctgacctcaggtgatccgcctgcctcagcctcccaatgtgctgggattacagatgtgagccaccgcgctcggctaatttttattttttatagggatggggtgtcaatatgttgctcagtctggtctcgaactcctgggctcaagtcgttctcctgcttcagcctctcagagtgctgagattacaggtgtgaggcaccacgcccaacccaatttcaaggtgtttgaagaggccactgttaaaatgcactgcaccttacctgggagaaagagctcagccctcttttgacaccttaacatgaatcacttctctatcatccataacagtgcaaaagctctgggatgggtccaggtaaatctggattgggaagaaggggagtgggaggtaaagtctgcaaaggagtgagggaaggcagaaggccagaagaaagtgtctgaagacagaattactcctgcaaaattttcacaagggtcaggcactattttctcccgggatgcccaatacatttgcagaattaacagtaatcaagcccacagtccaggtcctcgcatagtttgggcctttaaagtcggccatcccagattgagggggcctgacccctgggcgaggccgccgcctctcagttttggggcggtggcgaccccagtccgggagtggccccggtaggtccccgcaggcgggcaggagctccgaggccattggctggcgcgcgggctgccaaggggcggggagcgccgccgaaggggactgtttgctcctacgggctgtagatggagctgtccggccccggagagggggaaggcgcctggaaaacgttcttcttctccctggccgacccgagcggggaacagcactcccaggatgcagtttgtgtcaacacggccgcagcctcagcagctgggcatccagggcctggggctggacagcgggagc

SEQ ID NO: 39582 - DNA, 2300 bp, Homo sapien
acgggtgagagtagcaccaggcatttcttcaggctccatcgatgatctccgtgggcagaaccggtgctccagaattgggtataaaaccaggggaggtggatcctcagagaggcctgaaagcttgcccagggaagactctctgggcccaccctggggctgggctgctcaggggcccctctgctcaccacgcggctctcagccaggtgctaacgagggagccaggggctgctgtgttgtgtttgatcattttcagggttagggcttcaaacccgagaaaactaaactgggccccgggactttcttaacttctactgtggactctgtccccttctgtgggctagggcggagtggagcctctgtgatggaggaatgggtgcttttgatggaaacaccagcacctcttactggtattacagggcctggcgatcctagggccctgctctccactctgctgtgtcccggagcaggtctgccccggagcagggctgctcttgagtcagagagtggggctggtctgcccagatcgccccaagcagcaggcctccccttttcctagcctgagggccttttctgcagccatcgggaggacagaaaatgacacctcttcctgtcccaggtgtgaaggagagtcggctgccagcccatgtggtccagtgagccctgagtctgacaccaggtcccagatgaccagtgaactgtcaccagcctcaaccagccccccttagccataggtctcagctctcaattgcaccaattagtttacccttctggggtgagggctctgtgctggaagataaaagggggagtccccaggccatggggcaccccttccccaggaagcaaggaggggtcccagaggagtttttctttctcttggtcctcttgggtgtgagggacatcccctcttcacctctaatgagtgaccttttttagtgaacctattttcaatttggaaaatgtttatgaaacagtagttgtatatggggggaagctgcttttctgccctagcttgggctctccggtcttttccttgactgcagccctggtaggaatgtggtgggtttttttgttgtttatttgtttgttccgagacggagtcttgctctgttgcccaggctggagtgcagtggcaccatctcggctcactgcaacctccgcttcccaggttcaagcgattctcctgcctcagcctcccaagtagctgggattacaggagcccaccaccacacccggctaatttttgtgtttttagtagagacagggtttcgccatgttggccaggctggtcttgaactcctgacctcaagtgagctgcctgccttggcctcccaaagtgctgggaaggtgtgagccactgcacctggccaggaatgtgttttttgttacctgcagcatctagagctgccccagctggcagtgcagggaggcgctgcggagtgaccagctgcctccctgtgcttcagtttcatcatctttaaggcagagatcatcattcttgccctaacctgctgagagattgctgggaagattagcgtcagctaacttacatcaaagttcttggaaacataaaacactaggcaaatacaaagttcgtcattaaggctagcccttgaagaaatcagttggtctattcaaagaaagtggcctgtgacattttaggcaggggttgcagccttaacttgctaagggtcaatgtgggtgaaccagtgaccagcctgactcacctaggcaggagatgggagagtgttgagttgggtgggtgggtgagtgggtagctgttgctgggggtgttagtgtatcctgagttacgggggcctggcagaagaaagacgacatgtagcatctgattagttgacccctgttcccagctgacttccccggctcacacaaggtctcatcctgggttgtcgctttctccctctgcatacaggctcaagaatgggacatggacgcccggcggccaatgccttttcagttcccaccctttccagatagggcacctgtcttccccgaccgcatgatgcgagagccccagttgcccacagcagagatctcactctggactgtggtggctgccattcaggctgtggagaggaaggtggatgcccaggccagccagctgctgaacctggaggggcgcacggggacagccgagaagaagctggccgactgtgaaaagacggccgtggaatttgggaaccacatggagagcaagtgggccgtgctggggaccctgctgcaggagtacgggctgctgcagaggcggctggagaacttggagaacttgctgcgcaacagga

SEQ ID NO: 39583 - DNA, 2300 bp, Homo sapien
gcctcctttgcaggctggaaatttgatctgaacctttttccagacttccaggctcagagtctgggatgctgaaacatgctcattttcaagagactgaggtatacatgtgcatcagcttcacctgcatgttgcctcccagaagctacctggcaacatgcaacgtcagaaggttgccttgtgagtatagaaatagaatagagggaatgagttctacgaccgaactgtttaatgacctcagcatcctatgtcctgatattgtgcctgtggaggataacatttttattttatttttaaagacaagatcttggtctgttgcctacgctggagtgcagtggtgcgatcgtgattcactgcagccttgaactactgggttcaaatgattcttccacctcaacctcttgagtagctgagactacaggtgtgcaccactactcctggctcattttaattttaattttaattttgtagagacagggtctgcctatttgctcaggttggtctcaaactccagtgatcctcctgccttgccctcccaaagtgctaggattacaggcatgagccacctcacccatgacacatttttttttttttctgtatctgacaccaagagtttgttggtctgagagattaggtcagaccctctggacaggatctccctgactgaccggtttcttcagcctggcccattctttctctagatttattaatgattcagtgacgtgcccgttgatctagttgccctggaaataatgcctctgtttgagatgacatttcatatccttacactctgattcaccattcaatcatttacaaatatgaacacttctgtgtacaacaaatggaggatacagtagacagacatttcagtggaagagatacagataattaatatgtaaatgagtgaaaaagagagattacttcagatggtgataaatggtatgaaaaatttccagcagggtaacgagattgagtattgagatggaggatggtgtggggctgtagaaaggggggactggggatatctctctgaggatgtagaatctgaactgagccctgcatgtgaggaaggagccagtcatgatcttaaaagtttcgttctccgccgggtggggtggctcacacctgtaatcccggcgctttgggaggctgaggtgggcggatcacctgaggtcgggagtttgagaccagcctgaccaacatggggaaaccccgtctctactaaaaatacaaaattagccaggcgtggtggcacatgcctgtaatcccagctactagggaggctgaggcagaagaatcgcttgagcccgggaggtggaggttgcagtgagccgagattgcgccattgcactccagcctgggcaacaagagcgaaactccatctcaaaaaaaaaaagtttcgttctcagaggaaacacttcacgcctatcctgtgaagtggaagttcattgcttgtctccagagagacaatggtataaattaggcagctatggttgccgtagtgttgctggtattggggattaagtacatggcgattaaatggtcatgtggccgtgctttccaacaaaaattccagacacatcgtcttacatgtagcatgaggactggaaatatttgaaatcagggttgtcttggactttccaaggcacatgattaccataattaacaggctacagagggctggcctgggcctgaccccacgctccacactgttgatatggaaactgttcccagtttctaaaaagccaaataacaggtgaacttttggaataaaatcacttgccttttggaaccatatttcttttccccaacaacattacatgttctttcctcagcaaaaagtctgagttgtacacatttttgaatccctcaaagcatttagcagagtgctgggcatacggaagacagcaggatcccgtggctttgcctgaaacgcggaacctggtcttgacttttgagtgactgagccctcctggtgcccgcactctggccgggagtgccaagcagcgttctccctcccgccgcacgggggcacaatgggaagcctgcacagtgaggaagagcggctggagccggtcttgtgccggggaggtcgctgctcccagaatgcacctggcatcaacacggcggcggcggcggcggcttccaacaggctctggggcgccgagcggacaggaacgcagcacgggggctccgaggcggggtctgggtgttgaggggcgactggagccatggcggagtcggcgcctgctcgggtaaagaggcaccggcgcgctggctcgagggcgcgttggggatggcgg

SEQ ID NO: 39584 - DNA, 2300 bp, Homo sapien
ccgtcttaaaaaaaaaaagccaccatgtaattttaatttatatcagagctggcttgacaccccggctggtctgctcagaaaccacattatggtgcaaagtgttcgtttattaaatatatttataaaatctgagcatgggaatgggaggtagctgtgggaccctgataaacagtgccaaggttttcgaactgtgatcaccagaccaatagaatcagcatttcttgggaactagttagaattgcaaattcgcatcactttcatcccctcctgtttcagacctagaaatgttgaggtttgtgcctagcatcctgtatttttaacaagaaccctcagtgaacatgatgcacactgaagtttgagtaccactgacttagagaaactttttttctaaaaaacgaagactagctgtcaaacattatagcactctttcctcaacagagctcattaaatcctagcatttttgtctccagcccattttcctgaccctttctttctttctttttctttttttttttttttgagatggggttttgctcttgttgcccaggctggagtgcaatggcatgatctcggcttactgcaacctctgcttcccgggttcaagcgattatcctgcctcagcctccagagtacctcaccaccacacccagctaattttttgtattagtagagatggggtttcatcatgttggccaggctggtctcgaactcctgacctcaggtgatccatccgcctcagcctcccaaactgctgggattacaggcatgagccacggctcctggcccattttcctgaccctttctgtttgcattggaccttaactgttattctataacgtcaccatttactggtattttataatcctgaatagattggactgatccctgataagatcctagggatgctcttaatgtctttagtgcatacttgcagtttgtgttttagattgggatagttcaacaagaatttccaaaatgaataatgccaaatatttatttgatttgttaccttaaagtaacacgtcctaacctttccgcaaattttggggttcaccttacttaggatatcagtttgtgttttttctgatagttgaccacgcttttgcttggctcaaatatttgtgaaaataacttctcaccctcaccccccccccccaaaaaagaaaaaacaaaaccaaaaccaaaaaaccccaaacaaacccaaacacagaaagaaacaaaactgcagatttctagcgggaagagtttgccagcttgttggacaaagactgtgagatgaatgggaaatgcagaaaagacagaaaacaaagcttcaactgcatacagcacatttagttcaatatgcctcagcacaggccgaggaaaatgggtcctgcggtttattcaagatgcctcagggcctaaatgagggatggactgattcacacttgctgtgatctcagcctggaccaaagctacagaagggtcctcgtgggtggctgaggactttcaccaggcgggccccgggaggaggaagggaccccagagtcctcaggaggggagggcaggcttaggaaaaaaaaaaaaaaaatcctaccatcttcacgtttgttctgtcaaatttaaaagagactttaaaaacgttcatgtaagtttccctggcttctccctgggtacacacgtatcctttttactttccccaactcagttctgtggtgcgtgggaggcgctgcaacagagtctcggtccggactggagccccggcgagggccgaccccgttccccacgcagctttccctcgcgaggtttcgcactttccagcgcggttccttcccgcagccctcccggctcccgcgtgggacgcagagagaggttgggcgccgcgctggcccgggagtggcttacgcctgacgtagccccgctggaggccgtggcacgcccgccctggcgtcaactcccgcgccccgggtgagggtgggtggccgcgcctgggtcccggacgccgcgggcgctgaaggcctcgggagggcgcggggcggcggccgcgggcgtgcggtcctacgggctgcagggggcgctgtgcgcgtcctcaagctcggccgccgagcgcagctcttttttaaagggccagcggggcacgtggctcgggacgcagttcgctgccgcccggcagtagctctcaggttaggcgggtcccgctccgcttccgccgtcgctgccgcgccgccccgggcccgacaggccgggtccagggactgcaacccagcgagggacgcgggcagccatggccgaagcggcgcctgcccgggtaagcgccctcg

SEQ ID NO: 39585 - DNA, 2300 bp, Homo sapien
ggcgtatgccaccacacccagctcatttttgtatttttttgtagaggcagggtttcaccatgttgcctatactggtctcaaactcctgagctcaagcagttctcccatcttggcctcccaaagtgttgggattacaggcatgagccactacgcccggccttattttcaattcttagtggctcacgaacagtcaggattcatattttcacttagactgttctgtttctcattcttttttgaggcttcatcctgctcagtcaccaccttgtgatgcttggggctgtttagtaggatggatgatgtgtttttctttgttgtaggaaggatccaaagatgaaacttcagaggatgatccactgaaatttttaggatctgctgatgaagcaaccgtctttaggcttgtcatgaaagcaacatttttaggggcagtgtaacccgttggtttataactctcccgtacgtaaaggggaatcggtagcagtgttagcaggcacagactcaattggattattacttttcatcactattttaccttttgataaccttctagctggttttacctcttctgttagaagagaacctcagttgaggtagagtggacaggaccccacttgggttactttttatttatttatttatttatttatttatttatttgagacagggtctggccccgttgcccaggttggaatgcaactggcacaatcatggctcactgcagcctcatactcctgggctcaagccatcctcctgcctcagcctcccaactagcagggactgcagtcatgtgccaccatactcggcgtttggtggttatttatttatttttttttttgagatggagtcttgctctgtcgcccaggctggagtgcagtggcgcgatctcggctcactgcaagctccgcctcccgggttcatgccattctcctgcctcagcctcccaagtagctgggactacaggtgcctgccaccacgcccagctaattttttgtatttttagtagagacggggtttcaccatgttagccaggatggtcttgatctcctgaccttgtgatccgcctgccttggcctcccaaagtgctgggattacaggcgtgagccaccgcgcccggtctggttgttcttttatctctgacaaggcattgttctctggatgcttaagtttaggaagatccagcgtggtaaattccaacccaggtttggaggtagagccactttttccatgattctgggtttcttgtctgttcccttctgatctgatgcccatccaatttcaaattcctcttagcatcaagtggacaaatgatgtgagccatttgctgatttcatctctgatggtagcattctgtcaactctcactgtcagccttttgctcatcatagtttttttcttatcatctttttttgcttaaaaaatcagagctttggccaggcacagtggctcactcctgtaatcccagcactttgggaggccaagagggtggatcacaaggtcaggagttcaagaccagcctggccaagatggtggaaccccgtctctacttaaaaaatacaaaaattagccgggcatggtaatgggcgtctgtaatccctactacttgggaggctgaggcagagaattgcttgaacctgggagtcggagtttgcagtgagccaggattgcgccactgcactccagcctgggcaacagagcgagactccgcctcaaaaaaaaaaaaaaaaattcaaaaaaaaaaatcagagtttgatttcttgtgtgagaggacaagtgctcatttcggggctttaccatttgaaagtcttgctaacagctgggttggttacgatcactctgggaggcgggcactgattaaacatgtatatagacacgggttctaagaagtaggcgtagggatggagttatcttgaaagacaacttctgaggggaaaaccttgacgctcctaacgccatatcttcagttgtgtttctgccctgccttgggtcccctatgccataagagcagcttggaggaggaggaggaggcccgactgcgggaggtggtgaccaccccactggctggtgggacaggcatggtgtttctctttcctgccttaaaatgccagattctgtcatgacctgcctggcgatcattaccgtgatttcctgtctgctgaattcctgtgctgcagtttccttctgtgggacatgaggctttagactggaatctagctgccaggtatttggtggggtccacctcactatcatgccctgtgctggagctgaggccccaggatcgcagtgactctgcctttccccaga

SEQ ID NO: 39586 - DNA, 2300 bp, Homo sapien
cccccctttctattccacaaaaccgccattgtcatcccggcccgttctcaatgagctgttgggtacacctcccagacgagatggtggctgggcagaggggctcctcacttcctagtaggggtggccgggcagaggcgcccctcacctcccggacggggcggctggccgggcggggggctgacccccccacctccctcccggacagggcggctggccgggcggggggctgacccccccacctccctcccggacggggcggctggccgggcagaggagctcctcacttcccagtaggggtggccgggcagaggcgcccctcacctcccggagcaccagcattttatctttgattaagccagaaggagagtctttagatggggagtctccaaccttccccaccagggacatcctgccaggcatggggcctggggaagaagggcggaggcacctgtggccgcagcagagccccacaggagtgtgggggccttttgggagtggggtggggttggggttgggtggtgggacctggtgaggggcttcctcctgagggttctctccctccctctccagcttctatctccctggggactgtggggacccagatcagtctggggtccttcctggtctttccccatcgtggtctggtctggcctggctggaaaggcactgcatgaaaacccaggcatcagatcccaggcatgtggtccgatgatgatggaaaagctgttcacgtggtcttggcgtggctgggctcccagcccctccgtgtccacagtctgtgtccctctgcctagagtctgtgcttccctgagagggcagggtgccaggaccctccctcacattagggacccctgagagctgggtgctgagacctggggtctcacgtctccagcacattgctgtgatcacctgccactgccttggttgtccttgtcactgctgtcccagcagctccttgcctccacccaacctgggagttgagtgagactcacacagacccaggcaggaatctcaggtcccagtgcctcctctctgtcaccagtgagtgtagtggcagacaggtcgtggacgctctgtgtggatttgtcatgtggatgagcagctgagcatgggtgcagcactcaccacctctagtccacagaggcctcttagggtggtctgggggcatgcagggcccctggggttcattgtctttcacagatggtaactaatgtcaccagaactcttgggggtggggtcctgccaccctctctgctgtgcccagggtctctgcttctgtgtcccactccagctgacccctgacctctgggctccctggctcctggccttgcagtttgatctcccctcccctgatgtccttagcttggcctccaggaatgaggcagatgacaacaatcaggactgagtgaccgtgcaaggcagtgcctgtgtggcagggctcagtgagcaggacccctgcaatgtgctgtgagcactgtggggagatagggcccgggctgaggctggaagccaggactgggccgagtgacctgggggacagggtggtgaggtccacttggaaaccaacatagactcctttgccaggtggtggtgtggccatcaagacagaggcacagtctgaagacgagatgacgcctgagcggctctttctgggggtgtcccgaggccagaccgagtgtagaatcccccgagggcccaggaacaggcctgggggccccagccgtcatcaggcccagggcatgcccagggtgcgggcaggggagccacggccaccgggggccagtggggagacgccccgagtcctctcccgcaggcggcagcgggcattcccctgccccgactgcgggcagagcttccgcctgaagatcaatctgacgattcatcagcggacccatgtggaggaggggcggcaggaggcccccggccgctcgcccaccagctgcggggacagccaggccatgctggagccgggggaggtggtggtacccggccctgtcatccgctggctccccgaggagcctgagggtcgccgctccgtggcagggggccgtgccttggtggggcggcggcctgcagccagcaagatgtaccactgcagcgagtgcctgcgcttcttccagcagcgcaagagcctgctgctgcaccagcgcctgcacaccggcaatggccagggctggcccgcctgcccctactgcggcaaggccttccgccggccctcggacctcttccggcaccagcgcatccacaccggtgagcggccctaccagtgcccccagtgtggccggaccttcaaccgcaac

SEQ ID NO: 39587 - DNA, 2300 bp, Homo sapien
gactggtctcgaactcctgatgttaggtgacccgcacacctcggcctcctgaagtgctgggattacaggcgtgagccaccactcttggcccagcctgtgggttttgatggggatgtcttggctgctgtcttggaggcacagtgtctccccatgtgtgtgtttcttggcccagagtgactcccagtattcctagtccttccccacaggatagtcacatccattatttacttttgttgtcagctgggaggggaaactgaagcctggacacgtctccccaagggctcagtgttcatgggtgtgtaagatccattgactggaccccagaaagcaccctgaggggcagtgcagagagagcccaggaagcccctccactagaggaggcccttggtctggctgaggaccacgtccaccctgggcctccaggcctgcttttcacattaaaggcggggcagtctcctctcaaaggagttctcccttgagcactttgggctctggggcagagttgggctaggagatctgggtgaatcctttagtcacagctagtctcatgttcctcttctgtcaaaggggtcatggccccagtgtgtcctacctcagagttgtcagggtcaaagtaacaggcactgggacaaatatgaagcctagctttgtgcttcctttcaaattcagggcctcctttctactccattccagcctttttttcctgtcagaatccctcaggaaggacctttatcttctggagtgagtggcagttccactgggttcagtgaaagagtcgcccatggggctctgttccccaggagtcctttgtattttggtgaacaaattcttaccaaagcatgagattcggactgtagaagttcagactgcctcagttcagactgcctcatggggcagtctggaggtcagctggcttctggtgtctctcatcacaccactgcggacgctgtctgtagagcagccttggtgtgggtgactctgaagctggagtgatgggaccccagctatccttgttttttaccgccttgtctggcactgtgaccacgcttcagggctgcttctgggggtcttggtccctggatgtgccatttccttgcccttctgaccctcacacttcttccaaagtcttgagcagagttgggggccaatggtagcattgctgtcatctctgggaggagagtgagtatacaagtcagtgacagttcagccaggctcccttgggtttgggaagaggcactgcccttctgtgctgtggatcctgcttgtctgctctggagtccccccacccttgccaggagcttcacaaaccagagacgggctgtcagcaagagctcagacaggatgtggtgcaagtgcaggtgcacgagtttaaccctcagctgcaggagctagtctcaggtgttctggggatgcctcaggctaagaattttgccgactttctgggcttggttggctaatgccaaatgcccctgcttaaatatcacaaggtgctgattctccttttttctttttttcataccaatgtgctcaaactttgagctaggtcttgtgagtttgcctagcactcagacctgtttaagtaacgttctttacattgaaacaagtcaaccgaagctttgtggtgcaggagctgagggtgccccagactcagtgggagccctggttgggccccaaactctcccagcagggtcctcggtttcctcatttgtgaaataaatgagtgggccacgacgttaataagcccaagagaactgtgaaggtggtagtcccttgccctaattggtgctcaataaagttgttggcataaacgagtgcgtgcgcttgatctggtttctgctctctgggaggtgagtggccgtgcggggcggtggcagctggcgacacctgcgggctgttgggcaccagcccggggcgggcgctcgcacctgtcgggcgtgcacaaaggcccggcgcacgctgtgggggcggggcctcccgggttggccaatgaaaagctggcactgggtcggaggcgccagccaagtggggggcggagcttccaccaccggccaatggggatctggcttcgggatgtgggcggggtccacccggtcgcaacccgttgagtctctgcacagctgccgcgctgacgcgttttccgcgtgtcccgagccccggcggccccgcgagctcggtccgtgcggggaaagcagggctgacgccgtctgcggagaggactgcgcagccgggcttgtgtggggccgcgcgtaacggcagcggctactccctgcccaggccggccagcacagggccatggccga

SEQ ID NO: 39588 - DNA, 2300 bp, Homo sapien
gggagggctcagcccgggtggcaggaggaggacaaggactcctaaggccacacgataaacgcccttctcgctctccgtttccttgcctgtggaataaggtgattggcaaacacaagatttggaggttccctccagccctgatatccactggacccggctctggggggacagtggactgtggacgtcttcattccagactctccaagattcctctttctggacccgccttttggcaccgcccccaagtcgaccatctcaaagatccacccctccctccaagctgagaccagtgccatggcctggggagggatgtccgctgcagtctgctggagccagagtctggctcctggctgtgaggtgggctctagacttgagctctgattccagtcaggaggattctgatgcctgcccactctttctaaaattccctgacaagtccttctggctgctgctgaggggatctgcattgtgaggacttttggttaggggcttcaggctcaggcttgacctaggccattgctggcctgcataagaactgttgagattttcataggtttttaaaggtagaggggccatctcctagtataaatagctttgcagtggttttggatccattcccgggtggcacatttgtggcagggcattgcagggaggtgaggatgtttgcccctaatctgtgaagacggtgctgcctcctctgagctccacttcattgtatcagacagaggccagacttgaggatgaatagccatgctgtgtggggaaggaaagggccaggtatctggtgtctggtacctggtatgtgtgggacgctttgctgagtacgtttattggggaggtctctgagaaactcagttgcacagaattggattaatcacagtctttggttcataacacattcagatcactggtccatagcctttatatttgtttttaagaatataacaggtgctaatgtcatacaccatgagtgctttttcatatcttcagtgcatttcatccacacagccaccttaggagtgaaggaagttaggatgtccccataagtgagaaaacagaaccttggataagtaatgtggcttgacctcaggttgtgcaggattcagatggcaggagaggcactgagtcaagttctaggtgagttccatttccaggagcactccctttatacctcaactgttccctgctgaggcattcctggattttaaattttatttctagcaatacacaatatattttccacctcctgtgaacagggtattccttgtaatgtttctttgttctttccttttctgctttcaactttctctggcccctgttgcctggcagctaggagggtggagaccaccctggggctggttgacaaggcacctggatcatggggatgtggtatcaggcggggcaggaagtcacaccagtagatgtcagggtggatgggccttagaaatcaccaaggcagaacaacaggcctttctccccttgagcccactaaggggtgtgggcttgttctagaagaaggtgaggagtcagattgctgcctgggtgtgtgtgcactggaccccaggtcccctggcaggtgttctggacttgggcttctcaccatttcttggctcctgctgctggccgtgttccctagttggttgagtaattggctgagtaaatagagccagtgagtggtagagctgggatccactctctgttcatttatgatggtaatgttagttatgtcattttccgttgccccggctcttggttcaggattcttctcgtgggggctttgtgcggtccagtgtctgctgtctttgactattaggtggggtctgtttgggggtctgaccagtgaggccgcctggcactcagaagacgtctcccccattccggagaatcctgaccttcctgtatttgggaatggctctgggctgctctccttctggtggctgacttgcgaacttgtgtctggttgcaggactggcattgcggactgacctccagggagaggcccagatctgatctgcagagatctcccttccggctatcgtggctgctgttcaggtggtggagaagaagatggaaccccaggctgcctggctacagagcctggagggatgcatgtggacagccaagaagaagctggctgactgcgagaaggtggctgtggagttcgggaaccagctggaggcaagtgggccgtgctggggaccctgctgcaggagtacgggctgctgcagaggtggctggggaacgtggagaacctgctgtgcaacaggaacttctggatcctgcagttgcccccgggcagc

SEQ ID NO: 39589 - DNA, 2300 bp, Homo sapien
cctcccagggtagccactgggatcattctgctgcataacctttcaggctattttctcatgcacatacttacttgtgtgtactgtggaaaaatacaggggttaagaacacacagatatacactacgtatcttctgcggtttgctgttttcactcaacaatatgtcttaaggatcttttcgtgttgatacattttgatcaatttcctctcgaaacggtttccagggccctggttaatggtggagccagcctggtgtgtggcagccaggtcgggctggtgtcttcagagtggctgtgtcagaagggcctcgtgtatgacagaagtaagtgagctgtgccctggctataaaatctggcagcgttgagcgactggacagctgttagatatgggtggcttggaatgttctccattcattcatttatttaacaaaaaatgtgcctaccctgtgtcaagcctggagcaggaagaggagcagtaactattccctgatctttagataggccttagaggtgggcacagattggtgaggtcgcccagtccttgaaggacacccacctgagggcactgtaggatctgtatttggctgctgtaacagagactgaagaaaacaaaaccaaaaccgcagcttccacacggcagggggtggtctccctcccgacagagcttgtttggcagctcacaggcccaggctccttccagcctaccgctccaccattcctggggccaggccttgttgctgtggttcgagatggcccgcgaccatgcccacggccctgttgaaggaagcaaggggatgggctgggggttggggtgccctttcccttttcctttagttgatgcctttccctttaagcaaacacattggtttcttgtacatttagtacttactgtgcactttataaacattgacccatttaagcttattccaactctcagtttcctcagatcatagatgaagaaactgaggcacagagaggccgaatccactgtcaaaggtcctgtagctggaggaggcagcgcccctcacatccattagtcagaccagccacagggcacacctacttgcagggaggcccagcaacaaggtctggagtctaggaggccacatggccagcaagacaccaagtgctctgttagtgttgaagcggggtggatggcattggaagatggctggtcatccccgtcacagctcacagcccgtcattcacagaccaagctcccctggcttgactcactgccatgtcacacgtccccaggatgtgctgtgcctttgctgggacctacagttctgttgggagtctctttggtgtcatggtcccaactgaggctgtgagaggaaagatgtcctatgacacctgctgccctcagggcctcttcctctttcccttagacgcaggccagctggaacgtccccaggcgttctgtcctggatcaagcaagaggaaggggcaagtgggaggagccagcagggcccacaggagaccactgtggcacacctgtgctcaggtaaggcatgctgggccatgtctcctcaggcctgtatccctgggccttaggagacatggcgtcccctggggggcctcacagcgcctctagtggggccttctcctgggcgaggctcctgagggaaggcagtgcgcagccttggctgtgtctctgcagaatcttgtatgcttgctgcgtggtgtcctcccatgcagttgcacgaaatcattcttttattcctgatcctgtttcctgtttatttcatgaacttgtctgtaggcagcatggtgctgggcgctgcaggggctcattaatgcatgagacacagattccactcaggagagagaagacgaacacagacacagtacacggtgggaaggggcacttccatgtctgcagccagagagccctttcagaatctgacccaaaagatggccagtattctaagaaaaagcacatatgcttacgatgtgcaaacagctgaaggtgttctttcaactatagtaaaaggggtgtctcggtggccacaggcggcccagatgaaggtgctgctggggaaaatgtcaccacgctggtcttgggaggctccatgagagggaggtgggacttgagaggggcttagagcctgggtgagaggcaaagaggaggccagagaccttctgggtagagaggaccctcgggccaaggctcagaggtggatgaacgggggagccttaggtggaacagcacagggtggaacccggcagaggacaatgggagctgatggaggctaggccagagtggggccttcagtgatgcttgaaccccaggcttcaga

SEQ ID NO: 39590 - DNA, 2300 bp, Homo sapien
tttgcggttcataatagtggtataattgatgtctaaattggtgctgtggtctctagaagagattcacatatgaggggcacatattattgctaccaaacggaagcactttttatgtgtatacttgtctttgggttttattttgctagctggagactgtggcctttaatcctcttttcctttcttccatgaacacaggttcagcagctggacatggagaaccaacgctcatcacctctgtcgttccccagtgttccacaagaagaaaccttacgtcaggcccctgctggactcccccgagaaactctgttccaatcccgcgttcttcctcccaaagaaattccttctttgtctcccaccattccccgtcaaggctccctgccccaaacttccagtgctcccaagcaagagacttctggccggatgccacatgtgctccagaagggaccctcactcctgtgttctgccgcttctgagcaagagacttctctccagggccccctggcttcccaggaagggacccagtatccacccccagctgctgctgaacaagaagtctcccttctctcccactccccccaccaccaggaagcccccgttcactcccctgaagctcctgagaaagaccccctgaccctttccccaacagttcccgagactgacatggacccgctgctccagagcccggtttcccaaaaggacacccctttccagatctcttctgcagtccagaaggaacagccgctccccacggcagagatcacccgcttggctgtgtgggctgccgtccaagcagtggagaggaagctggaggcccaggccatgaggctactgaccctggaaggcaggacggggacaaatgaaaagaagatagccgactgcgagaagacagccgtggagttcgcgaaccatctggagagcaagtgggtcgtgttggggaccctgctgcaggagtatgggctgctgcagaggcggctggagaacatggagaacctgctgaaaaacagaaatttctggatcctgcggctgccccccggcagcaatggagaagttcccaaggtaagcacatcccaactggggcttcccaaggaagtgatctgaattggagtgtggtttaggaatgtagtgtaatatgaaagaaaggggtggttgataaaggaaaaaatacagtgatcccagttgctaggacatgccaaaatcaaattatttctcctgttgatgagagtataggctagtacagaaatgcccctgggatcggggattgtcagtttggaagggtgttcagcagagctgtccatggtgtgagagactacgaaggcaaagcgaaggccgatgagagccgtggagaggctttaccatcagtcactgagggtgcattagcttcacaattgcagcagaggaaggagcttgggttaaacatcacaaggatctgtcccactccacatttttatgagttcacttataagccatgttagtgccaggaaaactgatttcaagatgtttcctttcaaaagctagagaagttaggtttccatattattttccagaaggttctgaaagagcttgagtgtggactggcttgctttctcttcttcagtgctgctgccccctttcacagccatatgtagggagaaaacagactctgttctctagcccggtatgtctcaaatgttactgtgcacatggatctccccgggatcttactgaatgcagaagctatttagtaggtctaaggtggggtctgagcaagttacctggtagcaccattgctgctggtccacagaccatgctttagagctgcaagaattatatcctgaaggggaggaaaaggatccgacaagacaggcccctcactctttggggccaggacagtggccagacttctagaaaagtcctaggtgaaggcccagagccaggagtttgggccttgggattggccagccgtgggcctgtcactgccttccagcgggtctgagccgagttattgtgtggtttcaggtccctgtcacatttgatgatgttgctgtgcacttctcggagcaggagtggggaaacctgtctgagtggcagaaggagctctacaagaacgtgatgaggggcaactacgagtccctggtttccatgggtaaggagaagccttcgctcgctgggggctgcctggacgccagctcaaagtgcattcataaacttagggagttctgaaccccagcagagccaatagttgcaagcaaggagaacagagttgtagagatcacaacaaattaaagcaaacgccctcatatacccacacacatcagtgcggc

SEQ ID NO: 39591 - DNA, 2300 bp, Homo sapien
accacttggatatagagcatagtgactgagcagattgactgaaggaagatgatgagggagtggacagaaattgttacaggagaaattgtgttaggttccaataaagatactgatgatctaggtaaatacataactagttactcacagaagatcgtggcttcgcctccccagtgattcaggaattctctcgatgtgagtatggcagggtgaggaacaaggagagcgtgggtcattgagatcccagaaggactccaagtctttatgttggtctagtccccccaaatctggatacaagtcaccagtccagctgacttctgctctacttccccatccttccaggcctcactacttcctcattccccatgtcggaaaccccagggtggaacccagaccacctgagcacacctgctgcaatggactgctgcccactcctaggagtggttgaattgcctgccttcacctgcctcgatgtctcgctctgcttatagcagaagccaggccagaatacccagaagcccgttcagcctctacagcaggggccgggcacatagaagatgtttccaagtcaaacatacatataccatactgactcattgatatgagtctgcaatgcaactgttatcaaagagtaagagtctgggaaacttcagataatgtcatgtcctcacttttggaccaagcgaaggaaggaacccagggcaccacaaaggcctaatgctggtagaagtggtggtggctggatgccaagtccaccttccagttaagaacattaacagttctggcccctgctggtgagccccccacccctgctgggagatgtgggatagtaagtgcttggcttttacaaaattctgctcttttgtttctcaaagttttatgttcagtgcttcaacaactcaggtagtgtgtgtgtcagatattattatcctcgttttatggatgaggacacaggacactaagaacagagaggtcaaacgaccgatccagagtgacacaggtggcaataggtgtagacagggccaaaagctctaacaggagtccagcacccttccgctctcccacactgctgttcgtaaggtacccgtgcaatgtatgttgtgaaaaaggagatggctctgtgagaaacaaaaggtagcataatcatctttcatttgcggttcataatagtggtataattgatgtctaaattggtgctgtggtctctagaagagattcacatatgaggggcacatattattgctaccaaacggaagcactttttatgtgtatacttgtctttgggttttattttgctagctggagactgtggcctttaatcctcttttcctttcttccatgaacacaggttcagcagctggacatggagaaccaacgctcatcacctctgtcgttccccagtgttccacaagaagaaaccttacgtcaggcccctgctggactcccccgagaaactctgttccaatcccgcgttcttcctcccaaagaaattccttctttgtctcccaccattccccgtcaaggctccctgccccaaacttccagtgctcccaagcaagagacttctggccggatgccacatgtgctccagaagggaccctcactcctgtgttctgccgcttctgagcaagagacttctctccagggccccctggcttcccaggaagggacccagtatccacccccagctgctgctgaacaagaagtctcccttctctcccactccccccaccaccaggaagcccccgttcactcccctgaagctcctgagaaagaccccctgaccctttccccaacagttcccgagactgacatggacccgctgctccagagcccggtttcccaaaaggacacccctttccagatctcttctgcagtccagaaggaacagccgctccccacggcagagatcacccgcttggctgtgtgggctgccgtccaagcagtggagaggaagctggaggcccaggccatgaggctactgaccctggaaggcaggacggggacaaatgaaaagaagatagccgactgcgagaagacagccgtggagttcgcgaaccatctggagagcaagtgggtcgtgttggggaccctgctgcaggagtatgggctgctgcagaggcggctggagaacatggagaacctgctgaaaaacagaaatttctggatcctgcggctgccccccggcagcaatggagaagttcccaaggtaagcacatcccaactggggcttcccaaggaagtgatctgaattggagtgtggtttaggaatgtagtgtaatatgaaagaaaggggtggttga

SEQ ID NO: 39592 - DNA, 2300 bp, Homo sapien
tgttagaaaattaaagatgtatattgtaaaactgaggacaaccatttaaaattatatgtaactagtaagagaatggtgaaaaatagaaattactaagaaatagaatactaatataaaaatagaattaaaaaaaaaaacctcaacctcaaagcaggcagttggggagagagagagagagagagagaggtatcactgaacacctggaacacacagaaaataactagtaagatggtagatttaaatgcaatcgtattagtaatcacattaaatgtttggtgatatgattaagatccagaatagatttttaatgaaatacctataagccaataagaaaaagatctcacaacagaaacattggcaaatgatatgaagaggaaattcacagaggaagaaaccaaatgtcagtaaacatgaaaagatgtccaacttcattaatcagggaaatacaaatacaaattaaaataatgagctaccatttcacagtcatcatgtcggcaaacgttctgagtccattatcagtaagtatgagccaggatggggaaagagaaaatcacacgatagtgggtgtgtaagtaggcaccatcccttcagtgagcagttcgggaagccggggaaagatgaaggtgctcttgccatccagagtcccatgtctaggcgtctctagagacgcactttagcagtgcacaatgagacatgcatgcagatgtcgctggcagcaggtttgttctcattcctctagggggaatggaacgtaaactgtagtttatgtattcaatgaaatactatattgtgggtaaaatgaatgaaccagatattcttgtttaaacatgtctgtatctcaaaaacaaaatgacccatggaaaaaagcaagttgcaacaggatagggactggataatatcattcacataaaatgtaaaaataccaaaaccagtagtgtgcattgtttacgaatgcacacatgttagttaatgcataaagacctgggtgagaactctagcctccgggaagggaggggacaggatgcatagctctggccttacctctatctgtaactttccttttttttgttttttgagacggagtcttgatctgtcccctaggctggagtgcagtggggcgatctcggctcactgcaacctctgcctcccgggttcaagagattctcctgcctcagcctcccaagtagctgggactacagggccgcgccaccacgtccagctaattttggtatttttagtagagacagggtttcatcacgttagccaggttggtctcgatctcttgacctcgtgatctgcccacctcagcctcccaaagtgctgggattacaggcatgagccaccacgtctggccataactttccattatctgagctgccagcatactgagtcctgttgccttccaagaccagctccactcctggggttccattaggtaaacacaatgtcctctgctcccccccgccgtcttccctcacttaagttagttccagttgggcttcatcgctagtaaccaggacgcctgcctatagtttcttctttttttttccttttcaattcatccccagttctcgccacctcgtaggtattcaattaatacatgtttaagtggacctgtccaggaaggggagttctcaactctaagctcctgcatttcttttgggacttctcatggttacaaagagcattcattcatactgtgactgagggtaaacaagtcgctgcccactcggcctcagtttcctcctaaatgacccgtctggccacttccagccccagcagggtctgattctaggaattcggtcctttcatgtcgaaaacaacactcgggcatttcacaaaagcacccaaccccctggctccccttggaagcacagcccgcgtccctggaacccgggctgcactgagctggtcacatgaactccgggctttctctggtgtgacgggtttcttagatccctttgtgagcgcaggttttgaaagggaacgaccccgggttctgggtgtgagaggcgcaggggatcggcgggaggaaggctgtcggagccaatcaagccgcctccagaccccagcacgtcgcctgggctgcgcgctccgactgcgcctccgcccgcgcgcctcccggcctcgcccgagggtgcctgggcaggcgaggaccccaggtgagaggccggagggtcctggagggtgggaggccccggcggttcggcccgggctccacgacgggctggcccgggctcagggcgtgtccgtcgccgccgggcggctcgctcgacactgttcgctcctaccggctgtag

SEQ ID NO: 39593 - DNA, 2300 bp, Homo sapien
aaaaggtgtgagaacttcgggtgggcaagaggagaggggaaaagcatgaggaaaggcacaggagtggaaactctcatgcctgcttttgacacctgtgcccaaaatggagggaaaggctttggaagcctcatatatcaatccaaggaggtttatcttcgttctttttacaaatagaggctggaaaaccagcaccagagatgctctgcaatagatgcctgtcttcagtggaggacagagcaagtcatcattaccctaacttggctgtctgcagagccccagcttcacccttacctcaacccctacaaggaacttgttaaaaagagaccttcttttaaaataagttttctccacattactcaggacccatcccaaagacattttgattcagtagatatgagatgggatccagaaatccatatccttcacaagcttccccagagactgatgcagctgctctgagagccaggcttggaaattactacctagagatgaccctggcatatccgactcagcctgtcaaaagggaactttttaaattgcacactaaaaatgtctctttatttctaatgcactgtatttctgtcacccagtggtgtgatctccactcactgcaacctctgcctcccgggttcaagcgattctcgtacctcagcctccccagtagttgggattacaggtgcgtgccaccacgcctcgctaattttttctatttttagtagagacggggttttgtcatgttgctcaggctggtatcaaactcctgagctcaggcaatccacccatcttggcctcccaaagtgttagaattacgggcgtgagccactgcgcccggccctaaaatgctttatatcttcctacatcaatttttttttgggctgtcatccagctcacacctctactaccaccctctggtctgaaatgctctctgcctatcaatattttgccaattcttcaagatccagctcaaattttatctattctgtaaggtctgccttctttgaaaaagattacagatctctcacatattttcttatcagtgtgtgctaggcagttggctagttagtcttggggaatacacagatgagcaagtcgtgttcctgaaaggcaatgagcctctgaaactacgtgggggcccgtccaaggcgccctccttcccctgctctggttggcctctttgagaacatttaaatttttatttttctctccttgtttaaaaatactatccttgtcatggaaaaataaaaacatgaattggaaaaaattagaaaaggcataaaaacggcccgtggtctattaaaggaatagacctttaatagaactactgaggccatgttgatatatatgcttccaaacttttcaaaactgtaattatacatgtacgcagtatatgacgctacatatgtcctatattgttttaaaatgttatttttaaaacaaagacaggatcgtcctggacaggctttttctcttaaaacatcatgaacatctgttcctaccaagaccttcaccgaaatcattttaaatgatggtattgcgtcccattgctcatgccattaaaaaaatttactgtaataaacccattacagaaaatgctaagtggttgcctaccggggtttaccgaactatattcctgttgttggaagtatttattccatttcaaacacaggtgggcatgagttacatctgtcctccccaaaatagcctaaacctccagacccaggacctcgggcagcagaagtgcccgtggggcgggggaaggggagccgggcatcccagggcgagggggccgccctggccgcggtcacccgggggacgccctgcccggaagcccgtgctcgcccgcgggcgcggccaggcgggtcccatgagggggaccctttcaataaccgagtcctcgggctgggccgcggggccagcgcagtgactccccccgcgctcggcagtccggccggggtcgcggggtcgcggggtcgcggggtcggcccggggtcgctaggtcctcccgtcgggccccgcgggcggggctgggcggggcggggcggggccgcgggcaggcgggcgcagcgcctgccgttcgcctctcaggctgcaggtggggctgtgcggccgcgctgcctccaggaagcctcacgggccttcgtctgccgggccgcggcgccggctcccaggatgcagtgtggaccggccgggcgctgacggaggcggcgcgactgcgggcggcgcggcgcaggggcagccagcgaggagcggcggcagaggaaaggccaggcaggcgccgcctgcggagagcaccgggcggc

SEQ ID NO: 39594 - DNA, 2300 bp, Homo sapien
agcatttgactgcagatcaagaggtctctggttcaaatccaggtgccccctacactgttctactttttaatcaccaaagtgggtcctgggtcataagctccacccaatccaccctgcaaaaaaaatgacacagcctatctaatctctgacccacagcatctctgaagtgcagactcaatagccctcaggtgatttcatgggttttaaagtttgtaaggcacatctgtctcctgcagccctctggataccactccaggacttttgcagagttctccagaatctccccaggcacatccatgtgattcccaagagagggctgggccatgtctctaagtcctgctgtattctccacagcacccagcttccactgtggcacaggagaacctgaaccagccacagtttcatgcccgcctccaacaggtatgagaaatctaatgagcttagatttctaagtgtgctgcaccctggactttggctctgggccctcaggttctggatttcccatctggggctgctgcagactcacaccctggcctacccagaccaaggactggggaaaagcaggattctgggaggctctgtgagactgtgggcaaggagcgagatgatagaggaagtcagctgggactacccagaggactgacctgatcccatcaacctcttctctctcctccatgcagacagatacagatcatgggctccagcaagggaaaggaagctggtgtcagattccaaaatcagtaaataaaaataagaatccgtaaagggcaccctgattggaaccttttggtctgtcccctaaggctcatctcattattatgtgatgaaaaccttgcagtctgtagccttttgggtgagaggagcacaccatgggtagtaactgtggtctctcgagccccctctgatggtggtggtagctgaacaaagcaagatgcaggatgtggtcttttctggaatattctgatgttcccaaaaataccaaacctccaggagcttcacagatgcagcagagccaccaataatccccaattatgtggatatttcccactcctcagtgcagtttccaggcaaatggctgaaggggctattatgggaaatctggcaggaggattcactgtccatgactgggtattttggcagagtacttttctcaagcttggctttctcgtcatcaggggaggcaggttctttgagcagattcagacctggggaatgggtcagaggccaggaacctccattgtgccggctatggtggtagctcaggtctacacgtctaggggaccatgatgggctccccattgtcaggcctagaatcctcccactgatgagtcacagccaagacctgtgtggcagagaccatggaataacattctgtggtaaagtgtccactgcttggcctctgacaccctacgatcctcctagccccactgaaatcaggagcttcctttccgctatcatcactcccaccagcatttttgtctacagagaacagctaccaggattcttttcatgaatgtagaagctccacacacctaggtatttttcaagccagggcaagtcacgtgtgataaatccactccagcttacctaccccctgaagccaatgtattctttctacattatagcaagaaattcctagtatctcaaatgcatttagaattggcctcctgtggctgggcgcggtggctcatgcctgtaatcccagcactttgggatgccgaggcgggcagatcacgaggtcaggagatcgagaccatgctggctaacatggtgaaaccccgtctctactaaaattacaaaaaataagccgggcatggtggcgggcccctgtagtcccagctactcgggaggctgaggcaggagaatggcgtgaacccgggaggcagagcttgcagtgagccgagatcgcgccactgcactccagcctgggagacagagcgtgactccgtctcaaaaaaaaaaaaaaaaaaagaattggccttctgtgaatccaggcttaggtccaccaactgagcaaacaggtttatcccagctgctccagctatggtatcttaaatagaattttaattgggaacactcctaataaaaaaattcagactcatttaaagttataccctttctactttataaagtattccaagaatctacatccacacatgctctttaagtttttgctgacagacattagccagttggaaatgattttggtgtgtgagtctttgcctcccagcaactggtgcccaggctcaactgagatcttactctcactgtaagtcaagggacaatgaggatggggaaac

SEQ ID NO: 39595 - DNA, 2300 bp, Homo sapien
atgggacacaccatgaaagcactagttcccctaggggccatattgccatggagatgacacctctgtctcctcaaacaggaataaggcccttttccaaggtaatccgggagtagctcttccaggcaacatggcagggacttgccaacacattgttgtcttgataatagaggtaaattatcatgcagggtgacccgcaaaaaggccacagtgagagaggaagcggtggtcttctactgggtcccgtatcaagtggtgaaaggaaggctggactcagggacatttgcagaatgatctactccaatctcctcactttacatgtgaggcaagggctgactgacttgcccaagggtctcgactggttaatgacagaactgacaggtctcctgattcccagttccccctacaatctccgtggtgcacatgtcccagcctagacaaggctggcttttttttttttttaatccaggacattacagtgaagctaaggaagcttcagagtgcctttcctgcaccagctctgtgcctccttctaaatttgtaattttatgaggcttttacttaataatgttcttcctgattacacaagctgcagacccataaaacacgagtccacccctaggagaggagatgtgttacttgagaggggaaggaatcacgtggaagagctgaagggaaaaaaaaaaaaaaacaggaaaaacctggggcaggtccagggacattctcctacagctcacggggtgagtagggtgattttaccctttgtcggatttactccaaaagacaaaatgatgccaaaggctccaggcaggaaatctctaaaccccctcatttgagggacaatcgcccagagatgagaggcatcagagaatagctaggttgtgcctgcgacccaaagaagcaagtcggacgcaggagcatcggcaacactatgagtaaggtcttcgcccacacgactcctggggcaattccatttttatacactgaacgtacagcccacgctgatgaagagaaactaggggagaatgttcagatcccggtccctaggcctggcaagccccatagaccccacatcacatgtcgcaggttccccagctggaaagagccccactcagcccaggaatctgaaaggcaatgcgcctctgtaaccacgtgggggcccccgtccaaggcgccctccatcctcagcctcttaaggacttttaaatgtttatttttctctcgtttaaaaatactatccttgttattgaaaaataaaaacatgaattgggaaaataaaatgcgtaaaaacggcctgtgctctattaaagaaaactacttagtctatgttgacatttgtatgcttccaaactttcaaaactatagatacacatatacacggtatataatactacatatgatgtcatatattgttttaaagtgttaattttaaaacaaagacaggatcgttctggacaggctttttctcttaaaatatcatgaacatctgtccataccaatttcttccccaaaataatgttcaatgatggtattgcgttccattgctcatgccattaaaaaatatttactgtaataaacacatggtagaaaatgctaagtagcatctaccggtatattcctattgttcgaagtatttattccacttcaaacacagatggggatgagttacagctgccccccgaaaacagcccaaacctccaggcccaggacctcgggcggcagaagtgcctgttcggccgcgccggggcccagctgggcgagggggccacactgcccgcggtcaccggggagggccctgcctggaagcccctgcttgcccgcgggcgcggccaggcgggtcttatgagggggactctttcggtaaccgagtccctcggcctgggtcgcggggccagcgcagtgactgcgcgcgcacacgcggcagtcggggaaggggcgaggggtcggccaggggtcgcggggtcagctcccgggcgcgggccaggcggggtcgcgcctgcagttcgcctccggagctgcaggtggggctgtgcggctgcctgcctccaggaagcctcatgtgccttcgtcggccgcgccggctcccaggatacagtgcggaccggccgggcgctaaaggcgttgacgcaactgcgggcggcgcagggcaggggcagtcagggagcagcggcggcagagacagggctgggcgggcgccgcctgcggagagcaccgggaggcgggccctgcgtggggccgcgcgcagcagcggcgacgactttatctgggccgcgggggacagcgcagggccatggaggaggcgg

SEQ ID NO: 39596 - DNA, 2300 bp, Homo sapien
ataatttaaataattggccatgcagcaaatttcatgttggtgaactgcttttagcgactgatggtccacaaatggggcaggaagcctagccaggaagtggacgtttgagtcaaagaggtgccaagaatctgcacagcttaaaacaaaggtgcatcttacttggatagagatttctttctacaggtgtttaagtttaaggcaggggtccccagtccctgggctatggaccagtaccagtcctggcctgttaggagctgggcagtgcagcaggaggtgagctgcgggcaagccagggaaagctttatctgtagttacagccactcccccttgctcgcattacccctgagctctgcctcctgtcagatctgcaggtgctggattctcataggagccagaaccctgttgtgaatgcgggatccaggttgcgggctccttaggagaatctaatgcctggtgatctgagttggaacagtttcatcccaaaacaacccccctcccagtccatgcaaaaattcccttccacaaaaccgggctctggcccaaaaggttggggacccctgatttagggggttttaacgtttagggatcccgggccggagggtgggcggtggagaggagctgggagcaggaacacattactgtaaggagcccgcctcacctcggcacggaggtgggacccggcctaaagcccaggaggcgacttaccctgagggctgtggcctgtagggctcttgaaaagttggacttttaagttttccctttccgcgaggtggggccttgtgatatcttcaaatccttgttcagcaggctgcgcacacgccggtcctgtgtctaaggtgtctcgggtatgaccgagggggctttgcccgagtgggcgtgcgcctttcctcggaggccgggacgaggggttgtcggcatcgtacccgagtccgtgatcatggccggcgcggctgcaagggccagccccgggcgactgggcgaggaattccctttccttccctccgatattgcccaggcagagcgctgtctgggccgcaaggtctggacggggcttccaaactcagagcagagtctcctctgcgtgggaccacagcctccccttcccctccaagcttctgtctggcacagcaggcttagccccgcaggcccccttccagcagccttctataaaaatgacggggtccttctccagacaggaaaaccaggctcgctgcgcctcgcccgcacccccggagcgctctcgcagcgcccgcccagaccaggccttcgaactcgtgaagcgcagggggaggcagaggagagtgggccgcgcttccttcccgcatcacacgtttatttgaggcctactatgtgccaggaacaactggggttaccaccccagcaaacaggcacgcaaaatgtgacacgaaggtaggtcatggctgcggcgagcgggggcgcgggcgaaagacgtgaggatgtacgggggcctggcagctgctctgtcccacccacgcccggccggaccctcgacccctttcactccaggtcgggtttccccgaccgcggcctctgggaaagatgggtccctcttcatccccaccatcagcccctggcacatgggacgcgctgagtggtggctgcgggaatgaatgagtgataagcggcgcgtacccgcgggcttgcacgcccacagccgccccggctggtctcggcgcgcaacctctacccgcagctgggggcggggacgaggggagggggcggggacgaggcccgagccaggtccgccccgccctgtctccgccccccgcttccgagccggcgccgcggcgccttctgggaagtgtagtccgcgtctgcgccggccggccgggccgccgaagccgggggctccgggcggaaacggcaccacccaccaagggatgcgaggcgctcggggcgggctcaacgaggccgggggcgggcccgggcgcgcccacccccgcccctccccctcggcccaggcccccggccccgccttctcctgcgcggacctgggccgccgccgacgagggtcgcgtgcgcccgcgccagggcccgcgccggaaaccgaggagtggcggggaggctgagcccggggatggcgcgccaggtaaggcaggcggacgcgcggacccctcggcgcagtgcggccccgaaggcggtagggcgagaaagagctgggacccccccgcaacttcgggatcggctgggtgaggctgggcaggcctgatgctcaggggttcgtgccgggaagttcaggtcctcggacaacctctctccagctctccgccgccggtacc

SEQ ID NO: 39597 - DNA, 2300 bp, Homo sapien
tcccgccccgatcactgagcactttgtacacagaaagtctccggcagtttctaacatgcaggcccacggccagcagcattgacctacctgtgtgcactggtctgatccttagaccgtctcatcacagcaaccctaactgcagagcagggcaaggggagctcctaggatttctctggggtctcattttatttttaaaacttctcacaaattttgcatgtctgtttttataaaaaagtacttcaaatttatatggaataaaattggcactcccaaagagcataccccatttagctgtggtttcatctggtgttcaggggtcgtcgggcacacttgctctggggttctgtgtgccctgtgtgtgccctggtttgagaagcgtgagtgtgagattgtggcctacatgtcaaggctgccggcatcacttcctgagccaaattccgaggctgggctcagggggaagggtctgggagtgttcacagtgaaccaacagtcttgctgtttccagttaaaccagaaagaaacggtaaaggccctcagcccacctcgaacagggacttgggtggctggagagggctgtcctctatgggaaccagatctggtgtgattttccagagtctggagctggggctagaaaggccctcttgtcttctcctgcaacagaaactgccgacaaaccgtggcctacaaggaaggaaggcccaggagccctgggcggggagcccagccctcccacccatagccccagcaggaggaagagccacagaggacaggagagagggacctcagaggccggtgagaggcgggctttccttagtggggtagcgatggggaagtgtgtttagttcacacgaggaggtcatgctgctccgccgcctgggcctggtggcagctccaccgggcaggccttgtctgcattctcacgggtgggaatctcagccgcccggagacctgaatgcctgccagcgctcccggtgtcccgtcaggactgcactgacccaggcccaccttgcatgtgccacaggaatttctcctgggaacagccccttgcaaggcctcatcaactgtctgaaggaaatccttgtgcctgggccccggcaccccgagacatccccaagcttcttgccacctctccctagcctgggcacgtccaggctaaccagagcagacctggggcctgggagcccgccctgggcaggtgagttctggggcctcaggctgaggtctctgaagcttggtttgcatttcaacagcgattcctcctgctccaaactgtctcccttagggatcgttaccagcttggtcgctgctgtgttgccagtgtcacctttctggagccaggtggctctcttaagggcagcgtttggtcagctgggaaaaggaaactcggaagcaggctttgccctggtttcttcatgtctcttcctcctcctgacttgggacccgaggggaagagctgcagagctcatgtgttgctttgcattgacgccaggcatgatgcatggggtgggcttgggctctggacagcatggtggaggggccggggcacaggtcttggagtcagacccggagaggctcctgatgccttgagcctaggctgttcccactcacagggccgcagtgagcttagctgcagtaatgtacttactgtacaactccattttcctcaaatgtaagttctgttcaggaccccagagctgtctcaaacagtgaccctgacagcccacttccttcaatttgtcctcagagtgatgccacttgtctgcctgcagggcgaattccatggcttccctctttgccctgtccggttctggcaggtgtgtggacccaggcactgggaagactcagcgagccactggaagagcctcatcttcagagttggccccacgcccttctaacttgtcccctgtttgttgtttgtcatgaaggctgaggacactgagctccaggtgaaaacatgttcctttttccttagtgaagaccgaggcggtttcaggggattgtcccctccagggtctgctacactgtctgaaggagctccccgaggcccaggacaggcatcccagtccctcaggagtggggaaccgacggctacaggagaatccaggagcctggaaaaggggttctggaggtaaaggcttctcgctgggctgggagggcccccagacatcctacattaccctgccccaggcagggctgtaggtggcccccaccacaaacactcaggcccccatattggcctgtcgggaagaggatccggatgcgggggatccccactgtgtaagtggagcgagctgtgtggg

SEQ ID NO: 39598 - DNA, 2300 bp, Homo sapien
ctgtaggtcagcctccttttctgtagcacggggtgtctgaatgcctggaacatggtggaggctgcgctctagaccatatgtgcacttgagcactcacagagcacagtcatatttacatctatgccatctcttccttctgtcctttttgactcaactcaaagggactgaggttgatacctgtccctgtccatgtggtgagagaccctgtccttcctgagcaggttgggaaaagtctcttgggcaggctgggaaggggaacagcccccgcctctgattacttgttctgtactggatgctttacttggacccatccttctgcctgtaacaggattctctgtgggacagccagagatggccccccaaagtgagcccagggaaggatcccataatgcccaggagcagatgtcctcttctagggaagagagagcactgggggtgtgctcaggtaggtaacaggaaccctggaaaggctcagggaggagtccccctgctttcctcctgccctccctacctctctcccttcttccctcccccctccctccctcccttccttctttccttccttccttccattcatcaaatatttattgagcacctattatgtgtgggatgctattctaaacatttggaatacctcagtgaccaaatagtcaaagatccctaccttcaagagcttaatcctaatgagtgcagagagtcagcaaacaataaataaggaaatttctaaactatgttcaaaggtgataagagctctgggggagaggataatgtccagtgaagcaggttgaagggggccgagacagctgcaggtgggggtgggtggggcatgttataggattaaatagggtgaggagactgggtttctttgggaaggtaagatttgtgcaggatttgaaggagcttggggaagccgggcatggtggcttatgcctgtattctcagccctttgggaggccaaggtggaaggattgcttgagccccattcgagaccagcctaggcaacatggcaagaccctgtctccacaaaaaattaaaagttagctggatgtggtggctcatgcctgtgttcccagctacttgggaggctggggcaggaggatcccttgaagcccaggctgcagtgaggtatgatcgtgccactgcactccagcctgggtgacagagaggacctttctctaaaaaaagaaaaataaaagaggtgaaggcggcagctcagcagatttgggaaaagtgcttcaggcaggagtacagccaggacagagcactaaggcaggaatgtgcctggcttttgacatcctgattctccccagtgatttgcttggaaccagggtccatctgggggctgggaagtccccagcccttctcctaggggcatcaggtcaggggacttccttgcttccactgtcttacatacacatattccaggaactcttcacagtggtggctcttgtaaccttgtagtccatctcattacatacccttagcagccgccctgcttgaaggagtctgaggcagccccagggaagctgggaactcagccccttaattcaggtaggatgtgggaggaaccctgtgggccctgctggagccagggtttcaaatgctcctgcttcccagcaccagtggggccctttggccatctgtgatgtctccagagtccttgaggtatcctattctctgccagggcacgaggcccctacaccggaggaaggtgcccacacagaacaagccgaggctccctgcagaggccaggcgtgctcagcacagaaggctcagcctgtgggtacctgcccaggtgagtcttcccatcacttcatcccaccacgggctcaggccaagggaacggggcccagcaagctccggagctgctatctcatgaggcaggtaatcccccaagacaggcagtccaggcccttctaacccaagttgagttcaggccctggcacctttctgctgtggagcttcaatgccgaaagggaatttcacatctgtagatggcaggagtcagagaggctggtcaccaaagagaaacacagcctcccctcaaatgccttctagaaatcctacctccccctctttatttctcccagtctaagtctaattacagttgccatgaagatacatggctttgatcaacattttcactgcctctcccctgacatgccgccttccccagcttccactgatcgtgagggtacccagatgctccacatctgctgtattcaactcatctcctcatacccagggtgatcaaactgctcactctctctcaacaatcccaccatgacttccttccactg

SEQ ID NO: 39599 - DNA, 2300 bp, Homo sapien
ggagggcggcggggcagggaggtggagctgagggtcccgtcgggaggaaaacttgggaggggtgagaagtccgaggggagcagaaatagggagggggcgccgcggcggagaagagaggcgcggaggggtgttcggaggggagacggagtggggagggcagggcccgcgggaaggtcccgagagagcgggtcagccctagacccccaggcttgggggccggaggacccgggagctgggaagcagcctgggaggggggaggggaagagcggttctggggactggggacggggagggaagcgaagctggagcctgctggggagacagagggggaagggaggcgggggcctcggaggggaaggagagctgcagaagggaggggggagggggagggcggtggggagacgtgggggagggctggaaagggggaggggaagggaaccgaggtgaggcgaggaaaggagaaggaagggaaaccggggtgggggaggagaggagggaggggagaggagaactgggttggggaaaagagctgagaggaggagggcgggggttggcgaggaaggaaaagaggagggggaaaggaagggagagggtgtgcagccggggagggagatggagcgggggagaaccgggagggtagggaaaggcagcctggagtctgagagggggaggggagcgctgccgccgaggcggcccggagcgtagggtcaggggaggcggtggcagcggagggccgacccggacggggcctcgaggggttggccctgccgggctcgggcgggcggagcctgaggggcggggccgggggcggagccgaggcgccggcccgattcgcaggggagagagggcggaaggcagagggagcgggaggggcggggcagagggaaggctgccggggagatgggggaggggagtctgctgggggaggggcgggggagccgcggaaggcggagcagggaaggggcagcaggggcggtgtccgggccttgggcagcccggcacgggtgagaggtggttttgtggtaggggtttaggaagaggcgatcattttctagctacaagaggatcctctcgaggacctccccaagcagtacccctaaagtgacactcactcccgcccctgggctggctcctatttcaccagctcgggcagtgacagctggaggacctgggagatgaagtttcccactccccaccctgggctcccaccctcaagcctctccccagagaatcgaatcttgcctgcactttcccaggcaaggacgctggggcgtggagttgcggtgctgatgggccggggttggcggtgacagacctgccaggtgagggggtggcgcggctggtttccagagctgacagaaatcgtttcaaggccttcttgggccaccttcaaagatctcttggcttggctttctaaacccagtttcccaaatttcccccagctgtacctggggatgtcacctttggagctcctggaagagcccatagggagaggttgggcagagccagggcccaggtggaagctggcgtgggaaaaatctgaacaaggctgtcttttctccataggttctgtggcctgatccccaggaggagctactctgggttaccatgagagagaccttggaggccctcagctccctgggtgagctggcagaaatgaagggacttggggaaaagcttaggaggattcaggggcatctacaactcagacagcagagccaccctcaggaggctgcaaccctgaggccccaggggcctgtaggtcagcctccttttctgtagcacggggtgtctgaatgcctggaacatggtggaggctgcgctctagaccatatgtgcacttgagcactcacagagcacagtcatatttacatctatgccatctcttccttctgtcctttttgactcaactcaaagggactgaggttgatacctgtccctgtccatgtggtgagagaccctgtccttcctgagcaggttgggaaaagtctcttgggcaggctgggaaggggaacagcccccgcctctgattacttgttctgtactggatgctttacttggacccatccttctgcctgtaacaggattctctgtgggacagccagagatggccccccaaagtgagcccagggaaggatcccataatgcccaggagcagatgtcctcttctagggaagagagagcactgggggtgtgctcaggtaggtaacaggaaccctggaaaggctcagggaggagtccccctgctttcctcctgccctccctacctctctcccttcttccctcccccctccctccct

SEQ ID NO: 39600 - DNA, 2300 bp, Homo sapien
atgcgtgggcaacatgtacccttttctccagggtccagtttcttgctggggatgattatgtgtggctggttgggcccaccctgtctccttcttcgagggtctcctagagtctctggggtctagaactggggagcctatgctgaggaatgagaggaccctctggaaggagtgggcgggggagccagctcccccagccctggggcagagctaagccggatgaaataatccgagaatccggctgggaggggcagtgacaggctccacaggggaatccggggtccaccctggtcccagcagagctctgagcacacccggacacccgggctggaatgcagcctggctccgactccacacccctcggtctcctaaacctgatatccctccgagtatcctgtagagtcattccacctaggggaggaagggggctgctgttaaccagagctgggccgggctctccttctcctgggttcaccattggtcccagggccaaaaaagggcccagagtgagtctctcagggggtcacggatgactgggatcaactcctgctctggagtcctcagaaagagccacacgcacacccagacacccccctttcctgttttacacacatgcacactctcactgtaagtctcacaacaccggcacaggtgctcggccacaccccagcacgcacagtgacacatgctactccaggtgctcccttcatcctggaggcagaggagccttcacagctgagcccgagtgatgggcgctcttccaggcactcatccttgtggtgggctgtggtagcaggagctcaagggccattcacaccctccccttcccagcctcactcagctctggattcaaaccggggctgatcaggcagcactgggattgggaagagacccgagttgcagtcaccctttcccgtaaaggggcagaagggaggaagctggaacccaggggtttggagaaagttcatggagaggagaccgggaactaacagtccagacttcagcatctccggagctttcaggagtgggcgcagcgggaacaaggccaaggagaaacctcgtaacctgggcagggagggcgagtggagtcccctgaggagctggggctgagggctgagggctgagggctgccctccacatctaactccaggtggtgtccgggccagcaggccccccagcaatcgtctcccgcccatagagccctcccctctctgcagccccctcccagaccctcccccggaccccgccctcagaatctccgcccagccccgtcccagccttgccccctggagctcccgacctggcccggccttctcccaggggacctggcttaaagtcctctccccagtttctacttcgaaggacccgttctcgcaagcacaggggcccagccctctctcccgcctgcccccacggctcccgcggctggtttcgaatcgggtcctcgggactccaggcgaggggctgcgggtctgggtggatcggggtggaatccgggtggagaatgggggcggggccggagtttcccagaccgaccccccgggccgtcctcccgcgggagcgcggcgctgcacacccggctggcaccggcgacttagagacggcagcgcacgactcgctggctcccccccgacacggcccctcctcgttcccccaactcctccccgccacccccccacccgttcgcgctccacctttccccggctcctccctccgcggccgcgagcaccctcccttggcacccttccccgcagcccgagtgcctgtcctccccagcctcctcgccctcctccaccccctctcccatcaccctcccctcccctcccctcccctcccccgtcctgagctcccacttccacacctactccaggctcggagccttaggaccatcacctgcccacctaagcccacggtgctccctcctgggaccccactcctgaaaccccctgcccctgcctcccccagcccggtgcgccggggctctccgcccgctccctcggtccctcctcccttgcaggcgccgtttcccggcttcgactccccgcgcgtctatccctctcctccccgcgaagtttcggggctgtcagtctgtcagtctttcaggccgtcagcacccgagctgcaggcggcgagcgccattgtgagcagagccggcggggcaggaggcccgggcgcctgggtccccgcggcgcgggcggagcggccggccagccaggtaagggccggggaggctcctctgcaggcggccccgcccgcgtctccctcagcgccgcggttgggtcacggccggctccgcgcaggtg

SEQ ID NO: 39601 - DNA, 2300 bp, Homo sapien
tagttcccggtctcctctccatgaactttctccaaacccctgggttccagcttcctcccttctgcccctttacgggaaagggtgactgcaactcgggtctcttcccaatcccagtgctgcctgatcagccccggtttgaatccagagctgagtgaggctgggaaggggagggtgtgaatggcccttgagctcctgctaccacagcccaccacaaggatgagtgcctggaagagcgcccatcactcgggctcagctgtgaaggctcctctgcctccaggatgaagggagcacctggagtagcatgtgtcactgtgcgtgctggggtgtggccgagcacctgtgccggtgttgtgagacttacagtgagagtgtgcatgtgtgtaaaacaggaaaggggggtgtctgggtgtgcgtgtggctctttctgaggactccagagcaggagttgatcccagtcatccgtgaccccctgagagactcactctgggcccttttttggccctgggaccaatggtgaacccaggagaaggagagcccggcccagctctggttaacagcagcccccttcctcccctaggtggaatgactctacaggatactcggagggatatcaggtttaggagaccgaggggtgtggagtcggagccaggctgcattccagcccgggtgtccgggtgtgctcagagctctgctgggaccagggtggaccccggattcccctgtggagcctgtcactgcccctcccagccggattctcggattatttcatccggcttagctctgccccagggctgggggagctggctcccccgcccactccttccagagggtcctctcattcctcagcataggctccccagttctagaccccagagactctaggagaccctcgaagaaggagacagggtgggcccaaccagccacacataatcatccccagcaagaaactggaccctggagaaaagggtacatgttgcccacgcatctccacacactcaggaaccccagctaccctagaagtgctcccactcactgcccccgactcctcagtttgggcaagagaggggcgggaggcaggggagcatcatccaggcagaagttcaaggctggaagaccccatcagtcgtttagcccaggagctcttaaccttttcatggggtcatggccctcttgagaatctaataaaagtatagaactgtcttcagaaaaatgtgcacatacaatttcaaagaattactggagtctgagacctatttgtgcatccctgggaagtccctgaaatttttactgggaaggaaattgaggcccagaaatggagggtggcttgcccagagccccatgttaatttgtggtagtgcctgagagtgtgaaaatacacacacacacacacacacacacacacacacacacacacacacacaaagggaaacagatgcactggaaggggacaggaaggagactgtttccagggagagctggcctctgaggggctggtgtggcaggtccaatccggttgtgggcagctggtgccctggggcatgagactggaataaagccccccacagcccccagaactggccactgggctgcggggaggctgcgtggggcaggagagagcaccgctggcctctctgccctctctgcagcattgcctctcttgagcccaagcctcacgttccccaaaggtgccctgggggtgagggcaccatgctactccctgccctcctctttgggatggcgtgggccctggctgacgggtaagcagcccaccctggacccctctgacaagggtcctccttctgccgcatgcccagggaccctctggggcatcagactccgtgccccccacccccgggatcctccctccacccccgccacttcccatgagtgtctctccctaccttagcatcctccttacttcaataaccacccctgggagtggtgtcataggacagggcttttggtgacagagggaatggtggcagcagctgtggttccccatcatgggcaggcggtggtgtgagtggacagagaccatccgtgtggaggaggaagtggcaccccgtcaggaggacctggtaccctgtgccagcctcgaccattacagccgcctgggctggcggctggacctgccctggagtggccgctcggggcttacccggtccccagcgcctgggctctgtcctatctacaagtgagtaagggtgagagcctgggctgtctgccaggcaggaaaggagtgacaggccggacatcctgagagtggggaggctctggaggaagcaggcatttgggaagta

SEQ ID NO: 39602 - DNA, 2300 bp, Homo sapien
cgttgggcaaggataccctgagcatgtctgttgtctgtgccaaggcccaaggatccaccctggccaccccaacccacaggagagctcctcctttcagctttcccacccccgaggtgggaaagagccaccagccctgtcacaatttttggaggctttgacagtggcacttttaggagcggctgtggcactcgtgggtggtggatggagccagcggctgtagctgagcctgtgcctcctcccgtcacccccaagcttcagctccttctttaattggccctcaacagccccatggcatgggttcccccggggctcccctcctctatccccacccatcctctgggtggacacaaaagaggctccaggtgacattattggcttttgagacccacaaatttagtccagctccacaaacatttactgggtaccgggtaggtgctgagaactcacaggaggtgagaggaactcactgtctacctagaatgtcccaattccagagtcttcccgagtctcccgtgtttcagtgagcaccagtgtgggggatgggatgggtcctgtagctttatggaggtagggagtccccagtagggcagagggagggtttctgagccctgggccctcctgactctgggccctccatctgctcagaggccggctgcccagcaggcatggaggtggtcacctgtgccaaccgctgcccccgccgctgctcagacctccaggagggaattgtgtgtcaggacgaccaggtctgccagaagggctgccgctgcccaaagggtaggtgctgccctatccttcaggagtgtcagggtggctgagtgggaaggtgtgggtggggccaggggtgcaagctccagcccttgccccacagggtccctggagcaggatggtggctgcgtgccaattgggcactgtgactgcaccgatgcccagggccacagctgggccccggggagccagcaccaggatgcctgcaacaactgctcatgccaagctgggcagctctcctgcacggctcagccctgcccgcctcccacccactgtgcctggagccactggtcggcctggagtccctgcagccactcatgcgggcccagagggcagcagagccgcttccggtacggggctggcagggctagatgtcccttctgccacccagggcctcactctgcaaggcgcagtctcccttctgacagagttcctgggtcctgctctcaccagcgacagcaccaccccaggccctgggccagctctgtccctggttaccctggcttttcctcagctacccccatgcccaccctgaggtgtcccgtcagggtgtctcatcaggagacagagaagggatgacgggcctgagctatctctcacctcctctgccctggccccacccaggtcctccacgtcgggctcgtgggccccagagtgtcgggaggagcagtcccagagccagccctgccctcagccctcgtgcccacccctgtgcctgcagggcactcgctcccgcaccctgggggacagctggctgcagggggagtgccagcggtggtgagtgcagggcagggaggggggctggaaccgccctgctggagagcagagtcctgagtcccggctctttcccagctcctgcaccccggagggtgtgatctgcgaagatacggagtgtgcaggtctgggctgcctccggatccccgcctcagccacccttctagcctcatgccttgcctgccatgtgctctgtgtctcattttctcccaccttacttaactgccactcccttggccaccatgcaggtccccacccagtcctttggcctttgctccctccgcctcctctgacctcacctgtgccctcccacagtgcctgaggcttggacgctgtggtcctcctggtccgactgccctgtctcctgtggaggtggaaaccaggtccgaacccgggcctgcagggccgcagcccctcaccacaggagcccaccctgcctgggccctgacacccagaccaggcagcagccttgcccagggctgctggaggcctgctcctggggcccgtgggggccctgttcccgcagctgcggcccgggcctggcctctcgctctgggtcctgcccctgcctgatggccaaggccgaccccacctgcaacagcaccttcctccacctggacacccagggctgctactcagggccctgcccaggtgagtgttcaggggaagtgaaatcacctctctacttttcctaccttgggagattcagaaaataaatgttcctagttcccggatcatcccttaaaataagcctgccc

SEQ ID NO: 39603 - DNA, 2300 bp, Homo sapien
tcctccacctggacacccagggctgctactcagggccctgcccaggtgagtgttcaggggaagtgaaatcacctctctacttttcctaccttgggagattcagaaaataaatgttcctagttcccggatcatcccttaaaataagcctgccctgtctgtgcccccatgttttgctcagttcctttcctcttcccaccatctcttccctcggggccctccttgtagggtgagagggcgtccagccagctgggcctttcaggcccctcttgcctgtttcctgtgcagggtctcggcagggctggggtgagagggagggcaggcaggggagaggtgggctgacacacccctccggtccctagaggagtgtgtgtggagcagctggagcagctggacgcgctgctcttgccgggtgctggtgcagcagcgctaccgacaccagggcccggcgtcccgaggggccagggcaggcgccccctgcacgcggctggatggccacttccggccttgccttatcagcaactgctctggtgaggctccagcagcaagttaaccagggagctgcgcagggcagcagccaccaagggtccctgctggaactccctgctcccctcccctcacagccaatgtagtgccccaagacctcagagcagctgcctgcgcccgtgcctgccctcaaacccagctgctcccctgctccccccagatactccctcatcacagctgcgaccccaatccctcaccacaatttgtccaccctgcagctgccggcccgcctgtggctttggcccatgtagctgccctctaggagggtgtcttacccagctcctgctgcggctgccctccatctctgcccctctgtctcccatctctgcccctctgtctcccatctgccaatttctggagcacctgccaaggcccctcactcctgcagccccctcctcagctgcctcctccaggcatcttcctggctctccaaggcccaacccatcctgatccttccctggaggtgcccacaggtgctgagtggatgccagatgggggatactggtctgttccaacttgcggagggtgggcatcttgtactctcaccaggtgaccccaagggcctcagtagagccacgcggcatgtgctctgggctttgggagtgatgtctctgggctgttcccccacaagcctgcctctcccccatctcccccagaggacagctgcacgcctccctttgagttccatgcctgcggctccccctgtgctgggctctgtgccacacacctgagccatcagctctgccaggacctgccaccctgccagccgggctgctactgccccaaggtgagagctgggagctggagcaacttccaaggagaagggggtcttctgcccacactcctgctcctccttctttctgtgatgtccatggcggccccacctccttcaaaccccttggaactcggtgcctcctcccagcttgccattcactcggcatcatgcatatgcacctgctgcaggcggggcacagtgctgggtgctgggatgacacgatgatcactgccccatctctccttccacccaggggctgctggagcaggctgggggctgcattcccccagaggagtgtaactgctggcatacctcagcagcaggagccgggatgaccctggcccctggggaccgcctgcagctgggctgtaaggagtggtgagtgatggtggaagggagacagagggctggggccagggaatagggcagggaggcctggggggcccagtccagcctcaggacagaggaccctgagatgctagagtttgcagctccctcatcttgccccaaatgtgcctaggggtcaggttacccttgcatgaccacccccaccccccggaggtcctggactgggtcctgcctcccttagtctaccctgactaccccctcccacagtgaatgccggcgtggggagctgcactgcaccagccagggctgtcaaggtaaccctgacctatggagacaacagtccccattgcttgggactgggggagtttctgggatgcagaactttcagtgctaagacggggacagtcccaggcaaactgggatggtgggtcaccttaccctgcccccacaccaccctcagcctttctgtttccagcacttcctggtcatgaccctgagcccctcctgcctgtccaccagggtctctgggcccaggggtggtcactgggaagggcacccacaccctgtccttccaggtcttctgcctctgagtgagtggtccgagtggtcgccctgtgggccctgcctgccgccc

SEQ ID NO: 39604 - DNA, 2300 bp, Homo sapien
ttcgagaccagcctggccaacatggtgaaatcctgtctctactaaaaatacaaaaattagcagggtgtgatggtgcacgcctgtagtcccagctactcaggaggctgacacaggggaattgtttgaacctgggaggtggaggttgcagtgagccaagattgagccactgcactccagcctgggtgacagagagagactccatctcaaaaaaaaaaaaaaaaaaaaaagtgttcctatccctaggaagggccctcgataccctgttcctagaccctcctgatttctcaaggacttggttccttgcactatccccctttgaatcatcagtttccttcccatcaacacagaaacaagatcttgtgactcatatcttagtcctactgctttgattccccatttccccctagatactgctccatttttcttggaaagatggaaaaccttttatggaaaaatgtgtcaaaagaatgatttaccctagctgtcctccagttttttaacccctaaaagagaatctgttataaagacatggataactcatgggcagaaatatagctcttcaaggtagtgatatagtcgaggtggtgagtggcaggccacttggaatccacagagtcctcactctctgccttctcctccacatttcttgtgtctcattctttttttcagtaatgcagactcccctacactcctcgaacggaatttaggtctattcaaccttggccagaagagcagagctggataatggaaaacgcttacttgaagcctgtgtaacatggtgaaaccctgtctctactaaaaatacaaaaaaattagttgaccattgtcttaatctctatgtgcttctgtaacaaaatccctggaactaggtaatttataaattatggatacttatttcttatgattctggaggctgggaaatccaagatcaaagcaccagcagtgtctgtgtctggtgagagcctggtctctgcttccaggagggcacctttttgctctgtcctcacatggcagaaggcagaggggcagaagggcaaagggcctagctagttcccccagcacgcatgtggtcactaacaccttcatgaaggcacatccctgccctggccccctaaaagtcttttttttttttgagacatggtcttgctctgtcacccaggctggagtgcagaagcgccatcccggcttactgcagcctcgaccacccaggctcaagtgatccttccacctcacaaaattattttatttttatagagatgggatctctcactgtgttgcacaggctggtctcaaactactgggctcaagtgatcctcctgtctcagcctcccaaagagttgggattagaggtgtgagccaccgcacttggacaaaacttcttataaggacactaatcccaccataagggcctgaccctcacgacttcatctaaacctcccaaacgccccatctcctgggaggggaacaccggtcagtccattgcacctcctttacctggcagaccctacctcttgctttaattctgctgaggcatcacttccgcaggaaatccttgactaagcacctcatatcccccaccgcttcactctaaggtgacaacgcgggctttaattcatgttttgtgcttacctctttcatagcccttgtctctgttttgtaattatctgtttctggtctgattccctaatagatcgtgagttccttgaaggcaaggcctttgtctcattcaactgtgttctcccaaaccctagaacacggcctgacccatggtaggcaaccaatgatactttttgagtgaatagaacaaaaagtattgccctccttaataaaagaaaacctagaacttcaaggctgacattggccttcgcgtagcccaatcagagcgctttgcccttgctgcagaggactaaaggacgccacgccgccgttgcctagtaactgtcgccggagggaggcggggagggtcgcaagcgcgccgccggcgtccaatcaggacctgcgttccgggagccaatagcagcttcgagagccgctcacctagagcggactacacttcccgtcacgccccgccgcctggggctgggcagtgaccgtaaagctgttcgctcggtgcgacgcaagtctcagctcagcgcgcttatcctgggtccaccggcgctaccgccccccgacgtgagagagcgaagttcttgggccgcgctccctccctacctgggtgccctccccctccgggagcctgggtccccggggcggtcgcggcggctgcatcctcaggccaggccgcggggggagggggcggc

SEQ ID NO: 39605 - DNA, 2300 bp, Homo sapien
ctggaactcctccaaacactttctgaactccctacccctcagagcccctttacaagccacacgggatgtagatctcagccccaaagcattgcctgttttcatcatcgacttcattcacagacatagttctaaatgactttcagctatttctagaaattagacacatcttcctaagcgaaggtttaccatgtttaaggttccatgaaagaatgtgccctaagttgttgcccagcccctggctgagaagaaacgggcgtgtgggaggcgggtgaagagcacacagggaggggacggagaagctcctgagccagcctccttcatggctcagtttcatttcagtgcgtggcacttcccagaagaaacgagtctcgttgtcactgtgatctgtacccaggtggggagagatggggtgtgggccatgcatgtaaattgacaacacccctccccgtgtagggtgccctcaggtggtcaggaacacttttggaagataaatctaaggaagagagtggtacttagcagctgtcattttcctttcaggctcctgtgacgtttgatgacatcactgtgtacttactccaggaggaatgggtgctgctgagccagcaacagaaggagctctgtggttccaacaagctggtggcaccactgggtatgggtgcccatccacatccctgccactgtcaatttagatcggcattcccaacctcatctgcgtcaggaacactggagagagttttctggaatccaagcatttgtctaggcatctttactccacctgtctgctcgatcccgtatctaccttaattgcatgcaaattcacacatcaccctttctcttctccccttaaaatggtcaagagaagtggggcaatctggcaggcctgggctagactcctgggtctgtctcctggtgcctcagaatgccccaaggggccgggagggaaactcggaaactaggcctgtggatctgtggagcccgtaggacactggaggtaggaagcagtggtggcaagagcatcacatttgtgatgtggaaatctggtctcaatcccagctctccactggatacttgaatgcccttggcctttttaagcctgaatttccatcgtcttagagatgagtgagataaaacagtttaagagtttgcacaagtgtaggtattttcatctcatctatttttgaatgctctttcctttgattctttgggtagactttctgtgcgaaggacagaggtggttggttgtatttcaacatgtgtgtacacatatgcactgtttgctgattgcaagttgatgactgtctaccatgcctgtcttttcttatttcatcttggcccctgtgtaaggcacggtagaagcaacaatcagcattttatgggtggaaggattgcagctggggtgagtcttcctgtgccggctaaaagagtttgaaaaccactgattcttccaaacaagaagttgcaaaatagcagctcatgggccagatatggctcactgcttggagttttgttttgctttgttttttggctttcatttcttttgtttggcttcttaaaaatattaagtaaattgccaatatttagttattaggagttttcacataagaatatggatttctggcatctcttgacaaacgggatggtgtggcagggctgagcctgcatcctgagtggcagcccttctgcagctgagtagctgctgttcccttacgtcttgcaggttgccacagcccctgcacttggcctggtttcttctgttatattaccaggctggcccctctcagtatttgggtttctgacccatagtttgtatacctgtttagcctccttgtgccctcattcctttctcctagtctcctattctattaggggcctcacagataagagtttctaaaccactgaaccactgtgctgaaccaccaagactcctactttcctccttggccccttatctcaccatgccgagagatgtcgcagacagatacctccttcgtgttgtgacccggagccaggtcttcatagtgcttttctctctctctcgctctcttttttttttttggactcaggaccaactgttgccaatcctgagctgttccgcaagttcggacgagggccagagccatggcttggcagcgtccagggccagaggagccttctggagcatcacccaggtgagtgtggaactgcactcaggggcagatgcttggctggagagggagcatgggcagccccaggactccaggctcatcctctgcccttcctgttctccaccaactgacactgctgttctcctcccaggtgcc

SEQ ID NO: 39606 - DNA, 2300 bp, Homo sapien
gccttatttgcaaagacagagacatctggagctgttgttctcacctccgacacgtgccccgtctgcagagagcattaggatgcatctgtggctctgaggtgtgatttcctagggccttcaagtgtcctggggctcctgttcatttgcactgggggacactcagggaagttttaaagagcctctttcagtggctccttctccttctaccctttctaggaattcatcagccccatgaaaagatgaacgatagagatgtcaccaacatcaggaccccactccctgggagatgtcatggaaacttgtcaatcacacccaaagcactcactgaggagccatggcagagcagtcggtggcgccaataccaaccagaagccgccagggcagaggggaaccgtgaagccagtggaatgcacagctccacctcaggggaccggggtaggcggggctgtgtctggtaacatgccctttgcctcacattagtgcctctgaaaatagtgtcctcagcctgggcacaaaccctaggggtgagctgggagtgtggaggagacgctggattagggagaagtctcggccatgtgttctggctcttttactgatgagctgtgtgggcctaggcaagttacttcacttctctgggcctcagttttatcacctgtaaagtgataggattgccttagcctctaagatccctttcagctaaaaacaaagttctagaaaataaatatgtggtactgtggaactctggggagctgtttgatcaggtgaacagtttacccatggaaatggggctccagcacaaagctgctcacatcttccagtcacgctccagggaacagccagggcttgtgggcccagatgaggctttagtggttggagaaggagccagttcctggttttaatcccttcatggacctcagaccatcacaaagctgccaaacaaatgacacaggcaatcacatgcaaattaggacagaaatgaaacatcaaagacattaaaggaaaagagtaagagctgcaggctgctaatatgagtggctgctcagactcagcaatgtttttggttctggccaaagccaagacaaaggagcagaggcaaagaaggaaatacatttcactttacagctgtcattttctacagaggatttttttttttccagaacaaaattcaaaaagtccgtcttttttgagctatagaactttcgtggtgattttttttttttttttttttttgagacggagtctcactctgtcccccaggctggagtgcaggggcacaatctcggctcactgcaagtgcaagctctgcctcccgggttcacgccattctcctttcagcctccaaagtagctaggactacaggtgcccgccaccatgcccagctaatttttttatatttttagtagagacggggtttcaccgtgttagccaggatggtctcgatctcctgacctcgtgatccgcccgcctctgcctcccatagtgctgggattacaggtgtgagccactgcgctcagccctcgtggtgattttttgaaggcctgtatggacatactcttaactctatctcctggatgccaagtgcacccttatcctaggccagtgttctcaacaatgtacacactctggatgagaaaaataaccattgtttacaatccagctaaaatctcacctcctccagggagtcttcctggatttctccaccctctgaattctcataatgggcatttggctactttgatcacagggctcttagaactgcgctgtccagcattatgattttaccagaatatatcactcctcaactactttagaaacccctcgaaggctaggatggtattttatacctaacagtttggtgtcatcccacgcccacctccaacttacatgaatgttggaaggatggatagggaggtttcaactagagaacggagaagggcggatgtaactggttcttgatttcagaaaacagccaggagcacacatggctgacggggtcagtgcaaggacaggcacatttcccttctgcatcacgtggggactgcgcctccctatgtcatgaagccagggaatatgtgtggccggccgcttggggtagcacttgttgctagagataccgcctggaggccactgatctgtaaaagggatctctacagaagatagggatttttgatcgccagagaagaagggatatgtgagatccaaacgccgaaggaggaaagcaggctccgtggtctcttccagccctgatggaagaaactaccgagccttattatactaggtgctttccacatgcctattca

SEQ ID NO: 39607 - DNA, 2300 bp, Homo sapien
agagctgcaggctgctaatatgagtggctgctcagactcagcaatgtttttggttctggccaaagccaagacaaaggagcagaggcaaagaaggaaatacatttcactttacagctgtcattttctacagaggatttttttttttccagaacaaaattcaaaaagtccgtcttttttgagctatagaactttcgtggtgattttttttttttttttttttttgagacggagtctcactctgtcccccaggctggagtgcaggggcacaatctcggctcactgcaagtgcaagctctgcctcccgggttcacgccattctcctttcagcctccaaagtagctaggactacaggtgcccgccaccatgcccagctaatttttttatatttttagtagagacggggtttcaccgtgttagccaggatggtctcgatctcctgacctcgtgatccgcccgcctctgcctcccatagtgctgggattacaggtgtgagccactgcgctcagccctcgtggtgattttttgaaggcctgtatggacatactcttaactctatctcctggatgccaagtgcacccttatcctaggccagtgttctcaacaatgtacacactctggatgagaaaaataaccattgtttacaatccagctaaaatctcacctcctccagggagtcttcctggatttctccaccctctgaattctcataatgggcatttggctactttgatcacagggctcttagaactgcgctgtccagcattatgattttaccagaatatatcactcctcaactactttagaaacccctcgaaggctaggatggtattttatacctaacagtttggtgtcatcccacgcccacctccaacttacatgaatgttggaaggatggatagggaggtttcaactagagaacggagaagggcggatgtaactggttcttgatttcagaaaacagccaggagcacacatggctgacggggtcagtgcaaggacaggcacatttcccttctgcatcacgtggggactgcgcctccctatgtcatgaagccagggaatatgtgtggccggccgcttggggtagcacttgttgctagagataccgcctggaggccactgatctgtaaaagggatctctacagaagatagggatttttgatcgccagagaagaagggatatgtgagatccaaacgccgaaggaggaaagcaggctccgtggtctcttccagccctgatggaagaaactaccgagccttattatactaggtgctttccacatgcctattcatttaatcctccagcaaccttgtaagaagggccatcccattttatatttaaacaaaccttaactactgacgcaaggagtcaaggatctaatcccaaagcctctgcctggttcgctgcagatggatgtccgcgaggacgccagccctccgcctcccgccgggtccctgaacgccggcccggccggtccaacctcattccgcttcccgccatcgaaacgcgaagcccccgccttcccccaaacgtctcagcgccgctggggcctttctggctgcgccgcctccgaccccaggccccggtccgcgcccgccgctcgctagtcctgggagtgaggagaacgcgtgctgaggacccggccagagggacagcggggaccgccctcccgctgcgtctctgaaagcgaggccgttcctcccgcgtccgacccccgcggggccgtcaggttcggggcggcccaggctgcgggtccgcagggcgcttcgggccgagccggcgcggcgcgtgaagggcaggggacgccccgaaagaccgctggggtgggaccccaagctccaggggtctttggaaataagaatgcggcgtgacgttggctgtgcgggcgcggggctgacgcggaccctataacccatcgccgaaaccgggcggccgcgcccctattcctcggcatttctctctgtccgcggccctgctcagccaatcagcgagtgggctcctaggcaggtcctgagtgacagcgcggcgggctggatcaggagatgcgcgtgcgcggcccggcccggctgatcgcttcgggtgctcgactcctgttgcgcatgctcagcgcgctgcccggctggggacccgcgcacctgcagcgcccgctgctcggccctgcatcctgcctgggcatcctgcgcccggccatgacggcgcactcattcgccctcccggtcatcatcttcaccacgttctggggcctcgtcggcatcgccgggccctggttcgtgccgaagggacccaaccgcgggtaagg

SEQ ID NO: 39608 - DNA, 2300 bp, Homo sapien
agtcaggcacagacagcactgaggtggcctgcctccttccttgcccaggtgagaaaactacagcccatgggggccagaactctgggggcagagccagatccagagcccagggttcatgacttctggcccactgctctctttcccattccacaccacctccactcctgttgttttataggttcagcctttcaagaggcatttactaccaggacagaaggaagagcaggctagggtgaggaggaaaggagggaggacaaaggaactggctgactttgagctggggagagtagtacttacaagaggtaacagcagacggcggtggcgaccagcatggtgatgatcactctgcagcagaagaggacacgggtcagaacaaatgcagccagcacctcacaaggcctggccaggaccagagcaagaagagctcctggtgtgagctcttttccattggccttcctgatgcctcctggacacaggaggctgagttctactcagggtaagaatagcaaggcagaaaataaaaactgaaagtgtcacctcacagagaggccaaccttgaccacatccaagttgccttaagaatccttcccttcatttcccttctctaccacccaatattgctccatcttaatgcagacgtgttgtggaaaggcactgcacagagctgcatttgtggcaacccaacagggagtggtctgtagaattcaaaattcatggagcaaggggaaggaaaacaataggctagaagacagggcaagaagcaggcagactgtgagccagttctgaggcccagtgagttgttacaaagagaacagggactagccactttgcgtgtactcagagaagaccagagacagatgcttcaagtgcagcaaaagaaatttcagtcaaactgaagcaagaactcaccaagaatagcaggagacgcaagacacgaaaatggtttacaaagtgaagctgtgggatcccaaaccctgcctgtctttaagaacaaaggcagcactcacatgtccaaacggcctttgggcaaagctaactctaatccaaacgaggcccttgatctttgatctaaagcactgcaagctggtgctggacacaggagcacgcgatccctttttcaacattactaagcaggttgtgccagtcctggctgggcactgagtagacaatggtgaactggacaaactccagcccctgggaacatgcagtcaagggaagggtgctttgtaactgaagataatatgaagcagaaactggtgaatggcgcagcaatctgctagaggaccttcgaaaaataacgccagctaaacttatcccatacctacaaagtgtcacgcactggtaggtgttttaaatgcgttaccgcaggtcatcctcacagcagccttttaaggcaggagtcgacattatctccattttacccatgaagaaactgagacttgatattggctctaggtcacacagctagcaaggagtggagaaactgcgtcagtgcccacttgtgccctttactggctgcaggaggggtgacagacatctccaatgtcactctcctctttaccttctggatatgccctctcgccccacctcctgcctgttcccggctgtcagagacccaggtgcagagagacctcagaggtggcgtccggggtcctggcgtccctcctgcggacgctcgctgcagagcaggaagccgccgccccggggcggaggggcgagccgggccagggggccggggtggagaggtctgcagggcctgcgcgctttccttacccgcggttgggtcccttcggcacgaaccagggcccggcgatgccgacgaggccccagaacgtggtgaagatgatgaccgggagggcgaatgagtgcgccgtcatggccgggcgcaggatgcccaggcaggatgcagggccgagcagcgggcgctgcaggtgcgcgggtccccagccgggcagcgcgctgagcatgcgcaacaggagtcgagcacccgaagcgatcagccgggccgggccgcgcacgcgcatctcctgatccagcccgccgcgctgtcactcaggacctgcctaggagcccactcgctgattggctgagcagggccgcggacagagagaaatgccgaggaataggggcgcggccgcccggtttcggcgatgggttatagggtccgcgtcagccccgcgcccgcacagccaacgtcacgccgcattcttatttccaaagacccctggagcttggggtcccaccccagcggtctttcggggcgtcccctgcccttcacgcgccgcgccggctcggcccga

SEQ ID NO: 39609 - DNA, 2300 bp, Homo sapien
ctgcggttacattgctccatgtttagatgatcctggctgccaaccaagagataagttcaagttctagtttgttgggaggcctgtctcatggttaatcaagctgcattaaggctgttgggtttcccatcttcctatgtcttgtacattatttttatgggttaagcttggcatcgttgggtgttcttaattcagaataatcaaaacaggacaggtaaagtgatgagatgctcattctttaagaggtaacagattcttttgaaacaactggaatattttccagggttgccaaatttttcaaaatacataggacaaaacccactttcaaaaaatttacttcattgatttaagatttgatgttatcatagttaaaattgttttatctgattaggtcatggattctttattcctattaaccaattctcttaatttaccttatgttttattgattgattgattgaaatggggtcttgagaccaggccagtatggtctcaaactcctgggctcaaatgatccttctgcctcagcctccccaaggagctgggatgacaggtgcacaccattgcacccggctgttaactaattagataattgacagggtcttactctgttgcccaggctagagtgcagtggtgggatcatagctcactgcagcctcaaccttctgggctcaagccatcctcccacctcagcctagctttgaccacaggcatgtgccaccatgcctggctgatttttaaattttctgtaggacagggtcttgccatgttgctaaggctgtgcttgaactccttggcttaagtgatccttccacctcagcctcctgagtagctaggattacaggtacacgccactgcacccagaaatgtataagccctcctactgacaaaaactaaacttgttagaaataatgatgactattaacacatggtttaacttaaacccactttttttttttttttcaaaattcttcctggacagagcattctctgaggtcctttctctaatgctatttctaggtccttcagggcttgagaaaagatcctcatctgcccatggcagggcctcagaggggcttgtgtttggtggctgggagggtgggggagacggggcctacacaagatgcggggtaatcccaaataccaactgaatcaacatacgggaaacagaaaacacactgcaaattggatgcatacaggtagaaaggtggggtcattctaagaaaatgttacgcctagaaattatatttacaaaacataaactcggagagaatgctgatgtaaaggaggtaacaatttctgatggcttcctgggcgttaggtcctcctacctactgtgagggattcaaagagggaaaataccgatccttcctgcagaaacagacaaagcagtgtggatgtggtcgtggggggcccttccaggtcaggcactgacagagcgtggggacctactaactactgtggcaaatgaagttgggagctttgtcatgaatgatggggccagacagccacccacacgcccagcagtgatgacaggtggggcaggtccctgagggttttctggcctgaagaacagaggtggcctggcagcagcctgaacaggaggcccctgacccgtcagctcctcacgtcttggggtagttccttctctcataagaggaggtgattctgacgtgctgcccgccaggcctgccctgttcgctccctggtgcatggagccgggggagcctggacagaggtgtgtgagggcacagctgggagtcgctcccaaagcgcccctgaggctgcctcccctcttctctaaccccaggttcagccccaactcggggatcctgcagatctaccgaacatcaaatgaaaccaaaaccaaacccagaagtgccataccaaccccatgtgcctgccggagtgtggatggctccctgggcccttcttcaccctgggaacacaggccctgccatctgctgggttggccgcatccaaaataatatgaccgaggcctcccctgggtgtgggaggaccctcctgtgccaggctcaccatgctttgctgtccctggcagctggctcatcgccatcctggcgcagctgaaccccctgttcgggccccagctgaagaatgagaccatctggtacgtgcgcttcctgtgggagtgacccgccgcccccgacccaggtactgtgtgggcgaggggtgtgggtggggaagaggggaaagacaaggctttcccacacccagggcaggcctcggtcatattattttggatgcggccaacccagcagatggcagggcctgtgttccca

SEQ ID NO: 39610 - DNA, 2300 bp, Homo sapien
attacctcccacagggtcccttctccaacataatccaacaggattatgggagctacaattcaaggtgagatttgggtggggacacagcagaaccatatcaatacctctcccttcaagaggtggagccttgtgtctgggctggattttatgaattgctcctaatgtatgtggcagaagtgagtgagcacaacccataagactagatcacaggaaggggctgcgctgctgtctccaccaacctccctcccaccactccctcagtcacttgttctgggagaatccaaatgccacatgatgaggaagggcctacgtggctagcacccaaggcctcctgccagaggccacataagagagcctggacgttgccctgctgcctccacaagcccccaggtgacagctgcctcagccagcactagctgcgtgctcctggaaggcctgagctagagtaccagccagtctgctcccagatccctgctacccagaccctgtgggtaacaaatgtgcgtagttttaagccactaagtgttggggtaatttattacataagtgtctaatttcatcttcaaatagtgataatcctgtattttaaatacataataattctgtttagcaaaatcatctggagtacagaggaattcgatcatctgttttacattctcaagtttactgagcatgtccagtgtgaagccctgtccaggtatgctggagcaatagcgttcaatcagacgggtcctgccctcaaagggctcgcagcacggcgggagagtggaggtgtgccctgcacatagaggcctcggaacaagcgatcattgctgctgctcctgctgttgtcagactcagcctcttctttcatgggatgggccaaaataagcccacttctgagggtgtttgtaggaccctggctttgtaaactctggtaggagactgagtggccgcctgactgtggatatgtagttggctggttccaggtacacccaggctacagcaaagggagtgactcacattgcaggaaaaactgacgagactgctaggaggccagcaagcggaggctgggcatcctccaaagcaggctgtgcagtgtggagacaggcagctgcagtgaacgccaggtccatcccatcatctctacctacaaggggagcacacggtgaatacccaacaaaaccgtgggtctttcctctcagagtctgatccatttcttgagccagccttgctacacaaccataactactaatacctggttttctaaaaatataaatcacgttgacctttgctgttgttgttataaatataattgatgttaataatgaaacatctggaataatatagaaagaataaactagaaatcatttaatcataatttcacacacagagacagccaatctagtatagtcattatactatttttactagtatttttaatctattatttataagatttggtctctatatgtagttttagattttattctcccactgttttcacttaatgttgtaatatagagattttcttacataataaaaaatcttccaaagtatgattttaattatgaaatattttattatgcagacatagcacaaataccaagatttaaaatgttttactttataaaccaaaagcataaaggtattgcctcaatagcaccttatgcacactagcgatttccttttactgacttgcttaactgatccataatcattcttatataaatacccactgttggcatttacctcttgccattttctagaactggaattaccaggttgataactggagaactttatcaagttaactcaatgtccctgaaaaatttttcttatctgtataaaggggacatgagattatttacggcatttcactataatacacactaagttgatagcatgggtagataaatctttgtgtgcataaaaaggcacagtgaggacataacccagatcccactcgctttccacgacacccagctgccttcttgttctaattcatgtaaatcattaagggtattttaaaaggttctaatgttgcctctgaagtcagccccacccaagctataacctgggcaacaggggaaaccgggggcgatgtcacacctcagctctgttccttccccttcccagcccgcagctcctgggagagaagcagaaatccagtcccctcgactccctggtctcgcctggaacttagctctcacctgggactcagctcccagagtgaaagggattgtcctgtagcgtgaacgatgagtgacacccgcaccctcccttgtaaatctgctccaacaagctctcctccaggacgc

SEQ ID NO: 39611 - DNA, 2300 bp, Homo sapien
gggtgcctccccctcgtgcgatgggggtcctaagagccagggggggaagagggactggctctcagtccctgcctcgtggggggtgcctccccccctgtgatgggggtagtaacagccaggggcggaagaggggatagctctcagtaatcccacgtaaggtacctgccgttggaagatttgaactttctacttggacaactaacacccacagtcctccaggtgggtcctaaggatcttaggatcaacgatgcggggtcctaagccggggggggaagagggtctggctctcagtccccgcctcgcggggggtgcctcccccctctgcgatgggggtcctaagagccagtggaggaactaggggatggctctcaatccctgcctcgcggggggtgcctcccccccctgcgatgggggtagcaacagccgggggtggaagaggggatagctctcagtccccaccttcgcggggggtgcctccccctcgtgcgatgggggtcctaagaacccgggggggaagagggactggctctcagtaatcccacgtaaggtacctgccgtcggaagatttgaactttctacttggacaactaacacccacagtcctccaggtgggtcctaaggatcttaggatcaatgatggggggtcctaagccaggggggaagagggtctggctctcagtccccaccctcgcggggggtgcctccccctcctgcgatgggggtccccagagccagcgggggaagagggactggcactcagtccctgcctcgcggagggtgcctccgcccccagcgatgggggtcctaagagcaaaggggggaagaggggctcgctctcagtccccgcgtcgcgaggggtgcctccccccctgcgatggcggtgcaaagagccaggggaggaaagggggaggttcgcagtccccgcctcgcgggaattgcctccccccctgctatggtggtcccaagagccatggggggaagaggggttggctctgagtccccacctcgcggggggtgcctccccccctgtgatgggagtcccaagagccaggggggaagaggggatggatctcagccatcacaaaatggggggcctttatgttcaggttttgcccaagaatcagcttatttgcttcttgtactagcagggcagttgctgccaaggccctcaaataggggggccatcctttagcaaccctgtctagttgtttagagacgtaggctacgggcctcagccagggccccacagtttgggttaaaagtccagctgccatcttttctctctctgacgcatacaatggaaaaggctttgtcaggtcgggtgggctgccagaagattttcttgtaactcatgaaaaacttgctgttgttgggatccccatttcaaaagttccgggtccccgccccatttgtgacctcatacaaaggcttggctaatactgcagtttgggatccacagcctacaaaaccccacagctcctaagaattctctcacctgccttctgcccttaagctccggtagattgcaaataacctgctttctttctgttcccgagctgcgttcggacccgtcggatcgtaaatcccacgtaaggtcggaagatttgaactttctacttggacacctaacacccacagtcctccaggtgggtcctaaggatcttaggagcaacgatgggggggtcctaagccaggaggggaagagggtctggctctcagtccccgcctcgcggggggtgcctcccccctctgcgatgggggtcctaagagccagtgggggaaccaggggctggctctcagtccctgcctcgcggggggtgcctcccccctgcgatgggggtactaacagccaggggtggaagaggggatagctctcagtccccactcttgtggtgggtgcctccccctcctgcgatcggggtcctcagagccggggggcggggaagagggtctggctctcagtaatcccacgtaaggtacctgctgtcggaagatttgaactttctacttggactactaacacccacagtcctccaggtgggtcctaaggatcttaggatcaacgatcgggggtcctaagccggtgggggaagagggtctggctctcagtccccgcctcgcggggggtgcctcccacctctgcgatgggggtcctaagagccagtgggggaaccaggggctggctctcaatctctgcctcgggggggtgcctcccccctcctgcgatgggggtaccaacagccaggggcggaagaggggatagctctcagtccccaccctcgtggggttgcctccccctc

SEQ ID NO: 39612 - DNA, 2300 bp, Homo sapien
gccctcagtccagcactttgctcccagtcccagtatgttgaagctgagaccgcctgagaacaatcaaactcccagagccagtactcattaaggagcccgggcagacattgtattgagcaatcaggcttccagagccagtactcgttaaggagcccgggcagacattgtatcactcatggagttatttcgcctgctctcatatttggcctcattgttctggcttgtaccctcactagcttttgtatgctgttgtgtttttggagcatgtacagttggttggggtaagttacatatagttagcagagatatacaggaggtagaattgatgggtcttagtgatgagaattggtagcagttaagagagaaatctaggatgactcagattttgagatggggcagtgcatggatgataatgtgattggttaagatgggaaacatgagaagaaactcacttgagggagggagggaggaggaagaaggagagtttggttttgtacatgctgaggtcgaagggtctgactgggctacacaggtaaagaagccgaggagcagccagctccaagcagcaggtgttgatgtaggagtcagtagcattcacgtgttgatagttgatggaaaattaactctgattactaaaaataaaacgtaccatccttggtattttagagatgaacctacgaatacatgattatcttgaaatctctaggtaaagttagtgctctgtgaaatcattttcctcatgaacctggtgaaataaaaaaatgctagccatagcagtgccctacatctgaatcacaattgcgttatgtcctagtttccttcctgaattcttgagaatggttagacctgccttgtgcacttcactaaccagtgtagacctagccagtgtagacctagccagtgtagaggtcagctttcttggatttgctaagtcacctcctgcacgtactttccagcttccagtatattgtcgcctcctctcctattctcgcttccttgaggatttgtatttttaaaaatgtttctttactgtagttttagaggggcatggaggtggagtaatattagatacatgtgttcaattttctatctttatccagaaatatgggttggttttatgatagtcattattcacttttaaatcaataccaggtgataattttaccattgttatgaataaaaatgtttgtgtagcttgcattcattgatgctttgatcatatgcttctatatttaaaaaaccagattattctctttctcttcttctcactgctgcacttgactagtcttaaagagagaaaaaaccccagaataactggacatctccaatttagatcttgttataaataatagtttgagaataatacatttgtctcctaaaggaataattataacatcaatagtggtggatagagatgaaatgggaggttgaggaagacggagggtttgtgattgtggtcctcagaacccataaggatgtggcctgaataacatcgattttgattcaagaaccaggagaacatcattatattgtaaatgttcctttaaatggaaatacatagattttaattcttcaaagacagtgaaatgtttttggcagcaagtaatagaagtataaaagcagtagtttaaaaaagttaaggctttatttttcttaaataaatttgcagtagagtccagtgctgatatggcagctctctggtgtggctaacaatctctctactctagtgtcttgaatatatggctttcattctaaggatgcctcatgatcacaagttgattactgcacctccagctatcacctctgtgttccaggaaggaggagggtgttaagggcaggaggcaagtctacgacttgagtctacctcagctttgtaaggagctttcctggcaaccattctccagcttttgtgtcttactggcctgaacttacttagtcatccctgtccacaaggaagtctgggaaatgcttttttctgggcctgttgccatttcccatcatagatcagtggtctgtcagtcacaaacttgcagtgttggtaagagcaactcaatgcctgtcatagtggtgtcactcaaaggcatgaagacagtagcaagggagagattcagctgctttcacaactctggctggattttacctatgtggagagtgtcacccatgttagggagcctctggccaggaggaagctgtggcaagatgtgctgcgtctcctgcttggcattgccatcttgctgccgtaagtctgtctgtggataaaatacattaggaaattgggaagttagatgaggagtttgtgt

SEQ ID NO: 39613 - DNA, 2300 bp, Homo sapien
ccgctctcgtcaccctaaccaagtcaggtcctcagagtcaccacgccctctcattgctggtcgtctgcatgtgctgcttgtttgctcttgcaggatttatattcaaaaagtttgcaaatcccttccgaagttctaattcagtttccactcaagagcactgcatctctttgacatctctgagtgtgttctgagctctgggtaatgcaatattggggaagagtggagttcccaggtgctcagtccacataaccggtgtaagctgagtctctgcacctccttgaaaacagtcagtggcaaggagctcattctctctgcatgttcagatgactgggcacggccatcagaaaggataattctgtgagctcctgtggggtccatcatttgggcctctcaagactctcttaatgtcttcaattcactttgatggcttggtcttaaatctttccacctggttcactcccctttaactattccattaacatacggttaaggacaaatacctgaaggaaatttaccattctcatcacttcctcaaccacaacatgcaacagaatgacttgcagaattcaaagcacaccacatgtaatacgatattttcttatctttttaataataaacttgattgtttttgaacattcattgcaggtacccatttttagcaaatggccttttccatgttcacaccaaacccctccaattccatcctggcaagtggttacattttactatctcatgtatgccagctaaatcagaagagtcccctttaataaaaattcctgtgagctgtgtggtggtccatatttgctccacatgcctaagattagatgtccctctaagtaaagcaagaactcctggcgcgggaagctgaagtagacagaaggaagcagctgggctcggtgcctgctcctaaaatcctatccaacaggtagtttatgtgatatgctacagaaggaaaaatgccaaatctgacaggtgggaatctgtgatttgttttggctgtaaagacaaagccactcacacacagccagtttcttggccccatttgctccacataaacaactgtgggccgggtatggtggctcatgcctgtaatcccaacactttgggaggctaaagtgggaggatcacttaagcccaggagtttgaggccagcttggacaacacagcgagacccggtttggagaaacaatttagcaatacctcgccaaggtgaacacctcagacccaaagacaagcagcttcacttctaggtgtctatcctagaaaacttcttgtacatatgtgtgatgagacatagacaatgatatttgtgtagcaaaaacaaatgaaaacaatttaatggttccttcatagggagatggataacgaacagtggtttattcatacaagggagtattatactataagataattaaaatgatgaactggaactacatatgccaacagtgaaaactaaaaagtataatgcttagctttttaaaaaagcagttataaaaggatatatagattatggtttcatatatgtgtatttctaacccttattattgtcactggatagtccaactctgtaaaacatttgaaaagatttattctgagccaagtatgagtgaccatggcccatgacacagtcgtcaggagaccctgagatcatgtgggtggggcacagcctagttttatacattttagggagataggaaatatcaatcaaatacatgtaagatgtacattgatttggttcatgtcaggcctctgagccgaagctcacccattgtaacctctgtgacctgcacatgtacatccagatggcctgcaggagccaagaagtctggtgcagccaaaaaaccacaaaagaagtaaaacagccagttcctgccttaactgattaaccaacattacatgccaccattgtgacttgtccctgccctaccttaactgatcagtcgaccttgtgaaattcttcttctggacaataagacttatgatctccccaccatgtaccttgtgaccccctcctctgctaacaataaataaccaccttttactgtaatttttcattacctacccaactcctataaagcaaccccttccccatctcccttcgacgcctttttcagactcagtccgcctgcacccaggtgattaaaaagctttattgctcacacaaagcctgttaggtggtctcttcacacagaggcgcttgacatttggtgccatgacttggttcgggggacctccctccagagatcaatcgcctgtcctcctgctctttgctccatgagaaaatccacttacaacctcag

SEQ ID NO: 39614 - DNA, 2300 bp, Homo sapien
tcgaccttgtgaaattcttcttctggacaataagacttatgatctccccaccatgtaccttgtgaccccctcctctgctaacaataaataaccaccttttactgtaatttttcattacctacccaactcctataaagcaaccccttccccatctcccttcgacgcctttttcagactcagtccgcctgcacccaggtgattaaaaagctttattgctcacacaaagcctgttaggtggtctcttcacacagaggcgcttgacatttggtgccatgacttggttcgggggacctccctccagagatcaatcgcctgtcctcctgctctttgctccatgagaaaatccacttacaacctcaggtcctcagaccagcccaaacaaaacacctcaccaattttaaattgggtaagtggcctctttttattctcttctctaacctctgtcgctatccctcaacctctttctcctttcaatttccacgtcacccttcaatctctcccttcccttcatttccttttgctttctggtagagacagagaagacacgttttatctgtggactccaaactctggagctggtcacagactcgggaagacagtctttccttggtgtctaatcactgcggggacgcctgcctgattattcacccgcattccagaagtgtttaatcactgcggggacacctgctttgatcctccaccttggtggcaagtacaacctcccctgggtggcaagtaccacccccctctcttcgagtctctaccccctcttttcttggaacttacctttttcctatgggcaaccttccaccctccattcctccttcttccgccttagcctgtgttcttaaaaacttaaaacctcttaaactctcacctgacctaaaacctaagagtcttattttcttctgcaactccgcttggccccaatacaagctcgacaatggttccaagtggccagaaaacggcactttcgatttctccatcccacaagacctagataaattttgtcgaaaaatgggcaaatggtctgaggtgccttacgtccaggcattttttatacttcgttccctccctagcctctgctcccaatgcagctcatcccaaatccttcttctttctctcctgtccgcttcttcagtctctaccccaacctcagagtcttctgaatcctccttttctgcagacccctctgacctctctccccctccccaggccactccttgacaggctgaatcaagtcccaattcctcctcagcctctgctcccccaccttataattcttctatcacctcccctcctcacactcagtctggcttacagtttcattccatgactagctctcctcccacctgcccaacagtttcctcttagagaggtggctggagctgagggcacagtaagggttcatgtacctttttctctatcagaccttttccaaatcagtcagcatctgggctctttctcatcagaccccactaaatatatacaagaattccaatatttgactcagtcctacaatttaacctggagtgatttaaatgtcatcctgacctctcccgtctccccagatgagcgggaaagagtttataccctagcccattctcacactgacacctgcttgcatcgtgagccagacctccaagaaggcatcagggcagttccccgagatgatccccaaagggaataccagacaggcttcccaggtatagctaggtgagattacatggtctcttgcctagttgaagggctaaaaaaggcagcatacaaagctgttagttatgacaagcttaaagaagccactcaaggtaaagatgaaaacccagcccagttcttggcccgcttggtggctacccttagacgctttacagccctagaccctcgagggccagaaggccatcttattctcaatatgtgttttatcacccagtcagctcctgacattagaaaaaagcttcaaaaattggaatctggccctcaaaccccacaacaggaattaatcaacctcgccttcaaggtgttcaacaataaagaggcagccaagcggcaacgcatttcagagctgcaactgcttgcgcctgctgtaagacaaaccccagccatgccttcagcacacaaaaacttcagaacaaccaaaccacagcctccagctactcctttaaatcctcctcatggaccttgattcaagtgccgcaaaactggccactagaccaagaaatgcccacagcccaggattcttcctaagccgtgtcccacctgtgcgggaccccactggaaatcggactgtccaactaatatca

SEQ ID NO: 39615 - DNA, 2300 bp, Homo sapien
tcttagtaattttccatctgctgacttccaccctgttgcttaactataaatctccacctgtccttgtatttgatgttaagcctgatttttttgcccctattgcataatccctattgcagctgttcttgaataaagtctctcaccttaacaattgtttgaataatttttcttttagtgccatttcctactgtaacatgctgtgtgagtctcaattttctgatccatataatggagaaactaatacttccatctccgaggcatggagatcaactgaaattaaaaataacttgcatatggctgggcagggtggcacacacctgcaatcccagcactttgggaggccaaggcgggcagatcacttgaagtcaggagtttgagaccaccctggccaatatggcgaaaccccgtctctactaaaaatacaaaaattagccaggtgtggtggttcacgcctgtagtcttagctacttgggagactgaggcaggagaatcgcttgaactcaggaggtggaggttgcagtgagctgagatcacaccactgcactccagcctgggcaagagagtgagactccatctcaaaaaaataaaaataaaaataaaaaacttggataaagtgtaaagataaaaatcactattcttgggcaggggtcccagctgtagcccaagctggagaactagactggcttggcattaatttgcttggggcaggagaagggtcatctgaaagatatgggaaaagctgaggttgcccctgggaagactagggaagcctgcccccgggccagccccttgaatatgtccaactgaggaggtggaaagaagttcaaggtagccagggagacaaaagttgttcactttggtgcacatgtggaaccaacatgggacaaacaggcattttgtgctcgtccagggaacatgacttcttcggctcccacacaatttgtagctgcaggagtggcagagcaccagagtggatgcaggcccagatgttctctgggttaggtgttaaggacttgtgggagtcatcaggcagcaggcatttgccccagtgtcagaggtgtttaagccagaattactccatcttgaataagggctgggtaaaatgaggctgcattcataggaggttaggcattctaagtcacaggatgagacagaaggttggcacaagatacaggtcatacagaccttgctgataaaacaggttgcagtaaagaagctggctaaacgccaccaaaaccaatatggcaatgggagggacctctggtggtcctcactgctcattatgcactaattataatgcattagcatgctaaaagacactcccaccagcaagcaccatgacagtttacagacgccatgacaccatcatgaaatactctatatggtctaaaaaggggaggaagcctcagttccgggaactgcccacccctttctctgaaactcatgaataattcaacccttgtttagcatataatcaagaaataaccaaaaaatgggtaaccagtagccctggagctgctctgcctatggagtagccatccttttacttctttgctttcttaataaacttgttttcactttactctatgggcttgccctgaattctttcttgcatgagatccaagaaccctctcttagggcctggatcgggacccctttctgataacaccaggagacaccctgggtggatttcctgaaccgaccgatagatgagccttccacgcgggagacctggatccttatcgtctttgtggccccttccatctgcacgtgcggacgaggtccgggtcgcactcgggcggtcagcctggcacgcacagcgccggcgtgcagggggccttgggtgccaccgagtccgggaggaaatctaggccgccatccgtccggagactggcacctgtgaccaccacccaacatgtattgaacaagggcttggaggtcctttctctaaggccgcaccgataaacgattaccgactgttgacctcacggccccttcgcttccggccgcaccgcctcgctgcccacgcctgcgcactcaggcaccgcaggtaggaggaacgtaccaactgcgaggcggggggtgcgcgcgaagacccccgcaggctgcgcttccggaagtaacccctggcgcatcccggaatccagagcgcccactacggcctttggccaggccccctgggcgcgttccgggagctcaggcctgcggcgctgggagaagcacgctggccaacaagttgggtggtgggcacgcggcccaggggtcaggggccgccaggcggcgggcggcggggctgcggc

SEQ ID NO: 39616 - DNA, 2300 bp, Homo sapien
gatggcgaaaccttgtctttacaaaaaaaatacaaaaaaatcagccagctgtgatggcctgtgcctgtggtcccagcttcttggcagtctgaggcaggaagatggcttgagcagggaagtggagattgcagtgagccgtgattgcaccactgcattccagcctgagcaacagagccagaccctgtctcaaaaaaaagaagttacttgtgacacacatcaccacagctgacaacacattggaggcctacaaccacaacaagacaagattccaagggcttctaagctgaagcacggccttttgggctgcacgcctgcccatagtcgatcatgtgggcagcagtcaggaaagcgccctagccaggccacatgggaagcaggcacatccctgggaggcaaaagggaaagcgggccaggccggggtgacggcagggcggggtgatggcacaatgcatggaggagactgtggggagagctgttcaggaggtggcccatgcctaagcctcaagtggaagaggaggaatgatggagagcgcctccacagtgagcctctttcctcatacaggtccatgtgggctattttggggcaaatcttcaggcaagtttctagagaaactgaaggaaaacaccagagggggctgcccaggtaatgctgacaatacagggaggtgagaggatgagcagatctcaaaggtgactgagaggcagaggggagagacaaggaaaaaccaaagtaaagtgaagttagggaaaccaagaaaagactttccaaaagcagtggtcagcggggtcaaaggtcccttcagtgggcggtacagcaggaagtgggggagaagcaggaaccgggaatgctggaggtggggatgggagggaaaaggcttggctctgtccctaaacagagagaaggtgacctgggaagagcggggaggctaactacacagggaagagaagcttcctggagaaagggatccagggcacaggcggtggaagggattggcctcaagagaccaggaagaactctcatttttcctgacagagaaagtaggatgggtctggtagcaggcaagtcctggagtgctgtgcagaagggaagtgaggcagcttatgcctgagagccaggcatgttgattgctcacggggagccgtacatctgtaaaggcagccagcggctggctgagtgatctggcttagcctgggctgggaagcacctccgcacactggctcaagaaattagacctattcttctcgctgctctcaccaagccttttcccaagtgcgtgcccagaaggaaagcggccactcttctacttctcttgtgcctgcaagagaagtagaaccccaccctgggcattccatgattatgccaggcctttctcactccgcccagtccctctccagcccctctgctctcaactccagcactgcagggggacagagtgtctactccacccccaccaggcaggggattttaagcacctgctgggccctcaagtctcatcttcctccacaacatctgtgagaagattgaaaggtggtgagagaaagggataggaggagatgaacgtgtgaaaggaaaagaggagagcaagccattgcatgttttggggttttgtcccacacgcaaatttgactacttataaagtctaagcaagatgttttaaataataatcatgcatcattaggtttcatactgtgcaaaaaaaatgacacaaagtgagatctgttacaaacgacacggcagcactctgctactttctggaagcttagggctaacaatggagtcagagcatggcatccagagcccgtctctgagcacggccgtgatcctgctccagcacacgcctcggtttcctcgtctacattacgggaatagtaacagcacccgcctcatgagattgttagtgttaaacgagttaattaataccacagtatttcagggcagttctcggcacagagggagagatgggtaagggctggctgttccggaagattctggcctctcccagtgtgtttcggcgcgagggcaccgctggcccagcaggtggccccccggggccggcacgggccccgacagccgcccccttccctgaacctcggcggcccagtccccgcttacctgaggggtggagccggcagcctgcggagccactggccaagctgggaagtccggcgcaactccgcaccgcagagccggcgcctcctcggcaggtaagagccgcagccccgccgcccgccgcctggcggcccctgacccctgggccgcgtgcccaccacccaacttgttggccagcgtgcttctccca

SEQ ID NO: 39617 - DNA, 2300 bp, Homo sapien
ccatgctctgactccattgttagccctaagcttccagaaagtagcagagtgctgccgtgtcgtttgtaacagatctcactttgtgtcattttttttgcacagtatgaaacctaatgatgcatgattattatttaaaacatcttgcttagactttataagtagtcaaatttgcgtgtgggacaaaaccccaaaacatgcaatggcttgctctcctcttttcctttcacacgttcatctcctcctatccctttctctcaccacctttcaatcttctcacagatgttgtggaggaagatgagacttgagggcccagcaggtgcttaaaatcccctgcctggtgggggtggagtagacactctgtccccctgcagtgctggagttgagagcagaggggctggagagggactgggcggagtgagaaaggcctggcataatcatggaatgcccagggtggggttctacttctcttgcaggcacaagagaagtagaagagtggccgctttccttctgggcacgcacttgggaaaaggcttggtgagagcagcgagaagaataggtctaatttcttgagccagtgtgcggaggtgcttcccagcccaggctaagccagatcactcagccagccgctggctgcctttacagatgtacggctccccgtgagcaatcaacatgcctggctctcaggcataagctgcctcacttcccttctgcacagcactccaggacttgcctgctaccagacccatcctactttctctgtcaggaaaaatgagagttcttcctggtctcttgaggccaatcccttccaccgcctgtgccctggatccctttctccaggaagcttctcttccctgtgtagttagcctccccgctcttcccaggtcaccttctctctgtttagggacagagccaagccttttccctcccatccccacctccagcattcccggttcctgcttctcccccacttcctgctgtaccgcccactgaagggacctttgaccccgctgaccactgcttttggaaagtcttttcttggtttccctaacttcactttactttggtttttccttgtctctcccctctgcctctcagtcacctttgagatctgctcatcctctcacctccctgtattgtcagcattacctgggcagccccctctggtgttttccttcagtttctctagaaacttgcctgaagatttgccccaaaatagcccacatggacctgtatgaggaaagaggctcactgtggaggcgctctccatcattcctcctcttccacttgaggcttaggcatgggccacctcctgaacagctctccccacagtctcctccatgcattgtgccatcaccccgccctgccgtcaccccggcctggcccgctttcccttttgcctcccagggatgtgcctgcttcccatgtggcctggctagggcgctttcctgactgctgcccacatgatcgactatgggcaggcgtgcagcccaaaaggccgtgcttcagcttagaagcccttggaatcttgtcttgttgtggttgtaggcctccaatgtgttgtcagctgtggtgatgtgtgtcacaagtaacttcttttttttgagacagggtctggctctgttgctcaggctggaatgcagtggtgcaatcacggctcactgcaatctccacttccctgctcaagccatcttcctgcctcagactgccaagaagctgggaccacaggcacaggccatcacagctggctgatttttttgtattttttttgtaaagacaaggtttcgccatcttgcccaagctggtctcaaccccctgagttcaaagcagtccacccaccttggcttcccaaagtgctaggattacaggcgtgagccaccacacctggccacaagtaacttcttagttataaagtactgaaatttatcaatgactttctttttaaaatttacgttttagattcatttggattcaaggttggctctcaacagtgccagctgcactgtcatcctaaagtacttctgtggaagagaacatggtggtgtcactgttgtaccagtgatgacacaaaatcccagatctacctgacgggcctgcgagggttgaagattgtgaagcaatagcctaaggtaaacaacaccttgcaagacgggtctaagctcttcagtgtaatagaccctgtttctcagtaggtcagcccgggggccccccagggatccctccccgcctcatagcaccataccccactttccccctggtctaatgatgagcccatttctaggttgtcgtctcatcctgagccc

SEQ ID NO: 39618 - DNA, 2300 bp, Homo sapien
tgtacacctgtagttccagctacttgggagctgaggtgggaggatcgcttaagcctgggaggttgaggctgcagtgagccaagattgtaccactccactacagtctgggcgacagagcaagaccttgtctcaaaaaaaaaaaaaaaaagtttcttgcacttgcgtaaaagttcctaagtgacttagatatatactcatattcctttgcctggtctcctgaccccacttctacgtggaaggcccccggttgcttctcccttctttgagattacagattaagtaggtttgatccatcccaataaagcagtgtcttaagtgtttggggtgaaccacattgactcaggtttggaacaagagatggagggttcctgacttcttcaggctgttctcatacatcatttaagagttgcagagacagcctgagaattcaatatatgcgtgtgtgggtatgtaggttttcttttggggtaggtgaatggagaagaaggtacggtagaagtcaagtttttagggcagaagatctggtccaaaataggaaatagaggaaggggaacacaaagaaaggatagttcaaaatccctacttcaatatgggggtcccccaaactcatgttttacatcctttttgcctggttcagaactttctgtaaagatgctttggccatttttctctcaatacaaaaaagtttgtaaacaataaaaccccaaaaaaacatggagaaagaccaacacagtatagttacacaaactaggccacctagcagtcaccaactgctacaaagtccagacagatacaggaactagagggggcagcgtcagggggaaacaaacccaggatcagatgtgcacccctgaacacgttctatcgtgcttgtcccattctagcccagcaagggaggtttgtggtgatcctatagcgtgtaaatgaagcccccttttctccttagttaccgtgatgctgaatcagcgctgcagcagggcaggacgctggctgtgcacaccacatgaagaggccctctcttacggggctcccttgaacccaagaatttggaaacgttaagaattttagttcttgcttcatatatccttccctggacagcacaggatgggtacaggggcactggtcttaaaatttagcgttcccaagtcacgtcttttacgaatacacacgcataccctctgttgtggatggtaggcctagcacagtccagtgaaggacggacctggtgtgtgaagcaagtcccatgccctaggattaggaaaccctcacctaaccgtggtgtcccttggtgtctctgcaccttagtctaattttcaatcttccactagccagagatcaagtcttgatgctatccagttgaaacctagtctcccgtgaaacattttcaaggtcggggggtttcaggaggacactgtggcagaaaagccaagtctctggcaaacatgaggtagttcaataggctgggtcctccatatagttgctcttcgtggttagaaaaacaaccagaagtattcctgctatgcaggcctggagcttctgccgacttatccctgaggttgctcagtacctgagaagagtaaagagtgagggaccgagattaaagtagacaacagcacaaacaacattaaggggaataaaagctaagatgcacggacgtatcggtgacacagctagtgctgtgggcacccgggagacgggggaccgaggtacggtatccaagggagcgaatcagtcccatcgcactggcctggagctgggtggggtgagtgtgggagccgcaggtctgcagcggtcccccagccacactctctgcctgtctccgccacccattgcttgggacacttcccagcaccctgtcccaagagtgggctgtgaggaaacaagatgtgagtaaagcctggcctgcccatgaggaatttcctccctcagaaggtagtggctgtgggttgggtccgtcatctggcctcatgcttaatcatttcactccagcatgggaaatattatgattacctgtccttcttaaaaaggaaaacaacttccctgtccaggccacttttgaaagctggagattctaggggtagtgcctcagacaaagcatgtaggctcctgagtgatttcccccagctgccctcgtttgcatttggatagagcttggttggagttccaagggctgatgctgggaaccttgctctggatgcgaggcctgcccctggagggagccgcggaggactggcagctgcagatgctggagcaggccagcctgtggctgggccgtagcttcctgctggcaggcttcctgg

SEQ ID NO: 39619 - DNA, 2300 bp, Homo sapien
ccaccaccctgctcccaacctacctccccacctcaactgcctcacctcccctgcaacagacctgatgcaactttccccccagcccccaccaaagtcaggatgagtttcccgctttgctcagctcaagtcctaccttgtcctggaagatttctctcctcacccatcctcaggacgtcccccagcatgggtctgtgggggccaaaggaaaacttcccctttgccttctgaaggtttgctgaaaaatcaactgatgaaaggcagattaatagaataaattgattcatttatattttagagacaaggtcttgctctgtccagagaggctgaagtacagtttcatgatcagagctcactgcacctttgaactcctgggctcaagcaatcctcctgcctcggctttaacaggaaatatttattaacatacatgagagagaaccacaaagtgattaccccaacccctcagtgggatacagaagcttatccaccatcttgagtttatacaaatatgggggctcagatagtggcaagacaggttatggaagggagggaagaggaggcctggttggcaaagggagtcttgttaggtagatgacacctcacaggtagcagccctcagaaagaactgagggtaaatgtttctttcagatctgtaaaggtgtcagcctctcagttaatctttcctagagttagacaagggagagcctcggagaaagcctggctacatcaatgcagatttcctctacagatgcaaatctctccacaaaaagacagctttttggttattctatttccaaccattctgaacagccaccttgaaatgtgtcaaagaagtattttttggggtgaaatattttggtttccttcaagttcttgggctgggaaacatctttgggtgcatcttttctctctaaccccatctaaagctttcagggaacacggatcccatctctttctgcttaagggcggctgagtagctcacagctggggagtgaagtaccctaagtagtggtgggatttcagacacctggaagtggttaatggaagccgagtttctttctggtgcccccagagcacactgtaaaggaaattctcagctctaagtggagaatcctggttaggggtgcgtaagtaggggacaaaagccttgtgctcggcactggacatcagttgcttttcatgtttcttcatttaatcctcaaaacaactccttaagacagagtttctgatccccatcttacagataaagaaacagaagttcagagagagccatgaagttacatgagatcctctacttcaggtgatccctgcggtgtgggaaccagaggcatggtgttggtggttactgacgtgcaaagtctcagagcttcttcatccttgctccagcgtacccaggagtcgagccggtatttggacagttttccttgagtttctgctcaccttatgaattccatcatgccgttctgccacacccgaaggctcccccactccccatgagaatctatcccacggagaatggggcacgaggaatggtcaggaaaggcagatgcaggatacacactggacatctttgctgtcgatcaaggttgcaggcgccagagtcctccctaaaggagagaccttccttctcagtgtggctcagggagtgggaggcaggatcaggtgtagggacctcgaggtctcatttggtttgagaatgtctgtatttaggggaagaaatcccaggatgagtgtctcagggacgctggggaatggtcccccgtaaaggacccaagacagggcagccctgcctgggtaggagtggggcacagaaagtccttgggggagcagagcagcggagaagaggcccgggccggccgaggctgcggaatgctcaggcccgagccagagggaggtgggaccgagggctgcgcgcctgggcgagccgcctgcagccgcggccagggtcagggtcatgagggctggatcgaggggaaggaggggggtgggatggggagggagggcgcgggagggcatcccgccccagaggccggtcccactggggaggggaggagccagagttgctggagggggtccaggaggtgggggtgggaggaggtgggggccgccccgcgagaagaagagcgggaagaggcggacagcgaggccaagatttcagctgcgggacggtcaggggagacctccaggcgcagggaaggacgtgaggaggggaagcgggctggggcggcagccgggcggaggggcagctgcgcaggcggaatgaggaacgcctttgctctaaggcgaccaccctggcagctctt

SEQ ID NO: 39620 - DNA, 2300 bp, Homo sapien
acctccctctacactccagcctgggagacaagccagactccatctcaaaataaataaataaataaataaataaataaataaataaataataaaataaaaataaaacaaaactttcttatgctcgcttcagcagcacatagactaaagcaaaactttctcacatcaacaactgaaaaggtaggccggatgcagtggttcacatctgtaatcccaacactttgggaggctggggcgggaggatcgtttgagaccagcctgggcaacacagtgagaccccatctctacagaagaaaaacattaaaataaaataattagctggatgtggtgatgtgatcctgtagtcccagctactcagaggccgaggtgggaggattgcttgagctcaggaagtcctggcttcagtgagccatgatagtgctactgcactccagctctggtgacagagtgaaaccctgtctcaaaaaaaaaaaaaaaaaaagttaacaagtacgaggaaacacgtctgcaacaaacatgacaagtctttaatacctgtactttatgagtgccccccaaacaataaaccaactccccaacttttaaaatgggcaaatagaaaagtgggcaaatggacataaacaaattcacaagagaaaataaaactggcaaaaaataaccatgtgaaaaaacaatccagctaactagtactctaagaaatgcaagtacaaaagatgagaaataaccatttcaaactaaattttttttttaaaaaagtctgtgttgtcaagtatatggaaaatgggcatttctcagggaaaactaatacgttttcctggaagataatttagaaaacatttaaaaaatatattccttttatacagccataaataatcatgtttaaaagaatatctaataaaatggaagaaaattcacaagatcgtgttaagtgaagaaggcagaatacatcttcgcaaggcattattccaattatgccagacatgccatggatatacgtagagaaaacaccggaggcaacataccaaaatattaaatgtaattgactctacgaggtaaaactgagttttatgttcccctatttcctatttatgcaatagatttaaaaagtatttttacgactaattatacaattcaaaaattgcctgtgttgaaaagcatgaaagtacatgaaattgtactaccctggaaaccccaggaagtgtttagtttggaaagccagggccacctgctagtgggtgagtcatgggcacaggctcgcacctgccaccgcagacgccacacaggctgctgagcctttccaagcgaaatgccccacgtgcgccaacggccacctcggccgtcgccccacgcttggcccgcagccagaggaagcccagcaacttctgctctttcttaatttctagaaaagagtgaagagaggccttttcaaagttcgcaggatcgggcctttttgtgctccactttggaacaaatcggaagctagggccttccaggtgcgccaccgccgtcccgggaccgccgcggccgcaagcgtccgcactgcggccggggtgcgcggcctgagaaaggcccgggcaacgacgctccgggggcttgccggagccctctttgaagtctcccgacgggctcccagcctctcataaggcagctaaggccgaacaccccggtgaccataggccagccacgcggtcgcccggggacgcgcgtgctccgcagggacaaagggtcgggaaacttgagctccggccagtcccagagaaacccgggctggtggtcgccatggcaacggagtccgaccctccgaggcctgccgccctggcgcggcagtggcttgagtgacccggcccgctcttggcgggggcgcccgcgccccggccccggcagtccctccccgcccccaggccgcggccgcgggagccggcgactgaccctcggcagctcctgtagtcacgtggcgctgggaacccggcggggggaggttggggacgggcctggcagttgtgaactcgaacctgccgctgtcgccgcggcggggcggggagcgagagtgggccgcggaggccggccttcgggctccatggacgggcgccgcgtccctgcacagcccgccgcagaggtacggccggggcaggggcgcggggccaccgcgggcccgcggggggccgctccacctgcggggcgcgtgaccgtgagtgtgcgcgaccgtgtgtgagtgcgcggggggggacgctgctggatctgcgggggtgggggagcgcacctgcgcacaggctccgcgagctgcgccgtgcgtgggacccgaa

SEQ ID NO: 39621 - DNA, 2300 bp, Homo sapien
agcacatagactaaagcaaaactttctcacatcaacaactgaaaaggtaggccggatgcagtggttcacatctgtaatcccaacactttgggaggctggggcgggaggatcgtttgagaccagcctgggcaacacagtgagaccccatctctacagaagaaaaacattaaaataaaataattagctggatgtggtgatgtgatcctgtagtcccagctactcagaggccgaggtgggaggattgcttgagctcaggaagtcctggcttcagtgagccatgatagtgctactgcactccagctctggtgacagagtgaaaccctgtctcaaaaaaaaaaaaaaaaaaagttaacaagtacgaggaaacacgtctgcaacaaacatgacaagtctttaatacctgtactttatgagtgccccccaaacaataaaccaactccccaacttttaaaatgggcaaatagaaaagtgggcaaatggacataaacaaattcacaagagaaaataaaactggcaaaaaataaccatgtgaaaaaacaatccagctaactagtactctaagaaatgcaagtacaaaagatgagaaataaccatttcaaactaaattttttttttaaaaaagtctgtgttgtcaagtatatggaaaatgggcatttctcagggaaaactaatacgttttcctggaagataatttagaaaacatttaaaaaatatattccttttatacagccataaataatcatgtttaaaagaatatctaataaaatggaagaaaattcacaagatcgtgttaagtgaagaaggcagaatacatcttcgcaaggcattattccaattatgccagacatgccatggatatacgtagagaaaacaccggaggcaacataccaaaatattaaatgtaattgactctacgaggtaaaactgagttttatgttcccctatttcctatttatgcaatagatttaaaaagtatttttacgactaattatacaattcaaaaattgcctgtgttgaaaagcatgaaagtacatgaaattgtactaccctggaaaccccaggaagtgtttagtttggaaagccagggccacctgctagtgggtgagtcatgggcacaggctcgcacctgccaccgcagacgccacacaggctgctgagcctttccaagcgaaatgccccacgtgcgccaacggccacctcggccgtcgccccacgcttggcccgcagccagaggaagcccagcaacttctgctctttcttaatttctagaaaagagtgaagagaggccttttcaaagttcgcaggatcgggcctttttgtgctccactttggaacaaatcggaagctagggccttccaggtgcgccaccgccgtcccgggaccgccgcggccgcaagcgtccgcactgcggccggggtgcgcggcctgagaaaggcccgggcaacgacgctccgggggcttgccggagccctctttgaagtctcccgacgggctcccagcctctcataaggcagctaaggccgaacaccccggtgaccataggccagccacgcggtcgcccggggacgcgcgtgctccgcagggacaaagggtcgggaaacttgagctccggccagtcccagagaaacccgggctggtggtcgccatggcaacggagtccgaccctccgaggcctgccgccctggcgcggcagtggcttgagtgacccggcccgctcttggcgggggcgcccgcgccccggccccggcagtccctccccgcccccaggccgcggccgcgggagccggcgactgaccctcggcagctcctgtagtcacgtggcgctgggaacccggcggggggaggttggggacgggcctggcagttgtgaactcgaacctgccgctgtcgccgcggcggggcggggagcgagagtgggccgcggaggccggccttcgggctccatggacgggcgccgcgtccctgcacagcccgccgcagaggtacggccggggcaggggcgcggggccaccgcgggcccgcggggggccgctccacctgcggggcgcgtgaccgtgagtgtgcgcgaccgtgtgtgagtgcgcggggggggacgctgctggatctgcgggggtgggggagcgcacctgcgcacaggctccgcgagctgcgccgtgcgtgggacccgaaatggctcactcgcaagaacgggacccgtgtgcccgggagcgtggacggaggacacgcatcagtacaaaagggcggtgtggggcttctgccacccgcggccagccgcgatgcggaaggggattctgacggag

SEQ ID NO: 39622 - DNA, 2300 bp, Homo sapien
cgctcttggcgggggcgcccgcgccccggccccggcagtccctccccgcccccaggccgcggccgcgggagccggcgactgaccctcggcagctcctgtagtcacgtggcgctgggaacccggcggggggaggttggggacgggcctggcagttgtgaactcgaacctgccgctgtcgccgcggcggggcggggagcgagagtgggccgcggaggccggccttcgggctccatggacgggcgccgcgtccctgcacagcccgccgcagaggtacggccggggcaggggcgcggggccaccgcgggcccgcggggggccgctccacctgcggggcgcgtgaccgtgagtgtgcgcgaccgtgtgtgagtgcgcggggggggacgctgctggatctgcgggggtgggggagcgcacctgcgcacaggctccgcgagctgcgccgtgcgtgggacccgaaatggctcactcgcaagaacgggacccgtgtgcccgggagcgtggacggaggacacgcatcagtacaaaagggcggtgtggggcttctgccacccgcggccagccgcgatgcggaaggggattctgacggagtcgtggtcacaccagctggccctgcgcagccccatgggaaataggcctggaattcctgtcgggaggaggctgggggaaggggagccagcagggattccagagttcctgccataggccggcctttggccatcagggaaagcccagactctggccacagaatggagaattcgttccgtgaccttaccagggaagaaagtgaccccgaaagacagcagtgtgcttccttgttgaaggggcacattcatttattaatccaatgtccattaaggtcactctgccaggcaggatgtggggcttatggctggtgcgtgtggctttgtggggggaggggttgtggctggtgaggacacaaagctgactgccctagaggagctcagagcctcacttctgttttctcttccctccccacaggtaaggctggcctctctgcagtcagaggtctgagctctgccatggggataggggtgtctttattactgcagttttctctaacacctgggggctaccggagtgtgggccgaagcaggcgctgcagccgcggaagtatccccaggaacatccccaagaggagctggaaaaagcctcatccccagctctgcagtctccagggtagagtctggcctttgctgtgctcccaaaccacgccacaacaggggtgcacgggcgtccccatcccggcggaaggaaatggccctttctcatatcctggggtcttccctgtgcacagtctgacactgggaatgagtgacctttgtgttccctgagaagagagagtgcgctctagggaatttagaaggatgtgtctggagcttgtgagcaggcacagaagggcccttaggagcctaactgcttccttcctccttccgcggaggaggctcctgtgcaggaatctgggctcccctgagctgtggaagagctgaacatggggcagcccctggcgaggttggggcaggaccgggcaggggactgagattgcagtctcatcttccctccccttctattgccccagtaatctccagcaccccgagggaggcagagccggtgatcaggccccgagggcagcaggctgtgggtgttccttggattcagggagagccttccttcctgcaatgtcctaatttgtgtgggtggaagagggcaggcgggcagaatgggggcacagtctgggcaggcggtggtctggcgttagactgccgggagtagcacccagggctctgctcctgttccccgagaagggctgttctcacttgtcctccagcctcctacggagactgcagttagtgatgctgaaagtgcctcccctgtggggctaggaatgaaaagctatagacacctttttctctgagatctttgcaaacccaggcgctttagaggaaagaacactggcctgggagtttaaagacctgttccctagtcttgattctgctgttggcttactgtgtcaccttgggcaggtctcgtcatctttgatgtctcacagttgcttcatctgttaaacagggagctcagtgtctgtttgtccagcttctcagagttgctgtgcagctcggatgtggcataggaaacagcagacacagggagagggcagcataaggcactgtagggagcagtggccacattttctggtgagtcctgtggcaggaatgtttgtgcattcagcactggagcatttactccctgtctgacactggggtagctgccatgagggggat

SEQ ID NO: 39623 - DNA, 2300 bp, Homo sapien
gggatgccaatctggaggaagtctgctctgtaagaaggaaacaggcccagagagtggaagtgacccccaccggtgggggtcctaatttctgaaaaacaactcaaggacatatgtcaagatgtcatcttcagtttctataaggaagctaacgttttgtgactcttatttgggtactattgtttaaactattactactttcttgcttagcaggtcattcattcacttccctaattgctggttgcagggctagctaggtgcctggaatttcccttgaagggactcaaatgtttctttattttcgtgcattgaatggggggctggtggcagacccctaagagaggttcctgctctgtctcaacacttgtagccagtggcaaatctggaactagaatactggtctcagcaacaggaatgtattccacaagccttcgtagaacctcttctaggtactcttctagaaaataagctaggtgtggtggtgcatgccagtagtctcaggtgtagttcaggtgggaggatcccttgaggccaggagtttgaggctgaagtgcgttatgattgtgcctgtgaatagccactgtactttaacctgggaaacatagcaagaccccgtctttaaaaaaataaacaggagaatgagactccaaagtgttgatagctagtgatgtgtggcctctttatagggtgtgtatgattttgtattttacaaatccttctatagataatataaccaaattaacggtaaaaactcagtaaggtatgcaggcaactagaaaattattaaccctattttatagacgaataagtcaaagtccagaaacagaaaagtatcttttataaaaagtacacatgaagttagtgacaaaatcgaatctcagtccccagttcctgctgtgctactgaggctaaaccgcagccgggcctgtggcaaatgtttaatcagctgttgactgaagaaaataaggtccgcctgcccaacagcaaccgtttgtagagtctcagaggcccagcttctgtctgtatctacctcatgccccagaggcagcttctagcagctccggagagcatcctgccagtgggagttgacccagctgcgccccctttgagggagaagtgtgaggaatttccttacaatggggtggggagttgcgaagatactccttcctgaaggtctggcagtctggaccggggtggcaactgggcggagatgattccgctcacgggaaccctacctagtaacccgacctagtaacgtaacctcagagccgttcctcagctagaaaacaaagggattaggccgggcgcgggtttgtaatcccagcactttgggaggccgaggccgcagggtcacttaagctcaagagttcgagaccagcctgggcaacatggcgagacccccatctctacaaaatatttaaaaagttagcaggttgggaggttcggttgagccacgggttcgaggttgcactgagccatgatcgcgccactggggtctgagcgagaccacctccctgaaacagaaaacgaaggggtcgggtataatgatttctaaggtccctcgtagtgaaccctaaaagttatcacaccccacggtggggctatcgcggcttgagggcagccacagcctcagccggggtttctgtccgggccctgatgggtccccagcagggagaaacagcgtccggcgcgctgtggcgctcggcgaacgtgcgctgagttcaggcgttacaacggggtcgcacgcggagtccaggcctggcaggggtgccaggacgccgccggccatctggggcccgacctcccaaggtctcctccccgcggccggcggctagcgcgctcacggcgcccgggccttgcgcgcccgccgggggcgaggtcagccctcccccctcggctattggctccagagaacaaaggagccgccccgcgggctgctccgatagggccgggcgggtcatctgagcggcgcagccaatggagtggctgggcggccccggggatggccaggcccgccagccaatcaggcacccgtgcccgccccgcctgccccgggaatggccagggccgggagcccggtgcccaagtcgccctcggggtggcagttcccgttaaccttagccacaaagtcaaaggtatttatttccccgtcgcctccctccgagtccctctgcattttgggcggggaggggcggtgcgagggatggaccagcgcccggccccgctcctcccgtgctgcctccgcccggcccgggctggggcggagggatggggcgggggcctggggtgccccgagccccgcg

SEQ ID NO: 39624 - DNA, 2300 bp, Homo sapien
gacagagatagagcttattaattagaagtttctaaacaaaatgctcttgaaaaaagtgggtgtctcttcttctctttgcaccagggaaaatgactttctgcattttctagattcatattcacccctcccccgacgtctcttgtcagggtccagattcccagtctgtgtgtgtgcccccagtgtctgggctctgaaggggacctaggagagggagtctgggtctctgcgaggctctcgggccctggggtgggtgtttctgtgggggtggccgagccagggtgcctgggaggaggggctgactgaaatctggaagagcccctccctgaggcagcaggaaggacgagctgtgcatctctgtggggcagccacatctttgctctgctagggggtacaggtgcacgggaccacatccctgtccttaggagaggtgcacccccagcgaggaggagatgagtcttcaggctgcacagctcctggccaggcagggcagcacattcctgccacctgcatttgttacgggccctctgtgtgcccggctctgctctgagccctgcggatccagcagcaagcatgaagagctcctgaccttgctgtggtggggaacagaaaagttaagatcatgtcaggtggcaaaaatgttagagaggaaacgggaggtggagttaggctggtgactgtaaataggagcgccaggggccagcacggtggctcacgcctgtaatcccagcactttgggagaccgaggtgggtagatcacaaggtcaggagttcaagaccagcctggccaatatggtgaaaccctgtctctactaaaaatacaaaaattagctgggtgtggtggcgcacacctgtaatcccagctacttaggaagctgaggcaggagaatcacttgaacccaggaagtggtgattgtagcgaactgagattgggccactacactctcagcctgggcaacagaggaagactctgtctcaaaaaaaaaaaaaaaaaagaagcacaagggatgcctgctctgagaaggggacatttaagctgggagctgatagaagtgtggggggcaagccaggcggggatctgcggtgaggggacagccagggcaaaggcgtggggcatccacacagcagtgtgacctgtcctgtcatgttccaggcacagagtgagccactcaggaagcgctcagaagacttgggcataaaaacaaaaaaagaaggccgggcgcagtggctcacgcctgtaatcccagcacttcaggagactgaggcgggcggatcatgaggtcaggagatggagaccatcctggctaacacggtgaaaccccgtctctactaaaaatacaaaaaaatagccaggcgtggtggcgggcgcctgtagtcccagttactcaggaggctgaggcagaatggcgtgaacctgggaggcggagcttgcagtgaactgagatcccgccactgcactccagcctgggcaacagagcgagactccatctcaaaaaaaaaagatgaatcctacatcagtgaactgggcatgggctcagcaatgcccaattgaccgtgtgtgttcttgtatggagatggctggccccgaagctccccagagggatttgtgctagaacatggatggggactttgaaagagggggcgggtgacggaggaaacgtgtagggccattctgccttccgggtgcattcctcatggccagtcgcagacatgtctctaaccttactccaggctcctgcttctcaggcgtggtgtccatcacatgccgccctgcgaatgttgagggtgtgggctctcgtgtgggagttagaagacctgggtttttgtccagctctgccattcatcacctccatgactctgggcacatcaggggtccttcgtggtctcagtttcctcttttgtaaaatgggaattatggctgttttaccttctcagcaggtatgcttacaatgaaagaacccctgcccatgtcgaatgtggctatggatagaaaagctctttggaaaagagagtgctttatgggatgggaggggggctggggaccctgagttttgtccttgtcccacaggcccattctctttcttctgcttctctttctgacagatggcaggaaagggacacagccggcgctgatgctgggaggcctccagggatggagagtggcctggctggcaacggcacaggtaagagagaagaaagaggaggcaggggagcggggtctcctctgctgaggtcacgtgcccttatcttttctaaagccaggcgcgagccagtgccctcagccagtagctagtacatcccac

SEQ ID NO: 39625 - DNA, 2300 bp, Homo sapien
tagacatccaataaatatttttggaaggagtgaatggtttgatgtccctctccatccctgccagccccctgcccaaggtgtgtgtgtggttgggcccgactctagaactggtatgtgtgtgatggtcaggcaggcatgagcggggtgggctctgctgaggcttggctgcctgaggaggtagctgtgcaggagagagccaaacacgctgcttctattcctgtctggggcatgtctgaagtgggctggctgtcttgactggcttggatccttatcagtctggtgttgcagaagagagaatggatggaatattccacgtggtctcactttcctttctgaaccacccttgctgaagcccgggtctgtgtgtgctcagagatccatttgccccaggctaggagcacagcactccccacacccagttcttgccaggggtgttttctctcttcccttctccaagtcagtttagtgtcttcccacataccctcctcggcctcctgcccccaagaggtcacccctcacgcccttccaaagcagggttggctgagtccctggtgctgacagaagagcccaggactccagcccaggctgtgacctcagatggtgtcttcccagaggagaggagggaactggagatggtggtgatgggtttggggtgccagggttgggtagctgggaggtaggaagaaaggaccccaacatggctctagagaaggaagaagtgcacttgcccccatctcacagcccagatccttctctgtatgcagagaagtgttaccttctgggagctgccacggttcagcctagcttctggtcactgttctttaatcctctgtatctggaaaatactccagttgtagatctatggaaggacatacgaaggtgatgggtggacccggagggccgccctgactgttatggcttactagggtaacagtgccgatgatggttagcactcagccagggctgctgcatctccgtcccgttctttgatcacaaaacatgcagtgtgaaatcacacggggtgttgtacgccggggttgctaccacctacttgagcattcagcgcttaggaccacgggaaaccaaaccaggagggttttcctgggcaccctccacccgacaccagccctaggggctgccctgactctaatgacctgcccctctcctggaactccccttccatcctgcaccgccccagggagtgcttgactgccttgcagctcatcaaaccctgctttaacagggtgggggaggggggctcaggagtcctttgcttttttctctttgccacttgccaaattctgaaatcaagttgagcaagcccacccacttcaggcctcactgagtcccgtctttcattcctgggttagagaaacactgcccgcaaggacagatctgtggaaacactaggtccctgtgactcaggtgccggaggatgcagtgtcagcagatgctgacgagatcagtcctgcaggagcatctttacgacagaacatgttattttccataagtggcctgtttaatgatcaaatcagtcaaatagctgtgctggtaggacttggggttaaaaatgaggcctaattgcagcttttttctccagcaccaattcatgagaatgcctgctcgctgaccccaggtgactgggcctcccacaaatgggtgttttgggtcacaaagggggcagggtcaaatccctcaggcaaagagtgactgaggtgtatgactcactgaccaggccgggactgcacggcattcgttcactaaagaagcctgctgtgtgccaggcatcatgctcagatgctgcccgagacacagcccctacccgaagagctcaaggacctttatggaaaatcattttgatacacacagggcttgggaccatctatgtgttcaactctttaaaaaatggttcccagccccagttctcttagcaaggctttctaattcattatctcatttaatctcgccatgagtcaggcagggcagtaacacatgggaaaggagggtgggggtggggatagtgtgacctgtccaccaggtcctgctacaaattgacagcagatcccaggcctcgtgttagcccaagctgcttctactgtcacattgcagccttctgcaaggatggggtggtactgtccttctcacttctcattctcttccattttaaaatgataaacctgggtcagaggatatttaggaagaggcattgtcattaagtccaagacaagatggtcagatttgttatcctagtgggttacaatccaaaatactctggagcatgctgagattaaggtggttgc

SEQ ID NO: 39626 - DNA, 2300 bp, Homo sapien
ttggcctctcaaagagttggaattacaggcatgagccactgtgctgggttatgaatatttttttaaatgacgtgcattccaaaacagtttcacagggctataaggaaaagaagaaaattaggcaactattttgtatactgcttataaaaaataccgttgattttctttcctaggtgtaattagcttttgagtgggaaagcttgtattcccactttgaatattctattcaaagtcgaggacagtcaagtacctcacattctagagagaacatcaacagtcctcttggcagttattgaaaagggacagaccaactctgtcaccccactctcccttcatcggcccacactcaataccaacaccagtctggagtgcatacttggaagacttgaagggggaaaaggagtgagaaggaggggctgttggaaccttgagctgtggggaagagaggctttgcttaggtgctggggagactccagctcccacttcagccctgtgtctgggcctgctccatggtggtgctgaggcccttctgtgcctgtgaagctggactatgagaattttgtctttcttgtgactcccttttccacagatcttggagttcaacaggacacacaagtcctagaacatttaaaaacataagtaaatccccctccttctcccacctggagaacttagaatcgtcatgccaacttctggaggcaatggtcttcagatccgcttggctgtggccaaactacagggtgtcatggagaaacacagtctggtgggagggggcagatgatgaaagcagaagacaggaaagacaaagacttcttggtgttatcttccatggtgagtgtgcagtttccatattctccagctatgaacttgaactcaatgggagaaatctcccagtaagatgttatgtgggtggtggccgagtaggggtgggttggtcgctgtgaactgtctgagactctcctgtcttaacattggagaaatggagacttgaagaggtgaagcaaatttccctagatgacttgggaacgttgggttgtggggagttgggtttgaacttggacattcagttttgaatccacgtgcttacagaggggtagagaaggctctagggcatgagagtcaattactcagcagagaagggaaagggagaagatttcacacattcctgcccttctgagttgatttcaatcctatctgagtaatagacatcattatggttaatatttgtctctgattggtcgtctttgttttgactccccctgaattaaggattcaagggcaagtagtttatttgagagtggatcccgagaaaccctggtgggggagtgggaaagtgagaaagagaggaggccactggaggatgactggtaagttcatttccactttgggccactgagcttgatcctgctggggaaccctggcaggtacgtctcagatgccaaccatggagcaagaacacaggggtgttctttccatctggccttggtggcagcatctcccaggggcactgtgtccctggtgctctggtctgtggagagtcataggtgctcttgttaagcatctgtgtgcacggagaggagagtgcttgggagggatagggggtggcatcaagggcatctgcaaacctcaggcagctggaggatggccaggtggctgcctctctgtagctcgtgtcctgaagtgtctttctgtgcccacttatttgtgctcgaccttgggctgcaagtttgttgatagttacagggggtggctccagccaccgtgttgggtgtctcaccctgtccaacccctgatctttattgtggaccaggctatagacagatctttgtcagctgcccctgtgagtcttctgtgcagacaccttcctgtggaagagttggtctctggtcactgtttcaagtctctgctgcggccacagctttcttatctctcactttggggatctcaggaaatgagacaccaggaggtgtctgctgtacaaaatcctatttgctcaaggaacctgcatatctcagctcatgtttcttaatcatttttctgattctaaaaagtcgatgacaaaacttcgatagaaacacagttctagcatttgggattggaggaagaagtgtattcagcattctaccttcttcctgattctgtgagcttagacctgcttccactttcaatctctctcattgcaggctgaagaggactggcctttcagtggccctcgtggaacggtaggaagctgagctggactctctgccacatcgttcggttcccacaacagcctggtaggtcggggtagtcacttccat

SEQ ID NO: 39627 - DNA, 2300 bp, Homo sapien
acttctccccagtgtttcacctgcctgctgagtcagggctctcggcccgctggggagcattttgctgcacttgtcattagccacaaagccactagggggcagggagcccccatcctgcctcagatcggtgccaaaccagaacccggcagcctgccttctgcacggaaatcaattctctaggagctgatttgctgaaagatcattttgcaaaatggtcaactcagcaaataatcgacttgctgaatctttgaggagttatttgcagcttcagttttacttagagcaatccctggatgcttaatatttcatttaagaatgagtgagccttttcttctctattttggggaaacagtttcttgctgagcctctgcctctgttagtaccccagcggggatgaactgcagtacctggcttcgggtttttgtcttttcattataatgagttggttttatgtgcgttgacctactgtaaaggaagggtggggttcttccaaaatagatcctctttcaatgaggagacaggtagagtgggacatgggaagggctttgtcagctttccccatcaagatgtgtcctgtgtgtccccaaagctcttcttgagccatcccagcataaccagggtttccctcaggttcataacaaggtagagcagtcctcaaggctggcgcatgaagaccagtccagggggagggtggatccctcgggatgtgataggctgacagcagctccccaaagcctgtggttttgactactgtagagacttcatatctgaagcatgcccctctacttcagccacccccactgctcctccttctgcggggtccctttggaaagcttagcaccacctcagacatttggaaaactaacttgagctccagtccctcgaggccctagcctctgcatcctgtgaagagggccctgctgtgcagagcgcagagggtcccgcactcacttggatgaacctctagggcattctgctcagtctcaggagggcagacactgtgggactccactcacatgagtatctgacgttgccaaaaatcatagaaacaggccgggtgtggtggctcacacctgtaatcccagcgctttgggaggctgaggcaggtggatcacttgaggtcaggagttcaagaccagcctggccaacatggtgaaaccccgtttctactaaaaatacaaatattagccgtgtgtggtggcgggaacctgtaatcccagctactcgggaggctggggcaggagaattgcttgaactcgggaggtggaggttgcagtgagccgagatcacaccattgcactccagcctgggcgacagagcaagactctgtctcaaaaaaaaaaaaaaaatcatagaaacggaaagtagaacggtggttacccgggctggggttcggggaggtgagttggggtgtaatggggagagtttgggtgctgcaggatgaaaagtcctgcagatctggcacacaaccatgtgaatgtactttctactgtgggctatacacttagaaatggttaggatggtactattaatgttacatcatttttaccctagtaaacattttttaagaagtcttcctccgtgtttgacttccttatgaagtagagaccaggtagtttggacactatgttctttcacaaaagggatttcattttgtgaaatatttgaaagcatcgaagtctagcatttcacgttttgcaagctggggaaaagcattcattccctgagaagcagcgttggtctgtcaggcttggagttccccgggttgtgggttttagggaagggaagggaagcgaggaaggacttgtgagaggaagtcctaaaggccacttaagggcacacagaggcccggagctggctttgctcagagcttgtagcggcgccacaatctctgtcctctcaggaacaggaactggcttgacgtccttttcctgccctatccaagcccctgttcttgcagcccttctgaagctcagcctggcaccggccccggcgccccagcccctggccaagcctctgctgtcatttctcctccctcctctcagtctgcagctgcgggacgggccgggctcctcagtttctgctgtgttgtgaccccacgaggcgctcagcacccagggaaggcgcgtgtgtccccgatgctggctcctccctgagccccgacggctctcgaggttctgagcctgtggcctgcacagggaacttcctctccgactgcatttatgcctctgtggatgtgaaggctatttctagaaatctcttcctttgcagaaacacccgaaaccctcctgccaggaaga

SEQ ID NO: 39628 - DNA, 2300 bp, Homo sapien
atcagaaaaatataaagaatgaagaggttatggcacagagtgatcagataatgagtgtaagcacattgtgaattggcagctaagggatctttgccctctgctggagcagttttgatggagtggtaccaatctgtcccagtgactgactcctccctggactcccacaacattgtcctcatgtgtgtcacattcttatctgcttgctgcatctatgccttttatttgttgttgttcagtcttttcatacaagtgacaaaaaggatgctggagcaggcttggtgagaacaggaagggaacccatcaaggggcagagacactagaaagggtgtgaaataacatgaataactttctgacttcaccatggaccatggaggggtggccatccaagagggtgctgtacgaagctttcatagggagagccactctcttgtagatctgcataggtaaaccttcccaggtgagggcatcatggccagctttgcagtcttggaaactaagtttttaaagagaggaacacaggatccctggtgtaaccctgtgtgggaatcacagctacttgctgatgtaccctaaagggaaaacctgtgattatggtagaggggagtttttttcctcgcagcgacagttttgccatgaatttccaggcctcacttgatttcaggtcagggtctcttgggcaatccagaagaaattgtacaaggcaggatgactgaacaggtacagcaaatcagctcaaaacatatgtcaaacaaggtggggcctgaataaataaatacagatgagtagttcacttggctggagcatacagtgtgttgaggagagtggctacaagtagagctgactctgtgggctggaaacagattgcaaagagcttggcacattagctcaagagttttgggtttgacttgcctggcaggtggaagcctttgcagggagaatattaaatccaagcagcactatctatatactgaaatcgtaccactttgcatttaggtaatatgtggaaacttgcaaggtactttctcatttgtcatctcatttgagttttataaaaatatccttgaagtaggtaataccgcttctatcttatggattaggacactgagactcagaatggttaagtggcctctacagatctcagctaatgcgtgcagagcagaaggtgaaccaggtcagagtccaagaccatggtcatacccaccacatcatgcttctctgttaacttcacctggcactgggtgcatcacgagtcccacaaatgaagttttctagtttgtcttctgtgatattattttcagagtatcatgtataccatatattatatttgcttgtatgctctagacatttcattgcattttatagggcaatgcttcccaaacttggctactcattagaattactgtgacatttgatgaatacagatttctaggatctttcctttgagattctgatttaataggtgtaggttgggtcccagagatctgtattttttaaacatctgaccattactattaattatgagatttccttcaactttgaaacatgcttatttagtatggtttctaacatatctgacttcttgtggttcctaatggtaaaaaaaaaaaaaatttaaggaactaaaagagatctctaggtttgtctcagagatgagggaacaggaagatcctgggaaagtgtttcttgttctaatctagtctgggtctagaacttcagtagctcaaattcattggcggcaatttgagtcaaaaagagaatgtcttttcttgctgttttcctgtccactctgtgtgggagttgaacattaatgtgttgttttctgtcccaacagaacaagcgggagcctgtgtcaggaaagcatgtcagagcagagctgccagatgtccgaactgcggctcctcctcctgggaaaatgccgctcgggaaaaagtgccacaggaaatgccattctgggcaaacatgtgttcaagtccaagttcagtgatcagacagtgatcaaaatgtgccagagagagagttgggtcctgagagaaaggaaggttgtggtaattgacacccctgaccttttctcctcaatagcttgtgctgaagacaagcaacgcaacatccaacactgcttggagctctctgctcccagcctccatgctctgctcttggtaattgccatcggccatttcacaagggaggatgaggaaacagccaagggcatccaacaagtgtttggagctgaagccaggaggcacatcattattgtcttcactcggaaggatgatttgggggatgacttgctgcaagatttc

SEQ ID NO: 39629 - DNA, 2300 bp, Homo sapien
actgcttgctgatggccttttctccggatcttgttgcaaacacagctgtacccagctaaagaaggcaggagagaaggtttttgaggatggtgtgtgtaatcggtcactatttactgtgtgagttccactggagacaagcacacttgctccaatcccagagtctacacctgaccgggaatttttcattttggattctgattgagggaaaatactgatatccaatgggctataagggggacctttcagtttctgttaacagcatctgagttctatgcacgtcctggaaaggcacctgcccactggctaattcacatgttgtaatcccaacactgtaaatatctgacttcacattatacccatgtaaatcctgtctcagtagttctggactcagccatggctgcactaatgtgctgaactgtgggaaatcatacacagccctatgcctctgtccatgcttaaccaaactatgcagatgggacaggccagagagggtcactaggccatcaccagaaatgaggatatggctggctttaattctcctgtgaatacagccatattggtagagatagttcaatcctctcactgctccaaagagaatgtttcttattaaagttttactcattccttcaggaaaataggtcctcaagagttgtcttgctgaaccataggccataaatggagaaataacccaaagccagctgccaacagtgaaaactgtccaataagttgtaatattgggatgccggaaaaagtgggatagaatcatggctttctgtaaaactttcaggcgttctttattgccgttttccagatttgtaatttttgtagttaccagcgttcccgtaggagtatgccgtgctagatggacagaagtcaacttgtcaaatcctcttcctatttctacttggagctcgtagtgagaaacgttggcggaacatactacttcactggctctagtggatggaggcgaccaggaaagggttggctcttcgaccaagtattgatggatactggtttcagacttgtttttcatgtttgagtgattcaacttgtgttcttgaactaaagctcacagaaagtgacaaaaatccaaatattccaaagaaggcttttgttttatcttcctttgaagatgcagatatatcctacttagcggcgacgacggccagcgactccctacaggctgccagtggtgcggacctgggcgggtgccggagcccggatcacagaggggcaaggcgagcgctctaggcccactcctggcgtggggcgctggagggtggcaaggccgcgacaggggctgtgggcttggaactctaaacatagtattcttacgtagccaactggaatatctggtcaaccgtgagagctttgggaacctgcctctcacctcaagaaacctccagagcagattggaaccatccactgggtaaattctggaaaatctgtctctgcctgagactggggtaggaagatgtggggtagagaggaaggtggggaagggatgtaggatctattccttgggtgcatctttacttgttaggtcatgcatattttcaaacttggaagaattatacgaaaagcaactagagaaactatgtgttcatgggcagattatttttccaggcgtcaccttcctttttttcccttggttcctaatgatttagactctgcctttgagcctcagtgctgttaacttttgaatgagtaacttgaggccttcctgaaagactataataaaaaacccatattatacaatcactaagaacccccagctctacgcttggaaatggcaaggtatatgcctgtctctcttcttccccaaatcacccctcagcctcccactccaccctgggaagacaatcaggtcctgtgccttgttttctaggcaatatttgggtcatttaataaggctcttttgcatccatcactataacctgaagcgaaaaatgtagctttggaaatggtgtttatagcaggcccatgggcaaaacgtttcaaccgggcaaaactgaagcaatcaccagattatggagccgtatttctgtttctttaaagacaaacatttttgtgtgtgtggctccacccagcctgagcttcctgactgagaggttttggtggcggtacagacacttttaactcacagtaaaagcaaaagcaacagctcaagcagcctccttggagaaaacctgaaaattcaacttgttcaagagaaggtgagcctggctgagaagagggtctggtgctattgggctgcgaagggcagtggggacagggtgtgtggctggagtggactctgc

SEQ ID NO: 39630 - DNA, 2300 bp, Homo sapien
caagcatccaagtccccactttctcgtgcctgatgaatggaagcctgaattgtcccatatttaacgttgggaggagcctgaagcatctctttggaataattaacaggtggacaagtctgaatttttaaccgtaattaactggtggctgagtctgatttttaccatagttaacggcaggttgtgcaataacaggtgccgcaaacggcatctcaggctcccatgcctgcagttcacaaggcttaggtgggggtggccattccggagcttcccctgagggtgcagtaggttgaactgtctctttcatatgtttttggaggttagcatacataacctcctgattctcccccttttttaactggagctagatgttgaggtgatcaggcccaacccctttaatgcctgcatgatctcgttcccattcctgatattaataacttgtatactgtatgttttgccccttttcttgatttatgtagatagaggcttatcaattttattaattatttccaaagaattcatgtttgattttattggttttctctattttttttttctgtttcaagatttcttccctttagtatttccttcatcctccttactttaggttcaatttgctgttccttttctaaatttttaatgtggtatcacaaattattgttttcatttctggatctttaatgtagacatttttgtctacacattgctttattgttaaagcattagatgaaacgtggtgctcactgcaaatgtagtccctaacagagaactttcctactgcagtgatccctgtaacctgaataaagattccctaagtaatgatccagtgctttaatagtactaaaaataaatactatattttgcatcaatttctgtaattaaatagaataatatataccttctagccaggtttaggcttcagaaacaaaatataatcctagtcttttaaggtatctcagttcagaatcgcggagatgctttctcatgctgcctgttcttttggacttgccttcgtttgcctgtcaaaccaagggaccaagtggtctttgttatttaagtcatgttgctctggaatgtaaattatccttactgttggtgcaagatgtattccattgccttgttctgctttttagtgtagccatcctgtgcttgtatacccagggccaatcacattctatcctcaaagaaatgtatgtctttctcttacagttctctttagaattattagcaattttataattactaaagtgctatgtaattctaaataaggtctcagctgtggggtataatggtaaattgagaccccttttacaatggaaaaataactggttataacggtgagctgggaccccattacaatactctcaaagtttccattttagtggtaagtagtgtcagatgtcagtgtttagaatatttcagtggttccaggaccatctcaggaggtgaattttgggcccatcctagtcagtccagtgaaagtcatttactctcttttgcttctagcagatgactcatggacataccctggaaataaggacacactgtggactcagaggacatacctgaggtactgggagaaaggggtatgggggcttagctgggaggcctgttgtgctgagcaggggttcaggggctcaagggtctttcagaataactgataactctctagttttggcccagaagtttcttccagaatgtcacagcatgacccatgttttttgtctcactgcagagcctttgcaaggttcagtatggtagccaccaggcataccaagctgaatattccttctttccttctggggaaaatgcctggtgcaagttgttctgcctgactttgccttttagaattctgacaatggagtagctatttaactttaaataaattgaaacaaaataaaatttaaaattcagaactgcaatcacactcgtcacatttcaagcgctcagtagtcacgtgtggctaagggtcaccatcttggacagcacagaacaaccccatccctgcagaaagttctattagagctgctggatgatcaggtgggcaggtcccttgcacaagtaaatctggacagctcctcccctcacttcctctcttctcctgtttctcaacatcctggcttagtattgtgtgcaaaatcagagaggggtgcaagatcctgatttttcaggtaagggaataggggtgtgtgtggtgggggtcgggacgaatgtgcgattttggtgaggagggacctgtatcttaaatcgtctggtaaacatgttttcagactatattctcgctggttcccgtttcctggctt

SEQ ID NO: 39631 - DNA, 2300 bp, Homo sapien
atacataagtaaataaataaataaactgaaacaggagtagagccataaactcaaagggaagattggttgccccaagagcaaatgaagctctcagccatactctctggagcctaaatttggaatcagttgtaaagtgagttgtagattgaggaatttctggattaagccagaaatctgaaaatggggttgaagtggtctcagtttagtagtaccagcacccccttgtcagttcctgataaaaatgtacacaaatcttctctggagtaaagccaccttgatttcaatcccaaggatttccatacttaagttcacaatcaaagactgtgaatgtaattccagaaaagaaatcaccaaaagtgagagtcagcaaaaaataaaaaacaaaccaaaagaaccaacatcagatttatatgctgtatcaattagattaggccagattaccttgcagtaacaaacacttcccaattctcatggctaaacgctgagctgattgatccctggctcagtcaactgcaggtctgggcaactctccagagtcagcttgcagaagatggaaatgattaaaattcaaaatagatggttaatttcaattatgggtggagtaataacattctaaatactttctaaacacttaggcaatggaatggtaaagatcaacacatgacttttaagaattaattaagtggctgggcgtggtggctcacacctgtaatcccagaactttgggaggccgaggtgggcagatcatgaggtcaggtgatcgagaccatcctggctaacacagtgaaaccccatctctactaaaaatacaaaaaattagctgggcgtggtggtgggcacctggagtcccagctactcaggaggctgaggcaggagaatggcgtgaacccaggaggtggaacttgcagtgagccaagaccgcaccactgcactccaacctgggcgacagagcgagactccgtctcgagaaaaaaaaaaaaaaaagaattaatcatgttacaccaggcgcggtggctcacgcccataatcccaacactctgggaggccgaggtgggcagataacttgaggtcaggagtttgagaccaacctggccaacatggtaaaaccccgtctgtattaaaaatacaaaatattagccgggtgtgcggacgcctgtaattccagctatttgggaggctgaggcatgagaatcgcttgaacctgggaggatgaggttgcagtgaactgagatcacaccactgcactccagcctgggtgacaggatgacattctgtctcaaaaaaaaaaaattaattgtgtcagggtatttacagaataatttaagtagaacattaaaagatatatatatgtacacacacacatactatgtaacaattttaataaatacaccatgattatcaaccagaacagaaccaaagaaaattagaactattatagtagattgagtggaatttttttagggaatcttaacattttaaaatcatgtggtaacaatatcatcacctatgctcctatgttctgaatttcttccttcaatggcttccctttagccacagttatcagatctgtcagtaaagtcctagaaaacatgtttttgaggatgctgaggtgttttctcccttggcctgtgtttaaaatattgttcttcccccataacaagtgctctctttaatcctacattttagacattcttttgtattttcccttttcttatagtgcagatcttctagaagctgtaacaattgtaattaccaatgattcatgccttagaggtaatgagtgtcagaccttgtcctgagagaaactattaaaggaaggagaggttggggaagaaaggagacaatgactgtttgccccaatactgaggcatagaagttccctggggaagaggtggggttcagaaaagagagatcagggaaagtcactcctcctgacacaaatctttctgaggcatctgcctctttttaagctctgagttctagttatcctggctcaggataaaaataatcccaccactggtatcctccctttttctacttccgaggctgcaaagtgcaacagcagactcttctgactcaggaaggccggtgctcctacccacttcctgttcctccatctccagcggacactgctctttcaagggcaggtctccagcccagctctctgaaaacattttgctgaaaatataagcaaacatcggccttgtcctccttgtgttcatacactgtggaagcttttctctgcctcctccgtgagagtgcgtggccgggagaccagaaacgtggtcctttctcttgcc

SEQ ID NO: 39632 - DNA, 2300 bp, Homo sapien
gctagtggctgccatattggacagggcagacagtaaacatgtccatcacagaattctctattgaacagtactgctttataaataaacactttacaagaaaccacagaacaattgtcaaatacatctcaatatgactgcaggaaatctgtggtctattctttcggcttgacccattttccaaaattgccttgaaccatgggaataaaatgaattttaaaatgtcatagtactctaaaacatgcacctctactcagcccctgccctctccttcctcacctcctcccaacatctatcttactcctcctttaaggctgtagtcacatcacttactagaaccatgggacataggggaaatgttccatgtatgctcatgttcagaagggacaggagtgagaaggcttgaacaagaaatttcatgagggagatatttaaaactgtgcttggaagtctctacagatgatctaaaagatgaagcaggagaagcaatatttgcatctccaaacctagaggaacagtgcaaaaacagaaggacctatctccagttgctgggagtgagaccagttgttagctctcagctgttgagccgtcagacctgtccagaaattagcttatgctgaagagagatgccctatgtaagtcaagtgtcttttccagaggaagtttgcatccgatggggattataaagttctgctcactctccttcattctgaaagtccaaccaaactttagaactccctgtagagtctatatttgttgtgactacatctcagtctcacttctccctgcctaatcctgggttcttcccttctccctctagcacatttcctgagaagattccctaataaacttccttcatccattttatcttcatctcaacagtctgtattcctaggaacccaaacctttgcacatgtacatgtacatatcacttatgttaggaaacgcagtgatgtaatttgcaatattagtaggtcaaaaggaaaaagacatggaattatatcagtcaacgtcaaaataaaattttctaaatttataccacagataaaagactttaatgaaataggactaagcaaagtatagccacactgattttaaaataaactaattaatttccaataaccaacatcaatattaatgataagatattaggtgccctacaggtaaataaataataaaagcacattaactcacttttgaaaaggtagcaagcaattgtaattatacaagagaaagcaacataagatatttttggaaacaaggagggaaaattatcactatttgcaactgagtctatgataaacctggaaactccaagacaatcaaaaggaaatgttttaaatgctaggatgtggagaaataagaacacttttacactgttggtgggaccgtaaactagttcaaccattgtggaagtcagtgtggcgattcctcaggcatcttgaactagaaataccatttgacccagccaacactccagagtattactatagacatttcctagacaatttctccccacagggaggttctctgaaattacagagctggacagggaagaaaggcccagaatcctagaagccatgaatgagttatgtaaaaatgttttgatggttaatgatccttacaatcagactcagacaaaaatgtcccctctcaggttcccctttctgtgcccttcttcccctgggcagtgcctatcagaggctcctcttctctcccagtggcatctgctttagaacaatccctgctgctggtgtcaatgaggtttaagcccttctcagggggccatttgcatctagacaaacttctaactgttgggacatatcccagctgggaaggactgaaatccaccaacttccttggcattcatgcctttctttccagtccagatgaaatcattaaaacactcttttttcacttttgagaagaagagacagttggcccacatgacagcaaataactactgattaactttccatttaaactgtttattttgcataatggcatgaaagagaatttcaaacacaggcacgtggtggcgttcattagcagtcaggaagctcaggaagattcaagagaggaagaagaccgactggagtctcggttttactttctttttctcttggagctgagctataagacaacaggactgaacagggagccaactgtttctttgaacagtaaatcaggtaagcccagatttacgaaaagttctgcagtgttgatttctaggtcccaagccatgcacaaacattttcatttttcttagaacaaatttgtcctattttaagagaagcaattta

SEQ ID NO: 39633 - DNA, 2300 bp, Homo sapien
ctggcttctgccatgattgtaagtttcctgaggcctccccagaagccaaggagatgccagcatcatgctccctgtacaggctgtggaaccgtgagccaattaaatctcttttctttataaattacccaatctcgggtatttctttaaagcagcgtgaggacggactaatacattttcttcactgcatttataaggatacggaagaaaacaatgaacatgcaaagactggaaagagaggaaggaagcattaatacagggtacaaaaggaagccggagttctagatataattctgagactcaagtgtagtcagggtctgagcttcacctgggtttccacaactgatagtaagtatcaatgaataataataggcaacaaagcccagagacagtgagacataatcaagagctaatagaaatgtagaggaaaataaagacagaaacggttacttttcaataggaagaagatcccagaaagcaccagtaggaaagtggaaatgtgggacgggaagggatagtagccaatgcaagttgcattaatgagcacattaccactgtatacggtgatgaggatgttcccactgcagacaactgggtctcagtcctgctggggactcagcaatttgtatgcagtacatcacagagttgtctcacgtggtggacaacttgataagttgtggtgtttatccataagtcctaactgacattgattgaaatctgctcctaggatatcagctctgacaacttcaggctgctgcatgcattacctacatatacttttgtagtcagataaaccctctgacagagagttatgagtggctgaagtaagacatcatacacatgcatggaaacaataaatggcccggagctgttgaagaggctctgaaagcgtctttatgaaaggtacacgtcaagtatcaaagacttattcaaagctgatctatgtggcttgggctaggatgaggctagtgagaagccctaggcacctcactcttaagaaaacactcactcccagggtcacccacctacaagatctgcacttgggtgacctgagagtgagtgcctccttaagctgtgtgctctagatgccccacctgcctcacaatagccccagccctgccggtctactgggagaatgacaggctccctgtttcagcaatgatgaatggaaacagtggacatgtcagatatccaggagactctgtgcccccaaaaagatgggaaacagtaaaagctgggtctcttccctaccagaaaaaaagtggtctggcatgaaagaggttaaaaagcagatcctatccagtagggtaagactcgggttattgtcttccccatatactccagaaagccaactccagaaagtttaaatgagttaggtgaggtcctatagctggttaatgacctaaccagatatgcagcctgctcctctgtagccttcttaccacccagtgattcgcttttttgctgacctcatgatgctcttgagagaagatagaataactagaactggtgataccaacatagacgactagactaaagcctcctaataaggctaaattgaagatagtgcgaaggtgttcatcctcaacataccagttcaccctcaagtccttcaatagctgggaaagccctcctctctcagagaatgataagactttgccttcaggtttttctggcagactggatctggggctggcactggccacatgaatgtctaattaatggacagatgatgagaacagctattacgttatttgttccggggcaggagactctctgggcctattttatatggggaaatgtccctatagggcaaaggcaactgaagattagctcagtaatcaattttagaagtacagtcaggcctcagagactacaacatccctcccttcttagagcatggcaagatatttgacatcatgaggccctgctggagacacataacctcagtcacagcagaaagtagagtcggtaggagaagtattgccaacccacagctcaatgggaaatgtttctgtctctttaaaccataaccatggggcccaccctgagcttcctgatttctgaagtctgagtgatttcctccgtgtgccgagaggaaacagccttctgcactcacagccgaagggaaagcagcaggttggggcttcttgtggccaacttcagagcctgtcaccaggaaaggtgagcctgagcctgggagtggcgggggctgggggtgctctgagaaccagaaagaacatgattcctagagtgtttactgcctgaacacttgcattctacaaggcatcatgcaggcgagc

SEQ ID NO: 39634 - DNA, 2300 bp, Homo sapien
gaaagtagctacctaagattattcttctagcactaaatgtaactacaaaaggggacatgagggaagagttagagcatttaagttgtatgttttactgatttactcagtaagtatttttgagcactttctagggctaagttctagcaagatcctgacctaaagacagtccctggcctctaaaaagcccacgatctcacccagaaaactgatagagaccagttaacacatttcatcattgactccctggggtctctttgagccataagaggagcctgggaactgctagagaagagataagacttagagaacagatctcaaagcagaaaatcagtccttagctggggtgccagagcacccagttcagtggataaaaataatgtttgcaaatagttcaaaccaaaaggaaagaagagaaggagtttgaagatgttgccagaattaagtgaatttgctacattgatgggaatggttagcttcggtgcccctcactgtttataagattttgatgtgaactctgttggtcaagtttttgaaagattccagccaggtgctgggggagtacctggtccctatctagcaagggtgaaatcctggtcagattacagcccactttctgccctgctctgctcaattcacataaattatgagtgctgactaggttgaaagtccttgaagaatttaaaaatgtaagggcgaataaaaatcaaaaataaggagaaaacattaattctcttttctggggaaaaaacaaagtggaaaagaattacccctcccttcttagagcattttctttagaaaccttgtaagtgtgaaatctttctctaccctttgtaatgcaaatctttttaaaagctgtttgacagcccagggctgtctgtagagcatctggaagccatccctttgaaatgcaaacatcaaggaaggtagcgtccccacctcccagtctctgtgtgaaaataggggcctaatttaggagcctaacttaggtaggagcctgacatctgccagcacctttctgagttgcaaatcttcctcttgccatagaggatgtgagaagtttacttttcctctggaaagacaattagccaacacagatgattactgagtgaatttaggatgaactatgcatgtcaaagggtgctgtcaagtcctcttacttgaggattagttatggtttaacttgagaacacgtgtgtaataggtggcacctgcctggctgtataaccaggtggcatccctctccgtctttgcaatctcttcctggattgtctgggatccagatcacattctggttcaatggacattcaataataaaattgttttctttctcttctgcctctgtggagaggttttctgggctagcaggagattgtttaaaattgttttcccatcaagtcttagacaattgttaccatatgactgtaagccccacttcaaatgtcaacagaaaaggatatggggattctctgggccatgacggccctccgcctaagtcccactgtgttctccatcgcataattgccttatgtccactgccctaaccttaaatggcaatcaggtttatgtccactgccctaaccttaaatggcaatcaggtttatgtccactgctctagccttaaatggcaatcaattcaaaaatagaggttctatcaccctgctttcaacccttaccagataaactgacacgtagactccacaatgtccccacagggtgggctccatcacgtgccagacagcttaccagggtcagtcacgagcccagagtcaaaccctgcaagggcttgttctggtcctctttggaccagagtgcctttctgatcctggttagcagaaactttccagaagcagagcctgtgagaaggggcccaagagtgctgggaggagaaggtgccccggtgatgggtgctgagggcagcagctgctgcccagaactttccagtcactagggaccttttctgaacttggaagtgggagagtctgtaattcccttcatatctccttcttccaaatactgcttgcttgaaacagtcaaaaaaaaaaaaaaaaggaaatgggatggggcacactgtcccagggcaggctcatgacaggaagtgacccgttaaggaagcagcacatcgctgcattcggctggttttcagggtcttgttcccaatcagtttccagccaacaccagggtgtcctagtccgcagaggtgtgggggacacactccataatctctacttttctttttgtgcagctgagtcatggagctttcagccccagcacatggctcctccttaactgcgtctgctcaa

SEQ ID NO: 39635 - DNA, 2300 bp, Homo sapien
tttctcttgaaaatataatttttttttttttgagacagagtctcactctgtcacccaggctggagtatggcccactgcaatcgcacctcccaggttcaagtgattctcctgcctcagcctcccgagtagctgggattacaggtgcccactaccacacccggctaatttttgtatttttagtagagacgggatttcaccatgttggccaggctgatctcaaactcctgacctcaagtgatccgcccgcctcagcctcccaaagtgctgggattacaggcgtgagccaccgtgcccagccagaaaatagaataatttgaacatcctggtttcatataagcacctaaatctgttttccacctgtgttggcactcagtttttcttctgtcctctatgtagccatgaaaactcaagtttttaacaagttaacagaaattgacagttgctctgaatgaatttacaaaaatttaaaataactatttgtgtccagaattttctgcttttttgtagtgagtattttttaaggcttttgggctactgcattgctaaaaaatgaatacttgagttacattagatcttattgatttctaatttaatgacattattatgttttagatgatttaggcctccagacttccatatttttagatatggaagcccaagtctgtcttgaaagtaacagctctggtggctggctgttttcttcttcaccaaacatgttctcagtcaggacagaaaactgccaagcctggcgcttctggaacttcatcctactgtctagtcttttgtgccctcatcacatgcctgttcctgaagcccaggaacagagagaagctcctctggatcaggttcgtgagcctggggagcagcatcttatgattttgtttcactcatttgctgatctcttccgcagcccagaaaatttccttgtgaagttaacaaaatctgggaggctgcattcagaaaagatgacatgcacactggctggtggttgtggagatgaggatgggagggtgcatgagtggcttcaatgggttagtgagtcagagaagggtctgtatggtcactgacgtggggctacttgagatgtccagggggcctcccacatcctaaccctgaaccagttgtatgtcagtgtttgtggtcctaggagtcagatgcagggacatgtggccatgctgaggctgcaggagccaggaaccccaggagatgggccttgcccttcttcagcaaaggtagggctagatgcctcttgttacagttccttctagagcattttgtaactgggaatgtgtggaattgggggtgggtgggtgagaaggatgaatcctgactactgagctagggataaagggcaaaggacactgagcaggctcttgtaataatccaggcaagcactgatgtgctttggaccatgatggtggcagtggaagtagcaagaagtgattggattctcaatatatttgggcagcagaacttacagggttcccaaacaggatgaatgtgggttgtaagaaaagaaggggagcaaaggacagcttccaagtttttgtttcaaagtattgttaattaccaagacatggaagactatggagggaacatttttaaatgacagaaaacaggagttcaatttggggcatgttaaatatgagaggatttttagagatcaggttgagatgttgagaaggcatttggacatgttagcctggagtttaggagcatttggtatatataaacttggaagtcagcaataaattgtaatggcaaacaaatcctcctgccttgtatacacaagagagatattagggggagttgggaggacagcttctaaatatttgttggatgaatcaataaatggaatgaattattttttccagctgtacatggagtttgtttaagccgtttgtattgaacagtttgcaatgtgatcaacaggacatatttggggaataatcgagtaggccagtggttcttggtgtgagctgggagaacttttgcaattggagatgttgtgaaatcctctagggactttctcaagttacaccaccattcttggttgaaattgttgtggtggggaaattttttttgagaaccatcgagttagtgctagcatagaatctaacaagaaatggccctgcatccattctcttttcttctaataacagccccagatttccatttttggacctaccttttcctttttatcaggctaagtgttcatggtggggctctgtccttagttccagggataaagcctgtgacccaaacttaaaccgcagatcattttccccaggccatggaga

SEQ ID NO: 39636 - DNA, 2300 bp, Homo sapien
catgacaggctgcagggcctggggtccgtctggggttctcctgctgcgcgagggtcactgggctctggggagctgggagggtccgcgggcggacggccctgggaaagcccgtggggtcgttctcgcctccagccccgcccggccagggccggcgtgcaagtgtgcgcgagtgggagcgcagggggcgcgcgggggctcggtcttctcccgcccggtccgctcctccgggcggaaccccctttgccgggcccccgggccgcagctggtttcgggaaaccgcgcagcctgggcggggccgcagcccccacccgtgcatctgccgtctccgccctcccgtcgctcccctgctcggggtcagctagtgtccgctctgctcggccgcgggctcccggaggactgcaggtgaggcagggcctccgcggcccgggagaccctcttgccgcaggaccctctgtcacgaggagtccccagggccatgcccccaccccgtcctgtccacaggacgtctttcttcctccaacctggtttccaggaggactcacgtaggagggagggacagctgggtgcaggtgtttctccccagaaaaacggctggagagcgggaggagaggcctggggctggcgcgtcccgtccaccttctgccgcctgcacgcctggaccctggctggagccctacggtggggtggctcctgggacggggccagggagcggcggggctgccggacgctttccccagccccggggcacgggaagagctggacagaggaaagtgttcggggcagccgggaagagcccaccacctaccaggcgtcgggcggcccgcaggggaatctccgtggtgccggcctggttcagatccgactcttcaggcgggggcgaggcagatctaggggttggcgtggggcgggggaagcggtggtcctgggggcccggaggtagctggaacccgaggtgccctcagggcgaggcctgggccgtcaagggaaggtctggctggaatctggggctgggctggaagcagtctgaagctcctttgtacgtgtgcggaattgtctaactcctgtcctttctaaccccaaggaggccaggtgggtgaaagagtgaaactgctttgaaaagtaggtagagtacgaatgggaggtgttattagaattgttaataatatttgatttaaactgtgatacttagccaggatgtccattagaattgcctatgcaggatttattttagagccaggcaagctgattctaaagtgcatgtgaagaagtagtctagcaaaaatggccatgacaattctgaaagaaaaaccacacgaggggatcatgaaacagcccaattagcattaagctccatgttaaaattgtggtaatgatgcctagcccatgagacatgccaatgggcagaatataaggactagaataggcctacattcctaggggaacttcatttctgctcaggagagaattttaaatcactgagaaaaagaggatgtattttccgcaaatggaacgtatctttcagaagttaaacatctgaatgacagcaacagaacttggatccgtgtctcccaacggcgaaggttggtcacccagctcccaaattccagatggtcggcatttaaaagtgaaaactgaaagcataaaggcacttagaagaaaatgtggaagattattttataatctcgaaacggggaagtcctttaaaagtgtaagagctagacaccataaatagaatgaaatagaacatggattgtatgaatatacaagcaaggtcaaaaaataaacttcaaattgtaaagaaacatttgaaactcatatcacaaacggtaattttgtgaatagataaagaacttccatagaaaaaagcaaaacaaaacaaaacgaaacaaggacataggatgtgaacggagagctcacaaaagaagaaataaaaatggccctgaacatatgaaaagacaaccaacctcactcataataagagaactatgggccaggcgtggtggctcacacctgtaattgcagcactttgggaggctgaggtgggaggattgcttgagtccaggagtttgagaccaccctgggcaacaaagcaacaccccatctctctctctaaaaaaagagaactggccgggcgcggtggctcacgcctgtaatctcagcactttgggaggccgaggcgggcggatcatgaggtcaggagatcgagaccatcctggctaacacggtgaaaccccgtctctactaaaaatacaaaaaattagctgggcttgatggcgggcgcctgtagttactcgggaggc

SEQ ID NO: 39637 - DNA, 2300 bp, Homo sapien
cctcccacctcagcctcccaaagtgctgcaattacaggtgtgagccaccacgcctggcccatagttctcttattatgagtgaggttggttgtcttttcatatgttcagggccatttttatttcttcttttgtgagctctccgttcacatcctatgtccttgtttcgttttgttttgttttgcttttttctatggaagttctttatctattcacaaaattaccgtttgtgatatgagtttcaaatgtttctttacaatttgaagtttattttttgaccttgcttgtatattcatacaatccatgttctatttcattctatttatggtgtctagctcttacacttttaaaggacttccccgtttcgagattataaaataatcttccacattttcttctaagtgcctttatgctttcagttttcacttttaaatgccgaccatctggaatttgggagctgggtgaccaaccttcgccgttgggagacacggatccaagttctgttgctgtcattcagatgtttaacttctgaaagatacgttccatttgcggaaaatacatcctctttttctcagtgatttaaaattctctcctgagcagaaatgaagttcccctaggaatgtaggcctattctagtccttatattctgcccattggcatgtctcatgggctaggcatcattaccacaattttaacatggagcttaatgctaattgggctgtttcatgatcccctcgtgtggtttttctttcagaattgtcatggccatttttgctagactacttcttcacatgcactttagaatcagcttgcctggctctaaaataaatcctgcataggcaattctaatggacatcctggctaagtatcacagtttaaatcaaatattattaacaattctaataacacctcccattcgtactctacctacttttcaaagcagtttcactctttcacccacctggcctccttggggttagaaaggacaggagttagacaattccgcacacgtacaaaggagcttcagactgcttccagcccagccccagattccagccagaccttcccttgacggcccaggcctcgccctgagggcacctcgggttccagctacctccgggcccccaggaccaccgcttcccccgccccacgccaacccctagatctgcctcgcccccgcctgaagagtcggatctgaaccaggccggcaccacggagattcccctgcgggccgcccgacgcctggtaggtggtgggctcttcccggctgccccgaacactttcctctgtccagctcttcccgtgccccggggctggggaaagcgtccggcagccccgccgctccctggccccgtcccaggagccaccccaccgtagggctccagccagggtccaggcgtgcaggcggcagaaggtggacgggacgcgccagccccaggcctctcctcccgctctccagccgtttttctggggagaaacacctgcacccagctgtccctccctcctacgtgagtcctcctggaaaccaggttggaggaagaaagacgtcctgtggacaggacggggtgggggcatggccctggggactcctcgtgacagagggtcctgcggcaagagggtctcccgggccgcggaggccctgcctcacctgcagtcctccgggagcccgcggccgagcagagcggacactagctgaccccgagcaggggagcgacgggagggcggagacggcagatgcacgggtgggggctgcggccccgcccaggctgcgcggtttcccgaaaccagctgcggcccgggggcccggcaaagggggttccgcccggaggagcggaccgggcgggagaagaccgagcccccgcgcgccccctgcgctcccactcgcgcacacttgcacgccggccctggccgggcggggctggaggcgagaacgaccccacgggctttcccagggccgtccgcccgcggaccctcccagctccccagagcccagtgaccctcgcgcagcaggagaaccccagacggaccccaggccctgcagcctgtcatgaacccgaggggctgaagttcagccccacccccgcctcccctccccgcctccccctccaactctcaacccacttctccagccagcgccccagccctcccgccgcccgctcgcaggtcccgaggagcgcaggtgaggcggcaccccactcccggcggcccccgggcctccttccgcacgcaccccgagctgcctccgcacagttggaggagcgtaggagggacccccacccagggatgacactccaggaagggga

SEQ ID NO: 39638 - DNA, 2300 bp, Homo sapien
cccggggctggggaaagcgtccggcagccccgccgctccctggccccgtcccaggagccaccccaccgtagggctccagccagggtccaggcgtgcaggcggcagaaggtggacgggacgcgccagccccaggcctctcctcccgctctccagccgtttttctggggagaaacacctgcacccagctgtccctccctcctacgtgagtcctcctggaaaccaggttggaggaagaaagacgtcctgtggacaggacggggtgggggcatggccctggggactcctcgtgacagagggtcctgcggcaagagggtctcccgggccgcggaggccctgcctcacctgcagtcctccgggagcccgcggccgagcagagcggacactagctgaccccgagcaggggagcgacgggagggcggagacggcagatgcacgggtgggggctgcggccccgcccaggctgcgcggtttcccgaaaccagctgcggcccgggggcccggcaaagggggttccgcccggaggagcggaccgggcgggagaagaccgagcccccgcgcgccccctgcgctcccactcgcgcacacttgcacgccggccctggccgggcggggctggaggcgagaacgaccccacgggctttcccagggccgtccgcccgcggaccctcccagctccccagagcccagtgaccctcgcgcagcaggagaaccccagacggaccccaggccctgcagcctgtcatgaacccgaggggctgaagttcagccccacccccgcctcccctccccgcctccccctccaactctcaacccacttctccagccagcgccccagccctcccgccgcccgctcgcaggtcccgaggagcgcaggtgaggcggcaccccactcccggcggcccccgggcctccttccgcacgcaccccgagctgcctccgcacagttggaggagcgtaggagggacccccacccagggatgacactccaggaaggggactgcagaggaagccaggtgcggccccggcttttgacctacctccgcaccgcagcgcggtccttcacggggcaggggcggcgtgaacccgtcgggcgtgagcagcagtcggtggagcgggaggtcggcggtggcggggatgggggtatccggagcgcagccggggcgcagctgctggcacaggagctccacaggcagccaaggactcggtcctgtcccagagcctgcggactgtggaggggaggccgcaggaagagcccgggaggagggggtgaggggtcgaggtgtggggcgctgcttgacccagacgccagggccctgggaggaggatgagggggacagagcagatcttgggcgaaaggggaggttcccgcaggctctgtagtcgccgcagttccagcatggtcagcaccccctctgctacacacattcccctcgtgaggggccaggggtgcggccctgtgaccaggacagccattcattgggtgactttgagccaccactggcccctgacctccccaactccaatgaaatctgcgaaaatcttctgacagccgttcctctctggtgctcccttcctcatagactgtgtccctgacaatgggaacagccgacagtgatgagatggccccggaggccccacagcacacccacatcgatgtgcacatccaccaggagtctgccctggccaagctcctgctcacctgctgctctgcgctgcggccccgggccacccaggccaggggcagcagccggctgctggtggcctcgtgggtgagtgtgacggcctgcctcgtcgggcggcgggaggaactccccacctccagccgcagcagcactctctgccagcctccctctgaacaggacaccgagccagttatgtcttcttacttagcgatgtgattctctggccttctcagtaagagcctggggaggggaggctctgggctgaaggggtgtggaggagccactgaccatgcagagtcccaatcagtggagccctgagtccatcctttcctctgggccaaactcaggatgggccggctctcctctccttcctttcccttctcttttctcctcctcctgcctcttcttctttctccttctcctcctctttcttctccttttctcttctcttctcttctcttctcttctttctttctctctctctctacctctccctctctttttggggttttagcggttaatccctgcagtggcaggtccacctaggagccgggatcttgggtcctttgtctttcaggtgatgcagatcgtgctggggatcttgagtgcagtcctagg

SEQ ID NO: 39639 - DNA, 2300 bp, Homo sapien
tctgaacaggcagggaatggtcctagataatcagatctctccgactgccagcattctgtggcgccatgttggaggaaggcaatcaggagagcaatgccccacccctctcacaggcagtcaagcactgtcctgctctactcaccacagcccctgtccagatggcagctcccgaggtgacgaggagggtgtagtcgcggatgtagaaaaatcctcctaggactgcactcaagatccccagcacgatctgcatcacctgaaagacaaaggacccaagatcccggctcctaggtggacctgccactgcagggattaaccgctaaaaccccaaaaagagagggagaggtagagagagagagaaagaaagaagagaagagaagagaagagaagagaaaaggagaagaaagaggaggagaaggagaaagaagaagaggcaggaggaggagaaaagagaagggaaaggaaggagaggagagccggcccatcctgagtttggcccagaggaaaggatggactcagggctccactgattgggactctgcatggtcagtggctcctccacaccccttcagcccagagcctcccctccccaggctcttactgagaaggccagagaatcacatcgctaagtaagaagacataactggctcggtgtcctgttcagagggaggctggcagagagtgctgctgcggctggaggtggggagttcctcccgccgcccgacgaggcaggccgtcacactcacccacgaggccaccagcagccggctgctgcccctggcctgggtggcccggggccgcagcgcagagcagcaggtgagcaggagcttggccagggcagactcctggtggatgtgcacatcgatgtgggtgtgctgtggggcctccggggccatctcatcactgtcggctgttcccattgtcagggacacagtctatgaggaagggagcaccagagaggaacggctgtcagaagattttcgcagatttcattggagttggggaggtcaggggccagtggtggctcaaagtcacccaatgaatggctgtcctggtcacagggccgcacccctggcccctcacgaggggaatgtgtgtagcagagggggtgctgaccatgctggaactgcggcgactacagagcctgcgggaacctcccctttcgcccaagatctgctctgtccccctcatcctcctcccagggccctggcgtctgggtcaagcagcgccccacacctcgacccctcaccccctcctcccgggctcttcctgcggcctcccctccacagtccgcaggctctgggacaggaccgagtccttggctgcctgtggagctcctgtgccagcagctgcgccccggctgcgctccggatacccccatccccgccaccgccgacctcccgctccaccgactgctgctcacgcccgacgggttcacgccgcccctgccccgtgaaggaccgcgctgcggtgcggaggtaggtcaaaagccggggccgcacctggcttcctctgcagtccccttcctggagtgtcatccctgggtgggggtccctcctacgctcctccaactgtgcggaggcagctcggggtgcgtgcggaaggaggcccgggggccgccgggagtggggtgccgcctcacctgcgctcctcgggacctgcgagcgggcggcgggagggctggggcgctggctggagaagtgggttgagagttggagggggaggcggggaggggaggcgggggtggggctgaacttcagcccctcgggttcatgacaggctgcagggcctggggtccgtctggggttctcctgctgcgcgagggtcactgggctctggggagctgggagggtccgcgggcggacggccctgggaaagcccgtggggtcgttctcgcctccagccccgcccggccagggccggcgtgcaagtgtgcgcgagtgggagcgcagggggcgcgcgggggctcggtcttctcccgcccggtccgctcctccgggcggaaccccctttgccgggcccccgggccgcagctggtttcgggaaaccgcgcagcctgggcggggccgcagcccccacccgtgcatctgccgtctccgccctcccgtcgctcccctgctcggggtcagctagtgtccgctctgctcggccgcgggctcccggaggactgcaggtgaggcagggcctccgcggcccgggagaccctcttgccgcaggaccctctgtcacgaggagtccccagggccatgcccccaccccgtcctgtccacaggacgtctttcttcctccaacctggtttccag

SEQ ID NO: 39640 - DNA, 2300 bp, Homo sapien
acttacccagtatgtaccaccccgtttctcgtaaatgaaggcagcagctccagccagcacagcctggggagagattgagccaggagcaggcttagtacaggaaatgcaactcctctcccacgagagagcctccatgcaggcccttccccagcacacagcttgggcgggaggtttcatgctaagctttattatccatggtaagataattgctgagagggtggagcctggatccaactcctgaggctgcaaaaggccctgctttagtgacacctaagagcttgtggtcaagccaggtgtgagcccctcttcccttctaaaccttcctttttaaacaacaccaagtgctttatgaaagttctagggatggtgggatcctgtggataaaagtcatggggtgctggagaagatctcaatgaagggtgagtctatacagagtgggcactgttaggtctagaagcctgtcctaacagtgcccaataatccactcagctgggcttgaagaacaggaaatctagtatgtcccagtggacaggtggacctgaatcctgtttggctaattctgtaattaagctgggtattttgccacaggctgggtgaaggtaattactctcggcttctgtcagtaaatatgagtgttttagtgctattctgagagtgtaggtaccatgaccagcctacccagctcctgtgcaaactgcacacacccatctgttgacaacaattcctgggtttccattgtgtacagggcctgtggaggacaatgagaataaccagggggtgatgcttcctgggggaccacatactatctggaacgctctgccttccccatctcaatgcaagtatctggagatgagcaggtccttagatccttagttgacattaactgttgaaggcagggagaggcagccagcctggtgggaacagcactgggaagggtatgggagagcagacagtgtgaataggacatgccaccaccgccctcagctgtttgctcatctgaacaggcagggaatggtcctagataatcagatctctccgactgccagcattctgtggcgccatgttggaggaaggcaatcaggagagcaatgccccacccctctcacaggcagtcaagcactgtcctgctctactcaccacagcccctgtccagatggcagctcccgaggtgacgaggagggtgtagtcgcggatgtagaaaaatcctcctaggactgcactcaagatccccagcacgatctgcatcacctgaaagacaaaggacccaagatcccggctcctaggtggacctgccactgcagggattaaccgctaaaaccccaaaaagagagggagaggtagagagagagagaaagaaagaagagaagagaagagaagagaagagaaaaggagaagaaagaggaggagaaggagaaagaagaagaggcaggaggaggagaaaagagaagggaaaggaaggagaggagagccggcccatcctgagtttggcccagaggaaaggatggactcagggctccactgattgggactctgcatggtcagtggctcctccacaccccttcagcccagagcctcccctccccaggctcttactgagaaggccagagaatcacatcgctaagtaagaagacataactggctcggtgtcctgttcagagggaggctggcagagagtgctgctgcggctggaggtggggagttcctcccgccgcccgacgaggcaggccgtcacactcacccacgaggccaccagcagccggctgctgcccctggcctgggtggcccggggccgcagcgcagagcagcaggtgagcaggagcttggccagggcagactcctggtggatgtgcacatcgatgtgggtgtgctgtggggcctccggggccatctcatcactgtcggctgttcccattgtcagggacacagtctatgaggaagggagcaccagagaggaacggctgtcagaagattttcgcagatttcattggagttggggaggtcaggggccagtggtggctcaaagtcacccaatgaatggctgtcctggtcacagggccgcacccctggcccctcacgaggggaatgtgtgtagcagagggggtgctgaccatgctggaactgcggcgactacagagcctgcgggaacctcccctttcgcccaagatctgctctgtccccctcatcctcctcccagggccctggcgtctgggtcaagcagcgccccacacctcgacccctcaccccctcctcccgggctcttcctgcggcctcccctccacagtccgcaggctctgggacag

SEQ ID NO: 39641 - DNA, 2300 bp, Homo sapien
tgaaaatgctgaacatttcttgagtactgactacatggcaggcaatatacgaggtacttcatggtgaatactttgacttcatttattagaatcctcacagcaaccctatgaggccctgactagtgttttccccatttttgaactaggaaactaaggctcagagaagttcagaatttgtccaaggccacacagctagaaaatgtcataactgagatttgaatccagactttctgactcccggttcacctcagttacttgttctataaaaagattttatatttttgtccttcatgtagtttacccccaagaacaggtaagccttaaagatgagaccagaattaactgcccttttcctacaaactttcagctttcaaatctgtacctgttgatgagagaacctccaggtttgtcccctactaccaatgatgaggcaaacacagagagaggaacccctttgactaaagctgaattgtaaaggactaaagccctaacttctcttcgaatgacctgcattcaaatcaagtaagcagctgttcaaagaattcagtcggaggtatgacttgtgcagtgagagttgaaaacgcaaatcctgttctgtacctccctgtttaaagcattgcactggctcctcgttgccttcaggataaagtctatattccctccacatctccttccctactcctccagcattctgactggctgagccaactactcttaccccagtacagacaacctaactttgcagaactactcacaattcctaaacaccatcgaggatcaagcctctgcctttttcccttcaacattttactatgaaaattttcaaaaataaaattttaaaaatttacaagtgaatacttctctatctagacactaaaattaatattttcctgtatttgctttatcatgtatcaattcatttatccatcccatttttgtgcatttcaaagtaagtagtagatatctgcatacttacccctaaatgcttcagcatgcatattattaactagagttccaaatttgtttccagttctttttttctttcgtatgtaaaattaacatacaatgaaattttttcccattgtatgtaaaattaacatacaacgaaatgcacaaatattagaggcagtgtattagtatccttgctatggtaacaaatcaccacatacttagtgtctttaaatgacatacatttattctcttggaagtccaaaatcagtctggctgggccaaagtcaaggtgtaatcagggctggcttcttctggtatctctgaagggacaatctgtttccttgcctttttcaccttcgaaagcattccttggctcatgaccccttcctcacatcaccaacctcttgctttcatagttacctctcctactcactctgatcccctgccttcttcttataaagactgtgattacatcagttccacatggataacgcaggataatctcccatctcaagattcttagtttaatcgcatctgcagagtcctttttgccatgtgaaacaacatattcacagcttccaggaatcaggatgtgaccctcttggagagcaattattcagcctaccacatgcacatctaatgagtttttacaaatgcatacatttgtgtgactcaaactcccagcaagatagccttaccatcacccccagaacattctcatgccccttcccagtctgtcccagtctcaccctcaccccctagagccagccactgttctttttgcctcttcagaacttcctatagatggcgttatcttgcaaatacctggtatggtgtctggcatgtagtaagtgctcaggaaaggacttcatcttttgaatctgacttctcttacttgacacaatgtcctgaagactcatccatgctgcgtgtatcagtctcagtctgttccttttgattgcagagtaatattccatcaaataggccacaatcagatagttcccttattcatccattctcctgttgacagactccagactgcttccagtttttgtgcttttttgtttttgtacaaatctatggggtacatgagaaaacttgttacttatgtgtaatgtatagtgatcaagccagggtattccaggtgtccatcacccaagtacaatacattttgttaagtatggtcaccctcctctgctatcaaacattgaatttattccttctatctaactgtatatttatatgctttaacccacttctctttgttgatggctgctgtgaaacctcagttcttgtgttcctagtttaaaggaatttaaacaggagacacacagcaaaggagatgcagt

SEQ ID NO: 39642 - DNA, 2300 bp, Homo sapien
gttttaaggttcatccacattgtgtcatgtaacagtgattccttcctttttatgactgaatgatgttccattgagtggatagaccacattttgttgactcatttatcaatgcagagacatatgagtcgtctccactgtttggctattgtgaataacactgcagtaaacactctggtacaggtttccccatggacataggctttcctttctcttgagcatatacccaggagtgggattgctgggttatatgataacaacgttaagtcatttgaggaacagccagacagttttccgaagtggctgcgtcatctcaccatgaactgcctgtgaggcttccagtttctctgcctcctggccccacctgttattaccttgcttttgaattctagccatcctagtggatataaagtggtatctcctggtggttttgatttgcatcccctgatgactaatgacattgaacagctttccatgtgcatattggccatttgtgtatcttcgtgaggggaatatctattcagatctttggctcatttttaattggattatttgcctcttattatggaattggaagagttcttcttacattctagatataattttcttatcagatatataatctgtgaatattttctcccattctatgctttgtcttttcattttcctgtgggtgtcctttgaagcataaaagtcttttaatactgatgatgtcaatttatctatttttttttctttggttatttgtgctttgaggtcacatccaagaattagatgtaaagtcaagcagatttactcctatgttttctttttaagagttttacagttttagctcttacatgtatgtctttggtccctttcgagtccgtttccgtgtgtgaaagggtctaactccatcatgtgcatgtggcccctttccctttaaatctttgcaagtctcttttctcgatccatcctcactccattaactttgtcgcagtttcctttgtggaatggaaacagattgtagtcctcaaaatcaggttgttcctgaaactctcttctaatccaaatccccccaattctctgcggagttggtgagcccataactgagaatacataactcacagtcctcttgaacactgagggtgaaagacgttagcattcattgtctttgtatcaatcatcattttaacatggaaggcaaatccccttcctcagaaacaccaaagaccttctggaattgcaagcaagcttcaagttgactaagtgtgttcaccttccttcatctagctgccagtgcacactgaaatggcttgcattgcgggcagcaggaaggatgatgatgagaaatacaaaacccctataaccacaaagcggtgtgcaatccctgagcaaccaaaccttggtaatgggggatgatgaccccttggcactcctgagccacgaacttttcctgactctattctttcctttccaactaggagttaccccggtcaccacgttcgcccttctcaacctgactaagtgggcgttagcactgtccgcccactgcatgggcactacctgccccagtgtcctctcccctctccgctctgtgccatagccttagctaccctggccagctttctcccagccaagtccttcctcctttctgaatctggtcagggtctcaaagatcgttaaaaagccgccaaagtttgcaactcgtcttgagtggctgctcctcccaaacggttctgcctctggtgtcttgttctaggagcggttgaattctctgttttgctgtgggtgccagcctctatcagcccctgccctggtccatctgtcagcttcaggtaagactaccggctaggaaatggccccttgtccttatctctgcctctaaaatatgccacctaaattaacagatcgtggcattgcatggctcgtcacagagaagccaaggcaaattcttgtggaaggcggcacttgtctggaaacagactcaggacaagtgtgctgcacagccagcttcctcaaacccactctcgccactgtagctgcccacagaggcacctcccaagccataggcccctcctaggccagctcaggcctcaccttgtccctccctgcagggcggggtctgattgacttcaagaaggagtcagagatcagcttaagggcaaaggctggaagcagagcgaactgggagcagagcacacaggtgcgttctgatgggtattcgggagagtcaagaaggggctgacctggaggacagaaaagcagtggaaggagggcacagagtgaggggcagaagaaacaggacacagagggaggagggc

SEQ ID NO: 39643 - DNA, 2300 bp, Homo sapien
cccgcccgtcgcccgggatacctgacagggggttgcaagtgtcgctgctcttctcgcagtcctccatcaggggctccccacccggcggctctccggggggcctggggctggagaagggcaccaggcggagggggctggagctgcggcctgggccctcatcctcactgctctcagggctggaggggccactggacgggctctccccccacggcccccccggccggccccggctactcggccctgcccccgcccggcccggccccaaggccgacacctcccctggctgctccgtgtctgtgggaaacagagaatgggcctcagagaggggaggagaacagagaggagggggcgagggtggaggaggggacaggagcgagcccgagagaggactgggcaggaagccctggtttgtccccagtcgcttcttctgctatcttgcacccactgtcaagccgaccaagaactcccaggaccccctgactgcccaagcactggcaatggtgcttcaggggttggcggatctctgggactgcggggcctcagccccatcgttggctccctggccctcctttgttctatgttctttcctcctcagtgctcacagagaccccagccctgtgaagtccaaaaagcctaggcttgccctggagggtggaagagggcttcctggaggaggtgacagctgcaggggccctgaaagatgggcagcatctggacagctggggtgtggagtgggcacactggaggaagggatgggaaggtctgaggcctgggtaaagcagacacggcccaccccgccttccagctcccagcctcaccttgtccccgccctcccccttcctcccctcccccgcctcacccttgtccgtgcgcctgcggaaggacaacttgcgcttgcgttgccgactgaagccaccctctaactccgtactgccgggggagcccgggatcatgttggtctggaaccaaaatcagtatcagggccctttcagtgctctcctgccccaccggggtcaggccccaagctccctccttaacacagaaaaagtagggctgggcgccccagctctgggaaaacccttccctgcccccaatgtgattttgccccaggcaaagactgagtttgggacttttgtaggctgctctatgataccatttgacagacagggaaactgagacagagaagcatcacattcaatgtcacacagcaaaggggcagccacacagctggaagcaggaggatggggtccagctcagggcagccaactcacatctcgcaggttgaaggtgatctccaggctggaccagaagtggtcggagaactcagggtacatgtccagcacctccagcaggtcgtcccgatggatcttgtgtaggtcacagtaggtgagggcccgcacatccccgttcgacttgccaggccttgcatacaggttcagaggctccccaaagatgtcattcttccctggaggccatggagaggacagggagctcagccccggggggcggcatccaggcagcaggcaccttctcccggcatccccaccccgggcagagcatgtcccctcagctgggtcgcctgccagccggcccccaacccacacaaccggggaagcaatctgccagcccaccctccctcagctcccagcaggcacgacagtgccagaggggccaggagcccagggtctcccagcaaatgagacccagccagcaggactaccccaaaccccaggtcccaaacaccctcttagccaatcactgcacccttataagcaatgttcttcaaaccaaagatcagaacacagtagtgaatcaaaaccagcatttttttttttttttttttttttttactgaaagaacatacagtagtatagcttagcacagcacagaacagaaatgctagaatgaaccacatgcagtaaggcccagtgttatgtagtgaaactttgattttagttttgtgggggtgtgtatttgtgtttgtacagagctgagaaacaaagtctaaaatgtcctaccatcaactatggtcgaaagagcttgctatatctgccctgaggcacacagggccgagggaaggacaggcaaagggggaggaagtcctcagtgtccagacacaccaacccacccactgtgcacaggcagggtagaaaggaagtggggggagggggcaggactccctttgctttggatgtgtcaaggggccaggcatgaggctgcagggaaccacatggcccttagtgaaaccaaatgccgagcttccaggctagcatttcttcctctactgcccaggctagagg

SEQ ID NO: 39644 - DNA, 2300 bp, Homo sapien
cgcatcgccgtccactacttcaagggctggttcctcatcgacatggtggccgccatccccttcgacctgctcatcttcggctctggctctgaggaggtggggtcagcaaggaggcaggtggtgtagggagaggagaggccaggaatgtggtgggaggtagtggggtggagggggtggcgaggaggacagagaaaaagagagagagagagaaagagagaaagacagtgggagagagacatggtggcaaggcagctgcagaggcaaggtgggtaccccagcaaacctatgctccttctctccacacaagctcctcgcaggttgcagagggccacacaggacacctttttttctaattcgtccatcccaaggggccattattttgtagcgtcaccaaagtgccctagaagctggtgggagtgggcaggcaccctagggtgatcactgcacctgtcagtgcccctgtttcctcatccacactatgggggctgcctctgtcccaaagctagcactaagattaatgagacacctgtgctgggcccagtgtgggcttcacctcttaggaggagggtctaggaagtctttggggatctgacctctgatgctcgctctgagggccgcagcacctcccctcctcccttgccccccttgccccatcaacggaatgtgccccttccctgtcccccagctgatcgggctgctgaagactgcgcggctgctgcggctggtgcgcgtggcgcggaagctggatcgctactcagagtacggcgcggccgtgctgttcttgctcatgtgcacctttgcgctcatcgcgcactggctagcctgcatctggtacgccatcggcaacatggagcagccacacatggactcacgcatcggctggctgcacaacctgggcgaccagataggcaaaccctacaacagcagcggcctgggcggcccctccatcaaggacaagtatgtgacggcgctctacttcaccttcagcagcctcaccagtgtgggcttcggcaacgtctctcccaacaccaactcagagaagatcttctccatctgcgtcatgctcattggctgtgagtgtgcccaggggcgggcggcggggagagcccacggtggaggaacccaagttggaggaaactgaggctgctagccgggccagagtgaggccctggaacttagagactccaggggccaccatcgtgacatggtttgggggctgggtcaccagggcggggactactgaagggtggggtgtgctggagcgcagatgtacaagggcgtctcgtgggcatgtcgacgctgagactgagacactgacctggtgcggggcctgagcagggtccctgtgggtgggtggggtccctgcagaggctgacggccccacgtgcccacgcccccagccctcatgtatgctagcatcttcggcaacgtgtcggccatcatccagcggctgtactcgggcacagcccgctaccacacacagatgctgcgggtgcgggagttcatccgcttccaccagatccccaatcccctgcgccagcgcctcgaggagtacttccagcacgcctggtcctacaccaacggcatcgacatgaacgcggtgaggccaccagagcgtggccagtgggtggcaggctgggaagagtggggtggcagaggggaacctcttggcacagcaaacaagtctcaggcggtcacagtcagtagtaaggaccctggaggcacgttgcccctttttgcccatgaggaaatggaagcccttggaaccccttccctggagagctccccttttggggtgggaggtatatgtcacataggcgatggggttaaatccttgtgacagcccagggcgggaatggtctctatgccttacaaataagaacatggaggtctagagcccaagggtgctcggccaggcatggtgaagctggagtggggtcccaggtccttcccaagacactgggccccctgatgcttccgagatctcccaggcctggaggttgagatttctctgacatggaggggtgggatggtggagtagagtgtgggttggggggtcccaagggagggtgtgctgagctgcccccaccctgcccccaggtgctgaagggcttccctgagtgcctgcaggctgacatctgcctgcacctgaaccgctcactgctgcagcactgcaaacccttccgaggggccaccaagggctgccttcgggccctggccatgaagttcaagaccacacatgcaccgccaggggacacactggtgcatgctggggacctgctcaccgccctgtacttcat

SEQ ID NO: 39645 - DNA, 2300 bp, Homo sapien
gcacttatttaattccattaagtggcttgttgcgctattaaatgtccattcatcccattacattcttccactcccagagccctggtgggcccctggagctggctgtcccgggacggcctggagcagggatgccctgggcaggagacgtgcccagcctccgaacaccacctggccccctgcctgccagcgtcctggagcagaccgtttcctcttcctcttcctggtctcagggctgtctcctggctgcttccttagagtgggacaggggtctgacctctcttgtttcttgtgactcccctggtctcttgagctgaccccatggactcctgactgtgcagggcctggtctccactctcgatctatgggtggcctgcctggcctggggccctgggctgctggcctgaccacgctgcctctccacctaggggccatgcacccactgcgcagcggcttgctcaactccacctcggactccgacctcgtgcgctaccgcaccattagcaagattccccaaatcaccctcaactttgtggacctcaagggcgaccccttcttggcttcgcccaccagtgaccgtgagatcatagcacctaagataaaggagcgaacccacaatgtcactgagaaggtcacccaggtaggcgcccagcggccgggctctcctctcaccttggaggagcttggagagggggtgggagtgggctgtgatccagagccgggtggagggggctagccagtgagggcctcttggagggaggcagacctgagggttggggttggcaatctattccagagctgcgatggggggagaggggacagtctgagaagtcctggagaggggactggagaggtctggtaaagggctgggaatggcagagcggaggtcgggtggatggggtgcgtgccttcggggcacagggtgaggacagggcagttgaggctggggacatgacagggccagtagcaaggggggaaggcggcctgagggacatgaaaggtctggctgcagggtgtgtgaaggaagtactaggggccaagccaactgggaggcttcaaatgagaaggggtcacagaggtcaaggacaggagggtcctaattcttccaggccaaggtgatgtgccaggcagagggtgggcctcagtcctgtggggatggccaggatggcctcgaggggcccaactatgtccctaaagcatgggagaagcaagttttcttctcatagggaggtggtgggtacaaagatatggaagggtcaggtccctgaatcctgggccagagaagacccctcagccttgggggcattagccagcctggtcttctgtcccctcctgggtttggggtcctcctggcagcaagaggacctgcgacccctccatggcttcatccacccgacaccttatcctagcctttgggggctgggggtgggtgggtcaggagtgcagatctctgcagtgagtgagaagcctgggataatgtggaggactcctgtcccaagctgttccctcctgccccttccacagcagctgcctgggttggctcatgtaagggagctgccctgctacctcggcgggctcctggccctgctcccaccgcctggctttctgggtccctgccaggtctccagcccactggccttgactccagagcattccccctcaccccaggcccttatctggccacctacccctctcttcctcctcccttgcttctctcttggttcccacctgagcccctggcatctgccctgctcctgtgcccgctgcatgtgcccgtgagttgcggtgggtctgtgcatgtgcgcctgtatgtgtcggcaggcgtgtgtgttcctgccagtcactagcagtctctccatctctgggtgtctctgtctgactctggctggctcagcactggaccggctgggcgggggtgtcagggagaccattaatctgcggtgacaggcccggctgctggcggagggggaggggctcaggctgcgggagcgccgctgcaggagcctgggcgggctgcgggggagggggccgctggctgggcaccggcggggcgggggagcctagtgtggcggggtgggggtggggacctggtagaaggaggggccggctggaggagctgaggttccgagtgcggccgctgctgggctggcgggcgggcagagcacggcaccctggcagcagggcccacgccacggggccatgggcagctcgagccaggcaggctgctgcccacgcttactgccagggtgaccccagccctggggcccagccacaaccaccctggcttcatgccaggggctgct

SEQ ID NO: 39646 - DNA, 2300 bp, Homo sapien
accctgtgagcacaggacaacgcgtgcttgtaacggtggttgggggaaggaggggtcagtccgatggtcagtattgtgtgaagcggaggaacaagatgatcctgagggggtggagacaatgacactggttgagggcctccctgagaggtgggggtgggcccagggggaggctgtgggcgggcctacgaggaggctgggatggatgtgggggggggtgctggattctagccctacctttgccactgactgccatgtgaccttgagtgactcttccctctttgggtctcaggttccaggtctgtggaggaggggcaggctttctgtcccatccctgtattccaggatctcagtgaagggtgtgtggtggggtggggcatgccttcgaagaaacttgctcttctttccccagcctgggagagaggacaaggggtggtttttcttctatgaagctggggtgtgtggctgggcctctggactgccttggactgtggcagagctggaggccgagttagggggtcttttcaggtgacaggaaaccctgactcctggaattgatggctgcctgggaggtctggggggccttgggaactggccaaaagatgaaccagttccaaaaggcaactttctgggggccaggggaagggagaatcgagaaaggtgggaggaggccaagtcctgatggcctgggcctatctcagggtgccctgctgcagcccagctttgcacgtaggattgcctagggctgcaacctgagggctatgcttgctggggaggggaggggaagggagggggagaattccaactgctactgaaagccccagcattacaggccaaagtggccggaaacttctgtttataaaaagctcttatcccaggagcatcttgcctggcacaagtgaggctgctgcctgcctgctgctcactcgccagcctggctctccgggcaggcctggagtcagggagccaagtctggcagaaatggaaccatgggggtgctcatccaggatgaggccaaactgaggaaggcctcacatccctgggcaggtcccctttcttgggtctgttttcctacaagtggggccaaagtctcaggccccgcccaggctccaggtgtgtccagggtttggagctgcaggtccctctctttgcttcctatgaccttgggcttctgcctgtgaccctcagcttattcttctgcctctgccagaccaaggttcaaaagctggctctatcatttacaagctgcaagacttgggcatggtgccgaacttctctggagccttggtttcttcatctataaaaggaggataataacacctaccttatggggttgtcagaggacctaatgagatgcagcgtccttaggtgttcaacgtgtaacttccctcatcctctctggcacacccacccctcagctcctgactgcccttggggcgggggtggtgtgcagaagttctagggggtactgacctggtaggatcctcagataatcggggagtgatttcctagggagcctcaggataaggagtggctcagggagcgccccccagtctggagagcagggaaattaaaagcagaatccagagagccgatgcaaagggaatcctggccgccatctctggcctttcccaggctccctttctaggcccagtgtttatccctccgccgcggctgctgacacgcgttgctgacacccgccaggctggcctcagcctcgggcatggaggaggcggcgggctgctggcggcctgcccgggggaagccacgcagcccgcccgcgggccaggcggaggagggggcgcgccgcgcggcccggccggccaggcacctgtatcggggcacacgcacagctgcgttcgccccctgctgggaccccagtcccagccatgcttcctgtggcggggagtccccgggcggctgtgtgagtggagaatgtggggaagggctgggagtcccggaggctggggtccccgctcacgcgcactctcctccccgcccccctaggccgtaagttcatcatcgccaacgctcgggtggagaactgcgccgtcatctactgcaacgacggcttctgcgagctgtgcggctactcgcgggccgaggtgatgcagcgaccctgcacctgcgacttcctgcacgggccgcgcacgcagcgccgcgctgccgcgcagatcgcgcaggcactgctgggcgccgaggagcgcaaagtggaaatcgccttctaccggaaagatggtaggagcgggccggggcggggccacgaccaggggcggggtcaagaggggcgggaccacggcgag

SEQ ID NO: 39647 - DNA, 2300 bp, Homo sapien
gcctttgctcactttctctccatcccctggcctggacaggaggacacttcactcacacatgaatcatcctggattcatggtaggcaacccagcagccaggggtggccttggggcgtggcgggggctgggccagtcgtggactaggttctacccggaacccagatgtgttgatgcacctgatgccaaatgctacaccaaggaggagcttgtgctgtggaaggccctgggcccccgggggggtgagtgaggaaactgctggcagtggagagggcctgaggaataactgcacaggcaagagcctctggacttttttagcatcagctgtggagccacctccttctctcccactggctgcctccctgagtcactgcccacccaccagcaaataaaaaagagtgtcatctgctggccagtggccccatttggccccagtgtttgcatctttgtgctcctgggtggaaggtgagagtccgggtagggtggtctcacgacgacagttttctgcgccttcctccttcgggactccgattccttccctgccctttgttcttcccctccccccatgatggttctcgctggtgacaagacccagcccctgctccaaggacagaggcagctgcaagccctcaggagcccccacatggccccatccatctagacaggtctctgatccggctgcagggaggggaccctcggctgttcagctgcgactcctccctccccgcccgcccactcagctgtcaacactcgcctccccgccctggccttcccggggccctgcctgactgctaagtccgaggacaccgcgcccggagaccctcactcagacgcaagcaggcgatgagcaggcggcggggcagacaccccgcctgcccttgagcatccctaggcctccttgcctaaataagggagccgcagctggagcgagccagctggccggggggaggggcctgcggctaggccagggctttccgaggggctgggccgtggccgccgccgcagggccccgagcccgccgattgggcgtgcaaggctggccccgggctgccgggggagggcgggccgctcgcacccggggatcccctggttggaacctcgcgctcagggacctctctttgatcctgcagctaggaggccgcaactgctgtcagaatgtccctctctgtgcagctcctatgcagagccccacagagggctctctctctctccgtgtgtgtgtgtgtatgtgtgtgtgtgtgtgtgtgtgtgtgtgtgtgtgtatgtgtgtgtgtgtgtgtgtgtgtgtgtgtgtgtgtgtgttggggcagggggcgtgccccttctaagtttaaccctcccttatttcagagctctgctgctctggggccttcagattgtcttgcttttcctatttccagggtctcccttgactccgggctcgtcttcgagggtccaggcgttgccccggtcacccacagtaggcactgagcgcgtgctgtgtataccaagccagtgctcggcgtggtggggaaccagggcataaggacccgccgtttcccttcaaatcaggtttcttagtcgctaatctggggtgggggtggaatcccttcccccatcccggccgcctacaagccggccatggcacctgtcctcacggtttcccctgcctaagggtcccttccccctcttctgggcgcgcgagtcccaggggctccttggcagagcgaggggctggcgttgggggagcactcggcgcggctcagccaatgggaaggtcgggcgcgcgcggtggggcgggatgggggggggagagggcggtgctgcgggcgcgcggcaggcgggagggggccgggaggcgggggccggagccggaggggcgcgcgccgcattaacccttccgcggccgggccgagccgcaggcgctgcccgagccgcgggcgctggagcggctgtcggcgcggtggcaggcgggagccaggagtccggggctcgggcgggcggagcgcagcgcggggacgcggcggagcgggccccgcggctcggcgggggccggcagacaggtgtgccggcggcgggcggctcgcgctcaggcggctccaggccgggcccggggtccggagcggggagccgggagccgagcgaggacccggcgcccgcagtccagtcttggccgcgcccgtgctcggcttggccgcggggtgcggggaccacggcccggccgggccacccgaagcctagtgctgggccgggccgggccggggtgggtgggggcccgcccggcccgcccatgggctcaggatgccggtgcggaggggccacgt

SEQ ID NO: 39648 - DNA, 2300 bp, Homo sapien
ttccccgctccccacccgtccttgccagcaggcaggaaggaagctgctcatagtgcaagggtggggtacttccagctcacactgaacagccccgggctgggctataaagagtcagggacttccgctcagtcacccctgccctcaccacccaggcccccatgcacacaccccaggcccaaggccttcccttcccagcacagccctccaaggtcaaggcgtcccccgcccagccctgcagagcactctggtctgagagggaaggcaggggcaagatttgccgcctctttggcattatggagggggcagggggcacagggcacagccctccccagggagggatccctactcacccacagaaggctgtcaccttacccctggggtctgggccagccctccccgaggcggaaacacagccactgtcagggacaagggggctcagttcccaaccagatcatctccaaagcccattcagcttcagatctcatgattgaagatggaaattctttcagccgaacaccaaatctccaaccttgaaaactgttttttcggaaagtcctctttaaaacatggttaccaatatgagcagtcagccactaagatgcatgggcatcattcttggcagggctgcaggcatagagcaggccagcaccaggcagagccctggggacggcaggcctcctccgacaggcgggggaatcaactgttctcatcagagcaccctgatggaaggcaggacactccggacaacactggccacggcccaagaaaggggaagcagggaatcccctgtccagagagcattcatctctgactttttctgtctgtttaacttttttttttcctccttttcttaagaccctgccatggcatcctctgccccaattcaaacccaatccaggcctactctgaccctcagctttcagcgctgactgtactgaactggaccccatcctccctgtgaccctcagccttcagtgctggctgtactgaactgtaacccatcctccctgtggccacagagtgctccttcttgcactcctccccttcacctagactgacttctttctgcccacacagacccatctagcctcagccaattcccttctcagtggaccctctccattgcctccagagcacagcttccagtccccaggcggctgcacacatttgcaacaaaacaagccaatgtatgaagcaatcccactcagtgcaggagctcaacccagcagaggatccccacagagaggaactgacctgtgtcttccagagcacacaggttcagagcacacaggttcatttaagtgagaacccacacttacagagcaagctgcccaaaaaccacgaccaggagggcccagagaaagagctgtccccggggccttggggacagggtgacagccacccagagatcatggagaaggggacgtaaggaagacctcacagaggagtcatcctgcgactgtgttggttgggtccttcaggaagcagagtcccaggagttggaagcataagaggaatactgcgggcaatgcctgagaaagataacagggaccgggagcaggagtgagttgggcaggggaaggatcaggcccacaatgccaggctcacacctgcagaggagggaagaagaagaagggcctcacatcagcccagcgggggatgttacgcccacagacgccccggggctcagttactgtctaagtgttagaaataaattttcggtgccacaaaagaaatagcactcagatataaatgttcccagcaaggcaattttacttctatagaagggtgcatctcacagatggagcaatggcaagagcacacctgaacaagggaagggaaggggtttttatccctaaggcaggtagcccctacagctgtgttgttcccctattggctagggttggaccacaccgtctgagctaattgttactggctattttaaagagagcaggggtaagagccggattggcagggtaagtagtttggcaggaaggacggtcacagaacaggtgactcaggatgactcaggtcagagcaggtgaccagtggtgactcagttcggagcaggtgatagaagctaggagggggttgtttactgaaactaggggcaaggagacgaagagaacatgaaagttaaactttaagatgaagaacaaagctgaacatactgatgcattggatctttggagaggatctcagaactcattgtacttaatttacaggctaaaaccttagaagaggaatttattatatcctacacaagactccagggaagcacatggccttggactgaaggc

SEQ ID NO: 39649 - DNA, 2300 bp, Homo sapien
cacagccagtggtgcaggcaagaagacaatggccatccatggtggctcacacctggaatcccagcccattgggaggtcgaggcaggtggatcacctgaggtcaggagttcgagaccagcctggtcaacatggtgaaaccctgtctctaataaaattataaaaattagccgggcgtggtggtgggtacctgtaatctcagctactcaggaggctgggtcaggagaatcgcttgaacccaggaggcggaggttacagtgagctgagatagcaccattgcattccagcctggacaacaaaagcgagactctgtctcaaaaaaaaaaaaaaattagccaggcgtggtggtgggtgcctgtcgtcctcgggaggctgaggcatgagaatcactccgggaggcagaggttgcaatgaaccaagatcacaccactgcactccagcctgggtgacagagcaagactctgtctaaaaaaaaaaaaaagacagaaggatgtcagcatctgatgctgcctgtcaccttgaccctgaggatgccagtcacagctccattaactgggacctaggaaaatgagtcatccttggtcatgcacatttcaaatggtggcttaatatggaagccagacttgggatctgttgtctcctccagcatggtagaagatgcctgaaaagtaggggctggatcccatcccctgcctcactgggaaggcgaggtggtggggtgtggtggggcctcaggcttggggtcatgggacaaagcccaggctgaatgccgcccttccatctccctcctcctgagacaggggcagcagggcacactagtgtccaggagcagcttatgaggccccttcaccctccatcctccaaaactggcagaccccaccttcttggtgtgaccccagagctctgagcacagcccgttccttccgcctgccggccccccacccaggcccaccccaaccttatcctccactgcttttcagaggagtctggccaacacaaatcctcttgtttgtttgtctgtctgtctgctgctcctagtctctgcctctcccagtctctcagcttccgtttctttcttaaactttctctcagtctctgaggtctcgaaatcacgaggcttcgacccctgtggaccagatgcccagctagtggcctttctccagcccctcagatggcacagaactacaaaccccagcatgcactctggcctgaagtgcctggagagtgctggtgtaccccacctgcattctgggaactgtagtttccctagtcccccatgctcccaccagggcatcaagctcttccctggccggctgaccctgcctcagccctagtctctctgctgacctgcggccccgggaagcgtgcgtcactgaatgacagggtgggggtggaggcactggaaggcagcttcctgctcttttgtgtcccccacttgagtcatgggggtgtgggggttccaggaaattggggctgggaggggaagggataccctaatgtcagactcaaggacaaaaagtcactacatccttgctgggcctctatccccaagaacccaaaaggactcaagggtggggatccaggagttcttgtatgtatggggggaggtgaaggagagaacctgcatgaccctagaggtccctgtggtcactgagagtgtgggctgccatcccctgctacagaaacggtgctcaccttctgcccaaccctccagggaaaggcacacaggggtgaggccgaaggcccttccgtctggtgccacatcacagaaggacctttatgaccccctggtggctctaccctgccactccccaatgccccagcccccatgctgcagccccagggctctgctggacacctgggctcccacttatcagcctcagtcctcacagcggaacccaggcgtccggccccccacccttcaggccagcgggcgtggagctgaggctttagagcctcccagccgggcttgttcctgtcccattgtgtatgggataggggcggggcgagggccagcactggagagccccctcccactgccccctcctctcggtcccctccctcttcctaaggaaaaggccagggctctgctggagcaggcagcagagtggacgcacagtaacatgggcaacttgaagagcgtggcccaggagcctgggccaccctgcggcctggggctggggctgggccttgggctgtgcggcaagcagggcccagccaccccggcccctgagcccagccgggccccagcatccctactcccaccagcgccagaacacaggtaagggccaggcagctaggag

SEQ ID NO: 39650 - DNA, 2300 bp, Homo sapien
gcagctgcgccacttcaacgagctgccgcacgagctgcgcgcgcgcctggcccgcgcctaccgccccgccgccgccttcctgcgcaccgctgcgccccccgcgcccctgcgcacgctgctggcccgccagctcgttttcttcgcgggtgcactcttcgccgcgctgcttgtgctcaccgtctacgacgaggacgtgctagccgtggagcacgtgctcaccgccatgaccgcgctcggggtcaccgccaccgtcgccaggtgcgacggcagatgcccggggtggtggtgtgtgttggtttctctgatctggggccatgtgaggttccccccgaatccttacctctcccaccactggggccctctagccctacatcccaccgcgcgtcctcctaatcgcaggccccttccccccacggatcccgcctttcaggtctttcattccggaagagcagtgccagggtcgtgcgccgcagctcctgctgcagacagccctggcccacatgcactacctcccggaggagcccggccccggcggcagggaccgcgcctaccggcagatggcgcagctgctgcagtaccgagcggtgagggtgggcgcgacggcgggctgaggaggaagttgtggggtctgtctgcgcggagggtctgtctgcgcggagggtctgtctgggagagggcatgagacaaacggactataccaggagtctagggagtgactgggtggggaggcttcttgccctggcgagggtcgctggggactgcttggtcctgataacgcgcgtgggcccctcagcgacccctgctcagcctcaccgctgcttccccaggtctccctcctggaggagctcctgtccccgctcctcaccccgctgtttctgcttttctggttccgccctcgtgccctggagattatcgacttttttcatcacttcactgtggatgtggctggggttggggacatctgttcctttgcccttatggatgtgaagcgccacggacaccctcaggtcagagccgttccctggccctgggggtttgggctgggtgggagttcgcttgcctctcgggagcagacctgagttccagccctggctccattgcttgctacctgtgccgttgagcgggtcacttcccttcctgtgctctcgtgccctcgtctgtcagatggcaacaatggcaatgtgctctccagagcacagccaaggccaggcttgtgaacacacagattatgtctgtatagcctatgatggagttgctggcacatagtaacgtcagtaaatgggagcaaagaccacctgggggtgaggaatgggcttggccggtgggtggggctgagtaaggactggtgcctggaccaaggctgtcaggatcaccctgggcaaagcactgaggctcagccctatccccgagctggcaatcagtccaggggtgacgaatagatgacaggcccaggttctgcactgctgctgtatttttgggtgatggtgaacaagtccccattgtggtctgtttccttcacgtggaagatggggcagtgtttcctgtcccacctgttcccataaggctcagtgttcttagcacctgaaagactgtccttgctcacagtggctctcggcgggacagactgaggcctcgctgtctcagcgtgcggaggacggcaagactgagctttctttgatgcggttctccctggcgcatccactctggcgccccccagggcacagctctaagtttcttgggcacctctggggccgagtacaacaagatgcagctgcctggggtgccacctcggctcgcggcccctccaccccgggggtgctcagcaactgcacctcgcccctggtgagtcccaagcctggcctccccttctgccttcacccccacaactcctctccaaacccttcccctctaggctcaccttaggtagtaacctgcctcaccagcccccgcccccagcctgctctcctgccttctttaggcctctgcttcctccctactccgtttctgtcctctcttctgactccctctttggctttccctctcctcttgcacccagcctgagccttcctggccaacctcttcgtgcaccctctcctgcctccgagagatctgagcccgacagccccctgtccagctgcggccacagccagcctccttgcctccatttcccgaattgcccaggaccccaggtgaggagtggaggctgagatgcaggggcatgtggaggggggtgggctgatcctgtaggagtggggagctggggcgctgaggggggattcagaaggggagtcctctggggt

SEQ ID NO: 39651 - DNA, 2300 bp, Homo sapien
attagtttggggttgagctggggagctcttggtgtatgggggggtcctattgtgactatggtggaatagccacgatactgagtgacattgggcgagtgaggtgggggagagactagacaacaccccacataacccatcttgacagatgtctcagaaagattatgggaatttcctggcccctctgcaatgtgggattccattttgctacctctagaaggacagggtcttgttttcatagctctgcctcctactctgagataaaggcatgcaagacctgagctactactacaataccccacacagaaggagaaaatcaggcacatctggattcaagttttgtgggtgattccatgattgcctccagtgaacaatctgggaagcacagtgtccatatcgccatttcaggggtactggccccaacatcagcccttaggcctaagccctagagaccttgacacctggtggctgagtcagtatctcagtaatgggctttagaaggaaacctggtgattcagggcctcaagaatggcgttgggcaagccaccagaccagctgcctgggtctcctcctccttgttgaggtgacaacaaggaactcagttcagctcctccctgggtatccaaattatccttccaagtcccagactcacagctgtcctcccttctgattcagccctgatgcttttcagggggtcccagaagtgggatccggacttgagagaatgtcacagttgaaaatgataaggatgcaaacggaatggaactttcagagaaccccaattttctactctaagttctccaaaccaactctcaaatccaagatagctgcctttcctttcttcacctcctcttcttagttttccccaacttggctgcaaagtcagcctcccctcttctcttccttagcacctcagaccaataaaacatgcaaccttttcttattctttttaaaaaatttatttttgaccaggcgcagtggctcacgcctgtaatgccagcactttgggaggccaaggcgggtggatcacgaggtcaggagttcaagaccagcctggccaacatggtgaaaccccatctctactaaaaatacaaaaaattagctgggtgtggtggcacacacctgtagtctcagctactcaggaggctgaagcagaagaatcacttgaacttgggaggcggaggttgcagtgagccgagattgtgccactatactccagtctgggtgacagagtgagactgcctcaaaaagaaaaaaaattattttgtttgttttttagattttgtagagatggtgtttccctaagttgctcaggctggtctcgaactcctggcctcaagtgatcctctcgcccgggcctcccaaagtcctgggattacgggtgtaagccaacatgcctggcccctttacttcttcttttctgttttggtcacaaaacatttctctgttgatcactgtagtgtgtgtgtggagggaagtgggggaggtacactcttaagaaatgaaatagttaacatcttggtcctaagatttgttgtagagatggagtcttctcattctgttccccaggctggtcttgaactcctggcctcaagcaatcctctttcctcggcttcccaaagtgctgagattgattacaagtgtgaggtactgcgccctgctacaatcctttaataggatgtttttggggggggtggcagggggcaggatctagctcactgtaacctatactgttccagtgtaacctgcaccaagccatcctcccacctcagtctcttgagtagctaggaacacaagcacacatcaccacacctggctctaacacgattttgctttttgcttttgtcattttggctgctgttctttttatctttcattcattcaaggtctgaagatggagataataggaatcttctcatctcaatgtgctctttggcccctcctcttaaactgatgcccctctcaggccctgagggatttggcctcaggttgccctggaaggggtgtgagtgatcagacaggtgactgagagctgggacgcctgaggcctgcctaggctgagtcacctagtaatgttgttgtcattgttcctgttgaagtcccagctcagtgtcacagacctttgtggaagcaacaacagctcccatccttccaacctttctggagaagccgtggcctgatggtgagccgaatgggctggggggggagaagaaggcggctggggcggtggggagatctggggcccggatcggtgcccctcctccccatgccactgccacctcctcctcctccttcatgccggg

SEQ ID NO: 39652 - DNA, 2300 bp, Homo sapien
caggtcttgcatgcctttatctcagagtaggaggcagagctatgaaaacaagaccctgtccttctagaggtagcaaaatggaatcccacattgcagaggggccaggaaattcccataatctttctgagacatctgtcaagatgggttatgtggggtgttgtctagtctctcccccacctcactcgcccaatgtcactcagtatcgtggctattccaccatagtcacaataggacccccccatacaccaagagctccccagctcaaccccaaactaatcctgggacattgtcctacctagtttcaccctgaattcattctcattgacagcctccctaccaccactcccaattcaagtcgatttattttaaagggcacttttccttgccaagcatttggaagggaagaggacagatgaataaaacagagccactacccaagaagctgcagcccagtggggagacaaatacgcaaacaagtaattacagggaagaaacgagtggtgcaaactctttggcaggagcctgaggcaagtcattctgacccgggtgaggaaggtatctgcgaggcagacagatctgaggccgcgccttgataaattacaggccctccataccaatagttctcaatggctgaggcgtagggcaagagtgtcagaatcaccgggggagttcttccccaagtacacgtgactgtggggaaaagaaagagagatcagattgttcctgtgtctgtgtagaaagaagtagacataggagactccattttgttctgtactaagaaaaattcttctgccttgagatgctgttgatctgtaaccctacccccaaccctgtgctccctgaaacatgtgctgtgtcaactcagggttaaatggattaagggctgtgcacggtgtgctttgttaaacaaattcttgaaggcagcatgcttcttaagagtcatcaccactccctaatctcaaaccactccctaatctcaagtacccagacacaaaacactgaggaaggctgcagggacctctgcctaggaaagctaggtattgtccaaggtttctccccatgtgatgaaatatggcctcgtgggaagggaaagacctgaccgtcccccagcccgacacccataaagggtctgtactgaggaggattagtaaaagaggaaggaatgcctctttgcagttgagataaaagaaaggcttctgtctcctgctcgtccctgggcaatggaaatgtctcggtgtaaagcctatctctactgagataggggaaaaccgccttagggctggaggtgggacaggctggcagcaatactgcttcttaaggcattgtgatgtttatgtgtatgcacatcaaaagcacagcatttttttttttaccttgtttacgatgcagagacgtttgttcacgtgtttaccttctgaccttctctccactattatcctattatcctgccatacccgataatgatcaataaatactaagggaactcagaggctggtgccggcgtggatcttccgtaaactgaactccggtctcctgggcccatttttctttctctatactttgtctctctgtctctttcttttccaagtctctccttccacctaatgagaaacgcccacaggtgtggaggggcaacccaccccttcacgtgacagatgtcccagcagttctgacgcacctaggagagcggggtgggtggcagggcatatgtacgtgttttgaaaaaactcccagtcgatttttgttcattcctcccccaaaacccgcgttctacacgcccttgagacgacgggacatctagagatcctggagccttgggaaaatggcccgaggtcggcggctgacgcgttactatggatactccatagcttggagggccagtcgggccacaccctttggacgtcacccggagcccacaggagcacctggcaaaagccaggcccacttcctgctcggctccgcccagagcagggggcgggcggataggcgattccctccaatcacagttccaaaaggagggggctgacaacatatcctccaatcacagcttgaagtgagattgatgtgtcttttcaccaatcaccgccaaggcgcgagggggttgtcgggatgggggcgggagccaacatagagccctcagtgggatgagggtgaaactgctattgccggcggctcctgttttaccgcgtcagcatgctggtgcatttatttcgggtcgggattcggggtggcccattcccaggcaggctgctaccgcccctccgcttccagacattctcagctgtcaggtaaaaacggaa

SEQ ID NO: 39653 - DNA, 2300 bp, Homo sapien
gaagctgcacccaggtggcaggctgcctggtgtccctgtccatgctgtcgacacgcctcacgctgctgctgatggtggccacaccagccctgatgggagtgggcaccctgatgggctcaggcctccgaaaattgtctcgccagtgtcaggagcaggtaccggcattcctggccatcctcttcaccctccccacaccgtttctctttccactccccggaactcctccctgtccccatcctggactccttgtcctgttttctggactccttgtcctgtttcctggactccttgcagatcgccagggcaatgggcgtagcagacgaggccctgggcaatgtgcggactgtgcgtgccttcgccatggagcaacgggaagaggagtgagtcctgggagggcggagcacaaagcagagatgccccccacaccctgccaacccttcgtgccagcccagctgcctcctgaatgcactggtctctctcaccaggcgctatggggcagagctggaagcctgccgctgccgggcagaggagctgggccgcggcatcgccttgttccaagggctttccaacatcgccttcaactgtgagtgagccatttgggggctggaggggcgcttgtgggctggggaggagctgggagcagccaaggcaggcaaaggccctcccttcatctgctggctgcctgcattcgcctcgggccagctgctaactcttgcaggtaaagggagggtgccgatgtcccaacccagctatgggactccatgtggaacgctacagggccaccctcaaggaggccatggaggcgtgcccaccccaacttgctcttccgaggaggaagccaacgctgggaccagtcatgcgcctcacctgactctcccagtcagcagtggcagagcaggcccagggctgtttcctctgccctggcttcgtcctccctcacttcccctctcctgcaggcatggtcttgggtaccctatttattgggggctcccttgtggccggacagcagctgacagggggagacctcatgtccttcctggtggcctcccagacagtgcaaaggtaagtgggggccgttcccattgctacagagccccctgccgccctccagagccctgctgggttaggggacacgggtgccagccttctctgggggccgactgctgtgcagctccaggcctgcccagcttccccagggatgcatagggtggggagagagagcccctcagggcccataacaaccctcctggctggggcagtggcgctgcagcaggcaggtgcttgtcatcttcagccttccaaaggacccagaagtttccttgacaggctttttaaaaatttgtttcaactgtggtaaagtacacaaaacataaaatacagcattttaaccattttgaagtgtgcagctcatgggcagtgggtgcactcacattgctgtgcggctgttgtcaccgtccgcctccagaactcttacctggcagagcggaaactatccccatgacatgggaatccccatttgccctcccccagcccctggcacccaccattccactttctgtccttatgatttgacaactctagggacgtcctctaagtggagtcagactatgtccttttgtgactgcgttttgtcactccacattgtgtcctcagcttcctccgtgttgcaccctgtccgaattcccttccgctgcaggctgtgacattccatgcatggaaggaccatccttgacaggctgtgtgagctgcccttccccatgcctgccacttccagggatgacaagctgacccctgtccccacacaccccacccttatagcttattgctttgcgttggtccaaaaccacccgctcagctgagcctctgggatgaccagagctgatcaccagacagctcaaggcgggcctcccccctcctatctctttccaagctaaacacaagcagttctacataaatatgttatggtaaataatgagatagtaaatatgctgtaacagatcatcaaagggtgaagacccgtctccacgaaccgtgcatcacctctgccaccccatccctccccccacgacccccctgctcttccaccggggcccccaccccattctactgaggcatgtgtcctcgccctgctgcatggtgcacccctgcgtgtgtgtccgccggatcagaacccctcactgcagggtgtactgtcccaggaagcgggaggcggacggagacaggctcccattttcagccccaaacctgacattccacagagacgttcctcccatttccgcagctgcatggacaccctcgcg

SEQ ID NO: 39654 - DNA, 2300 bp, Homo sapien
gggggctaggctccagctggcttctgaggggcctggaaaggcacacaagtaggtccttggctgaactggtgccccagcaggacctcgtgtccctgcactgctgcagatgcatcagccctccccatgttggtgccgctgtcacttcctactgggatccttcccctatccagccacatccaggctgtgggactacacggtgccctgttcccctgggcaggagaagaggtggtacctgcaatgcaccttcacagccaggcaagcattctggatttaccctgtgtaaagaagggtggtaccctctttcaggggtgtgatacagtgcattgatggagcagctggtgctgctgggaggccagcctggaagaggcagcagtggctcaagtttgcgtgcaggagccagagtgggacccacgggctcttgtgggtgtggtttagaactagatggtgctttggggacaagccatccaaaaaccccaggcccacatccaccctgatttgatatcccacttcctgacagatcagaggctgtgtctttaagcagtggaggtccaggagcagagcctggggctggttcacagctaaacccctccttagggcagcccagagtagggcctcagctggcaagtccacaagccctgctggggccctgcttgttggcctgacccctccctcaccaggcagccagccaaggtggttcctgcttcacccactcagtcatcagcctcaggctgcccaaaatgcctctgacaccagatttatatcttctgggcggcttctttaaatccagcccttcacccgccccctagagaagcagtgaaaccccttggctagtccagctggaagagctagaccgcaggagccgcgccgtcttcctaacctcgcctcggccttcgctccacagtggagagtgggagcctagctgtgcttgatgctgaatgcctgttttgagagtgtgagtgggatcatctacagtaaatacttgcaaagcatggcactgtggctctggggagctggtacgcctgtgctgtaaccatggtactcagtccttccaaagtgtttattaatcaagcacctgtcatgtgccattgagcccacgatggggaatgaggacagtccctgcccccatgaagcttgtgtcctgttgggaggacagacaggtggcccagcagttgcagcatggtgtgtgcacacgtttggctggtggaaccatgtttctaccactcatggtcaaaaaaagcccaccaaagtcctgggagttcacatctgtgtgatgatacggcaacattgtttgtaatggaaagactggacacccccagtgcccatcagtgggggagtcattaaataaactatggtatgtgcacataatgggtggtatgcagccctttggaaaaatgtaggttttccaggtcctggatatagcagcgtaagatgggaaatcacagaatacccatgttgtgcctgagatggcaggtggggtacccgtggtacccgggagggtggcaggtggggcacccatgttctacctggggtggcaggtgagcccataaccattgtagaggccaacatcctcagaggcctgagtgtggggaggtaggctttgactccctagggagagagggacacttaggaaacagacgggccctggaagtgggacatgaagagtgccctggccatccagtgtaggctgagatgctaggggcacagaaagaagagatctgctgatgccagccttccaaccatttcccagcttggccaagagccagctctggtattcgtgaaggaacagatcctgggtgaagctagagggaaggccgcagaggcaaaaggagagaggagctaggccaggggtcagcgactgaccctcgcggccagtgtacaggggttgcaactgggagcctagggggccccaaggcatctccaggcccaatctacctctgggcttttctcaagctctccctaggattactgcggtttcctcctggcgcctctcgtcttggacagccatgcccccctccatgctgcactaatggctcagcctggggccctagggacctctcctaccccccagactgctctgtcggccccctttcccccctactgctgaaacccaatcctctgcagcagcgccggctcagcaccgccggctcagcaccgctccgcagcccctgcctgccacggtcagctacgtcccacctggtctgctgcggagtccccagcccagtgcctagcccagtggagccaccgcctgttcctcgggaaggaacagtgggacctgaccggccagatcacctcctccaatc

SEQ ID NO: 39655 - DNA, 2300 bp, Homo sapien
tccggcctagatcccagcccatgctgatcttcccttcctggccgcatctgagtatgcacgccgtgaacatcaacataaatatcgtgctgtagtatcattcaggactggctcccctggaacctggaccaaggcatttggtcttgggcctagaaaagcacctggcacacagtgaagcattcagtaagtatgtgttgaatgaatgagtgtatctccttgaacctcattttctcatctctcgagtgtaaataatatcactgacatcagaatgacactgtgcgggtcaaagatgaccacgtgaaaatgctcactaagactggagacccctggaggacagaaacagggttttctcattctctaacaccctagagtgtccctgttcagggcccaaacttagagcccaaggggtgcttacaccgaatgcagactccgaccccagcctgaggggtcccccaacaccactctcctcacctttacaatctcaggatcgaggtcaccattgcaactgtcaaaatacttcttcaggtcctgaaaagggatatgagtgggggaatgggacagagtttaacctcaatctgggcccctataccttcccaaggctactgtcctccaaaccccgcctttcacctggtcacagaattcaaaaaccaaagtcagcttcttgtcgctgtgcaggacgtcatgaagcctagggcaaaagaagggctcagccaggcaggtccgcctgacagacgtccagtgtcagcccccgcctcccccaagcggccacaccggcaaggagcacccgcctcccgcacacctgacgatgttcttgtgcttcagctccttgagtaggcagatctcccggagggcggaactcggcacaccctgcatatgtgagggggccggtgggcagcagtcagatcccacccagcccaggccctcaaacccctccccaggccgtatcccactccccagtcctacctcatcatcgtcatccagcctcacccgtttcagagccacgatctcatgagtctcccggtttttggccttgaacacagttccgtaggtgcctaggggaaggaggtcaggggtcagggtgaggatgcggcactcttccctaagccaggaaatgcctcctgagagaggtgaaggcagcgtctcagtatgcaagggaagggattcagggtgaaggtaggttggtgagctttgtgagtgaggatgtggcaggtggggagggaggagaaggtgcccaccgaggctccaggggctcggcaggaggggcgagtgcggttgccagggcaaggatgtctaaaatgaaggcggtgctccggaagggtctggaaatagtgaggaggggtctgggagaggactgaggggctgcagaaatattgaggttggaggtctgcagcaagaaacgaggctgggggtcggggtgaggttgtccaagtgctgctgaggctggggtgagaaatttcaggaagtgtcgcggttgggaggtcgggtctactgggaacgctaaggttggagtgagagccctgcgggaaatgctaacacggggaagactggtgtctgcacggagtgctgagctagggggccagggctgcagccgctgctgagatcggagcctgtaggcattgctgacggtaagggagccagggcttcaaggaatgccgaaggatctgcagaggagctcttgcaggaacatctcgagattccattaccttccccaatcttttccagtttctcgtatttctgcatcgcggcggccgcggggacccctgcgggccctcggttttaagactctggccccggcgttgcagaggaggcggcacctgagcctccagccccgccccgtctgcccgcgcagggccttctggggcttgtagtcctaaaacgactaggtctccccgcaatgcccgagaccgaggacaagaagactacaacccccagccgtctgcgctcacgctctctgcagcactcgactccagggctccgtttctaccgcggaggcaaaccttggacttcaagtcccaggaagcaacgcgtgtccgttttccgggcgccccgccgcggcgccgtggttcccagtgtgccccgctgttgttattccttttatgtgctcccagccctcttgaaaagggccgctccgggactacgcgttccagaatgcagcggaaatgggggcggagcgctctcggttaggggtttggggtttggcggcctagatcccgggcactggcggcccagcgctgacctggttggtggcattgtgttcccaacggcctcttgacgacctcagcacgggtttccacctctcccca

SEQ ID NO: 39656 - DNA, 2300 bp, Homo sapien
gggtgagaaatttcaggaagtgtcgcggttgggaggtcgggtctactgggaacgctaaggttggagtgagagccctgcgggaaatgctaacacggggaagactggtgtctgcacggagtgctgagctagggggccagggctgcagccgctgctgagatcggagcctgtaggcattgctgacggtaagggagccagggcttcaaggaatgccgaaggatctgcagaggagctcttgcaggaacatctcgagattccattaccttccccaatcttttccagtttctcgtatttctgcatcgcggcggccgcggggacccctgcgggccctcggttttaagactctggccccggcgttgcagaggaggcggcacctgagcctccagccccgccccgtctgcccgcgcagggccttctggggcttgtagtcctaaaacgactaggtctccccgcaatgcccgagaccgaggacaagaagactacaacccccagccgtctgcgctcacgctctctgcagcactcgactccagggctccgtttctaccgcggaggcaaaccttggacttcaagtcccaggaagcaacgcgtgtccgttttccgggcgccccgccgcggcgccgtggttcccagtgtgccccgctgttgttattccttttatgtgctcccagccctcttgaaaagggccgctccgggactacgcgttccagaatgcagcggaaatgggggcggagcgctctcggttaggggtttggggtttggcggcctagatcccgggcactggcggcccagcgctgacctggttggtggcattgtgttcccaacggcctcttgacgacctcagcacgggtttccacctctccccaagccacctagtgaccccagaattgactggggaatgcctgtgagcgatgatgacctcacagggaacagctgaccgcagggctgggagaacagctgtgccccttcgaggctggattttagtggagggacacacgccaaagaccccctctctgctgagccccgtttgttgtctcggagcccacccgactctagccgctgaactctgacatgctgaggaaaactgggtggagccctgggggtccccctcagaccccagtctccggaacagggcccactggagtcagccagggtgtggcaggcaggttggttaaccccctccacagacaagaccacagaccgatgctcaacttgcagcagcctctgcctcaccccttaaaggagctgattatagattcccttacgctgcctctctaattgtctcatgattgcattcttgagggctatggaccgagggaaaaggatcccaaacagcactcctcagcaccggaaccagagttgctgctaaacacgtgttaattaactcgtttctatctgaatgcttttgcatacacaagggaaaagaagcaaaaagtgtattccttatctggaagactttgtgatttcgttgggcaaaaaagaactacacacaaaggtcttgaatgataagtgatggctctgcctagggttcggttcagtgtggaggttccattcaagaggaaggaggccagcacagcgaatctctgtccctctctggaagtggagagcctctaacaagttaccctctcccagatcagctcagggtaccgggcggccagcctccagcccctgtcacccttctcacccactcgccacccgtccctcaggggctttcttggaggcacgggggttattgaggggggcaagagaatctcaaccccgatacgtttatgtttcgacttccccgaatttccttgtgcctgcgttttgctgcctgggatccctagcgtgagaagggctcctttacactcagaggtgccgtaatggagccaagggacggcatcctcggggctcccgagccccgagtggagaagcttggggcagagggacggcgggggcggcccctggtgccgggctgtgcctggaagcgcgcccccgccccggcccccgctcccgcctccccacccgcgaaggcgggaccgcgcacggtgcgccggggggcgcgcacgcagggggctggcctgcccgcggcgcgggggaaagttgagttgggagaagttgggagcggcgggggcgcgccccggggtgggcacggggcagtcgtcgggagcgcgcgagtgcgccggaggacggggagagaccccgagacccccggggcacgaagtccagagcgagcgggtaggcggagaggtggtggcgggggacggccagggccgcagagggaggaagggagggggaaggagaggggggaactcgggactcgagcg

SEQ ID NO: 39657 - DNA, 2300 bp, Homo sapien
gcagggggcgcggcaccctggctttagggaactctgagaaggggaccccggaatgcccgcttccgaccagcactccatccgcctccccatccttctccccaagaccgcggttccccgcgccccagtctccgccctttcctccacttccactccctccccgctcgagtcccgagttcccccctctccttccccctcccttcctccctctgcggccctggccgtcccccgccaccacctctccgcctacccgctcgctctggacttcgtgccccgggggtctcggggtctctccccgtcctccggcgcactcgcgcgctcccgacgactgccccgtgcccaccccggggcgcgcccccgccgctcccaacttctcccaactcaactttcccccgcgccgcgggcaggccagccccctgcgtgcgcgccccccggcgcaccgtgcgcggtcccgccttcgcgggtggggaggcgggagcgggggccggggcgggggcgcgcttccaggcacagcccggcaccaggggccgcccccgccgtccctctgccccaagcttctccactcggggctcgggagccccgaggatgccgtcccttggctccattacggcacctctgagtgtaaaggagcccttctcacgctagggatcccaggcagcaaaacgcaggcacaaggaaattcggggaagtcgaaacataaacgtatcggggttgagattctcttgcccccctcaataacccccgtgcctccaagaaagcccctgagggacgggtggcgagtgggtgagaagggtgacaggggctggaggctggccgcccggtaccctgagctgatctgggagagggtaacttgttagaggctctccacttccagagagggacagagattcgctgtgctggcctccttcctcttgaatggaacctccacactgaaccgaaccctaggcagagccatcacttatcattcaagacctttgtgtgtagttcttttttgcccaacgaaatcacaaagtcttccagataaggaatacactttttgcttcttttcccttgtgtatgcaaaagcattcagatagaaacgagttaattaacacgtgtttagcagcaactctggttccggtgctgaggagtgctgtttgggatccttttccctcggtccatagccctcaagaatgcaatcatgagacaattagagaggcagcgtaagggaatctataatcagctcctttaaggggtgaggcagaggctgctgcaagttgagcatcggtctgtggtcttgtctgtggagggggttaaccaacctgcctgccacaccctggctgactccagtgggccctgttccggagactggggtctgagggggacccccagggctccacccagttttcctcagcatgtcagagttcagcggctagagtcgggtgggctccgagacaacaaacggggctcagcagagagggggtctttggcgtgtgtccctccactaaaatccagcctcgaaggggcacagctgttctcccagccctgcggtcagctgttccctgtgaggtcatcatcgctcacaggcattccccagtcaattctggggtcactaggtggcttggggagaggtggaaacccgtgctgaggtcgtcaagaggccgttgggaacacaatgccaccaaccaggtcagcgctgggccgccagtgcccgggatctaggccgccaaaccccaaacccctaaccgagagcgctccgcccccatttccgctgcattctggaacgcgtagtcccggagcggcccttttcaagagggctgggagcacataaaaggaataacaacagcggggcacactgggaaccacggcgccgcggcggggcgcccggaaaacggacacgcgttgcttcctgggacttgaagtccaaggtttgcctccgcggtagaaacggagccctggagtcgagtgctgcagagagcgtgagcgcagacggctgggggttgtagtcttcttgtcctcggtctcgggcattgcggggagacctagtcgttttaggactacaagccccagaaggccctgcgcgggcagacggggcggggctggaggctcaggtgccgcctcctctgcaacgccggggccagagtcttaaaaccgagggcccgcaggggtccccgcggccgccgcgatgcagaaatacgagaaactggaaaagattggggaaggtaatggaatctcgagatgttcctgcaagagctcctctgcagatccttcggcattccttgaagccctggctcccttaccgtcagcaatgcctacaggctccg

SEQ ID NO: 39658 - DNA, 2300 bp, Homo sapien
ctctaacaagttaccctctcccagatcagctcagggtaccgggcggccagcctccagcccctgtcacccttctcacccactcgccacccgtccctcaggggctttcttggaggcacgggggttattgaggggggcaagagaatctcaaccccgatacgtttatgtttcgacttccccgaatttccttgtgcctgcgttttgctgcctgggatccctagcgtgagaagggctcctttacactcagaggtgccgtaatggagccaagggacggcatcctcggggctcccgagccccgagtggagaagcttggggcagagggacggcgggggcggcccctggtgccgggctgtgcctggaagcgcgcccccgccccggcccccgctcccgcctccccacccgcgaaggcgggaccgcgcacggtgcgccggggggcgcgcacgcagggggctggcctgcccgcggcgcgggggaaagttgagttgggagaagttgggagcggcgggggcgcgccccggggtgggcacggggcagtcgtcgggagcgcgcgagtgcgccggaggacggggagagaccccgagacccccggggcacgaagtccagagcgagcgggtaggcggagaggtggtggcgggggacggccagggccgcagagggaggaagggagggggaaggagaggggggaactcgggactcgagcggggagggagtggaagtggaggaaagggcggagactggggcgcggggaaccgcggtcttggggagaaggatggggaggcggatggagtgctggtcggaagcgggcattccggggtccccttctcagagttccctaaagccagggtgccgcgccccctgccaccaggagggggtagtctccccgaggcgccgccggccctcccactccccggctggctccagaccacccctcccctccggcccccccgcatagtccttcagtcccgtccggggcgcccagactgggggttgcccggggcccccatccccaatctccgggttgagaggcgaagccaggaaaggcgggtggcgggtaaggtcggacaaggggtcagacagaagagggagcagctgggtgggaatgggaaagatgagcccggagagttggacctgactcccggggtcggtttgtccaggcgggaagttctgtgctgggtgtgagaggcggcactgcctgaaacccagggtctactttatcccccttcgtttcccccgccagccccacatggaagagctgcggaatttacgagttcacttggggggtggttaatgcccaagtgggggtccgaggtgctaatcccttggtcaaggggagagatactaatcctctgggccggtcggggctggtcccgggaatgtgcccctacccggattatcggcaccgatgctctggacagaagctgctttgtgttctgggacagcaggggagggggtgcagaggagtgtggaggagcgcgacgagggcacagcctgaggtgggagtgggcgcctgcaggtgctctgggcggactctccccacacccttcccagactgggtgcactcacgctcacccacaccacccgccctggctgaaggcctgctgagggggaggggaagagcgtggttagccaagttggagtgcttgccaagaatgtgttgccaggctccccatcctgggtgacccccccagacctatattgtttgacgctacactgacttgtcttactcctaagtcaggcacccccagtccccagcaacacactgggagcatgggttgttgggtaccgtcactttttgccagtcttgggtgccccctgtgctgacccgctaggaatgcgccccctatttgcagggattgggctccctcctgcagctccttctctgcccccaccacacagtgtcctccccagactccctacagtcacagtcaggagggtggcagcactgccactcagattttcctggctccaggctctagaggggcgggatccagactgcccctcagaggcagaacctcaaggttgcggtgcccaccccctcccagcccatcacatgcccctcccccattataaagctctgcccagcccatgcccaccttctgtgccttcctctctctcagtgagtgagtggagttgagctcctgccctccacccagccagcctgcttccctcctgccggtccccaaggacctgggggagggaagcctcctgccggcctgtactggggagggggcaccccctccctgcaggggcatcttgggctctctccagagttcttccattcgtctgcttcctgtctcggcagc

SEQ ID NO: 39659 - DNA, 2300 bp, Homo sapien
gatgctctggacagaagctgctttgtgttctgggacagcaggggagggggtgcagaggagtgtggaggagcgcgacgagggcacagcctgaggtgggagtgggcgcctgcaggtgctctgggcggactctccccacacccttcccagactgggtgcactcacgctcacccacaccacccgccctggctgaaggcctgctgagggggaggggaagagcgtggttagccaagttggagtgcttgccaagaatgtgttgccaggctccccatcctgggtgacccccccagacctatattgtttgacgctacactgacttgtcttactcctaagtcaggcacccccagtccccagcaacacactgggagcatgggttgttgggtaccgtcactttttgccagtcttgggtgccccctgtgctgacccgctaggaatgcgccccctatttgcagggattgggctccctcctgcagctccttctctgcccccaccacacagtgtcctccccagactccctacagtcacagtcaggagggtggcagcactgccactcagattttcctggctccaggctctagaggggcgggatccagactgcccctcagaggcagaacctcaaggttgcggtgcccaccccctcccagcccatcacatgcccctcccccattataaagctctgcccagcccatgcccaccttctgtgccttcctctctctcagtgagtgagtggagttgagctcctgccctccacccagccagcctgcttccctcctgccggtccccaaggacctgggggagggaagcctcctgccggcctgtactggggagggggcaccccctccctgcaggggcatcttgggctctctccagagttcttccattcgtctgcttcctgtctcggcagcccggccccggctccacggggtgtctcaccctccccaccacaccctctctggtctcaggcccacctctggtgggtgccctgaccctgcgaggctccgttgtctgcctgggccttcactcccctctttccccagctcattatcactccctccctcatctttgttgctttctctccgggcctgggccttgactcctttctccctcatttttcttgcggcctttcccacctcctctctcctcctccctctactcagcctctcggcccttttcggcccccctcgcctcagtcctctcctgtctccttgttcttctcttttcttcctataaataactctcctctgtgctgtggctgccgctaagggccactctgaggcccttcatactccaggaggatccccagcagcgcagcctgcgcgtggtggctcctgccctcccagggctctcgatggtgatcaggcctctcccccatccaggttatgcctccgcctcgttgccctgaaagccgcagcgacagcgaaaagggctaagattcggccatgagcagcgcccctcggcgccccgccaagggcgcagattctttctgtacggtgagtgtggcccccaggtcgccagcccaaccttccctccctgggcagccttgggtgctccggccaagggtcctcgccaaccaggggtgtgagcgtgtgtgagtgtggagactgggaggatgctgccatccctaccctgactttgcatgatggtcgtagggggggatgggtagtgggggtatcagacgtcttccagtcctggggagggagttgaggctgttacctgaagacctaggtagcttagcctcagcggttgaggaactttgagaaccctgggtctctcacccagcaacccgtctcagacccggctggccttagaggcgcaggtcaagtctgcacgcgggccagggttctgggcggagctcgcctgccacgactggccacgccccctgcccacgtgccacccaggcccgcccctccctgcccccacgtggccaccgctccacatggccccctttggattttcctaaggagtcttaatgattaaccccgtgccacaatcagctccgctattggtcacactggcccagaggggcacgtgactgggaaggggcacaggctggtcccctccccctccttctcaggttcacccctgccggccatggacttcctcctgcggcctcaggtgcgaggggtctgcgaccctctctccccatggcggcaagctccctgcgcctctccccgtcccctcgtcccacggggctgcttctggtgggagtggggctgggcgcttaggggagccaggagatggacaggagccttcctcacagaggggagaagccagccccctggcccgctcaccttctcttatcc

SEQ ID NO: 39660 - DNA, 2300 bp, Homo sapien
gagtagacacactggggtgaagtgggcaggagaatagatacgcttgggggtgaagtttggttggggtgaagtttaggagaggcgttgcttaggcccttaccttgggatagggtttgggtgagttgggagctggttgaagacctcgagctcagatgacagaaagttaggacttgggattcggcgatgggaaggggcacccggaggcaagtttggggcgactgggaggcagagaagccggtaccctggggtgggtgaggggacggaggctgaggacggtgggagcgtcgcggtggggtgagggcaggaccctgtggaggttccagggctcctggccagggggcccgggcctcacgggctctttgtgcctctccagctcggtagcgcggcgggcaaggcaggcgccatgaccctgattgaaggggtgggtgatgaggtgaccgtccttttctcggtgcttgcctgccttctggtgctggcccttgcctgggtctcaacgcacaccgctgagggcggggacccactgccccagccgtcagggaccccaacgccatcccagcccagcgcagccatggcagctaccgacagcatgagaggggaggccccaggggcagagacccccagcctgagacacagaggtcaagctgcacagccagagcccagcacggggttcacagcaacaccgccagccccggactccccgcaggagcccctcgtgctacggctgaaattcctcaatgattcagagcaggtggccagggcctggccccacgacaccattggctccttgaaaaggtaagtaggtcaagaggcaggagcaatgctaaagacaggggttgggagagtggtcgcagaaggcccccagagacacctaagacccagccctcctttatactggaggcgctgagcgccccagatcacaactgtacttgttcccctggcagacggcccctcccaggccagggccggtgtgttgtggagggcagggggagggtgggagtgctgttccggggccagggactaggattgcctgaggcctgctctcttacccaggtccctctctcctcaggacccagtttcccggccgggaacagcaggtgcgactcatctaccaagggcagctgctaggcgacgacacccagaccctgggcagccttcacctccctcccaactgcgttctccactgccacgtgtccacgagagtcggtcccccaaatcccccctgcccgccggggtccgagcccggcccctccgggctggaaatcggcagcctgctgctgcccctgctgctcctgctgttgctgctgctctggtactgccagatccagtaccggcccttctttcccctgaccgccactctgggcctggccggcttcaccctgctcctcagtctcctggcctttgccatgtaccgcccgtagtgcctccgcgggcgcttggcagcgtcgccggcccctccggaccttgctccccgcgccgcggcgggagctgctgcctgcccaggcccgcctctccggcctgcctcttcccgccgccctggagcccagccctgcgccgcagaggactcccgggactggcggaggccccgccctgcgaccgccggggctcggggccacctcccggggctgctgaccctcagcccgcactgggagtgggctcctcggggtcgggcatctgctgtcgctgcctcggccccgggcagagccgggccgccccgggggcccgtcttagtgttctgccggaggacccagccgcctccaatccctgacagctccttgggctgagttggggacgccaggtcggtgggaggctggtgaaggggagcggggaggggcagaggagttccccggaacccgtgcagattaaagtaactgtgaagttttcactcttgcagtgtgtctgagtgtgtgcgggctggcgggcggggagtcctcgccccttgggagagaagggcacggactgcgcctggggtctggccctccgccttcccttctccccagcgttctgctctggctttggcgccggcctccgtggccccgccctcggcgccgggcgcgcacttcccgcgggcggggctcgcggctccctggctcgcagtgcctgccgggagccacgtctccgaagaccgatagctgcttcgggattggcgtccgggcggctatctaggggctgctgggaagatggcggactcggtggctagccgatgaggaggccgcggggggaacccggcccccgggccccgagaccgactgagggagcgacctgcgcagggcccggggagtcatgtaggggtggcgcctgcg

SEQ ID NO: 39661 - DNA, 2300 bp, Homo sapien
gcaggaagtagcaccaggtatacctcccaagagagacactaagagcaaagagctcctcaaatgtgttgccccagcaactagcacacacgtgttatagcactgttgggctgttcacacgtctagctcttctactagtatatggagccacatgagggcaggaagagggtctgattcaccattttattcccagtatcttgcacaatgcctgggatatagtgtgtgtgtgtgtgtgtgtgtgtgtgtgtgtgtgtgtgtgtgtaattttttttgagacggagtctcactctgtcacccaggctggagtgcagtgactcgatctcagctcactgcaacctccacctcccgcattcaaatgattctcctgcctcagcctcccgagtagctgggattacaggcgcccgccaccacgcccagctaatttttgtatttttttttgtagagacagggttttaccatgttggccaggctggtctcgaactcagtgatccgcctgccttggctcccaaagtgccaggattacaggcgtgagccactgcgcctggccatagtacatcttttaaaaaatatgttagtagaataaatgaatgaacaggagggatggaactagaggtaggttagttctgtatggtatcaatctagactgacattcctaaggcaatatttgggccacttgctcccacagtaggcaagaaccatgggaagactaggatagattattttaaatcaagactggcctgtaaaaaccaggatgtgagatctctgtggctacaggagcccagagggaaaaatccagatatccacaggcctgggattcaatgccatccacacagtaacacaccaaagacccgactcctgagaccaggtttgggtggaggtgagcgaatagctactgtgtgacatgtaccttagtttttacactttttaataaaacatctaatttcttccttatgattgacttacgaggtgtgttttagagaggaagaaattaatgttcagagagattcaataacccacccaaggtcatatagctgagaagcacaagataagggatcaggatttctgccaggttccaaggtctatgcttcttccacagccctgaaggggctgtggagtcccgaaggtggaggaggggaccaaggaaaggggcagccctgaggatgggtatccctagccagcctggtggggcagcccatggatattgggctctgggctgaagaattaattttggtggccaaagtgccttctggcgtccactgtgacataacagtaggggccacctgagttcctcagagccttccacactgcatcacgaacacgggtactctgacgtgctccagctgacgtcggtgtctggtgtgatagatgccctggctgttggcaggggagggggcggacgctgctgccgcccaaacctctagggggtagcacaacccccaaaaccgcccccgccagccccttcgcgatctgcaggcgcagagaaccgcgggtggagccccacacgtgggtccgcagggcggagggcggggacagcgcggcgccggactacaagttccacaatgccccgggccgcggcggcggggaaggaggggtgcttcaggtgcctgcgacctccgcgcctcccgcccggaagtgcccgaggggccgcgatggagctgggggagccgggcggtgagtccccgcgccgtgaccgcgcccaccccgccgcccagggccccggtcgggccgggatcgccgtgccctcctgcggcttcggggggcgggaaggtgggaggggtgatgagaggtgggggtggggaacgtgaagtctcggattccgggcgggatctggggtcaggcagcccggggggcttggagagacttccagaggaggcgcggagttagtcctccgcggagtggggttgaggggacctggagggggccgagctgggtgggtggtgacgctcggtggctccagattgcccaggggcggagtttgacgtttgctgtgggggaagcctgggaagcagtcctgtgccgcgggtggggtttaggtgaaccgtaacgcggggggcgggggtgggggcacagaggctctacccccacctcttagaaactttagcagcggagtagatgagcctggggtgaagtcggtgaaggagtagacacactggggtgaagtgggcaggagaatagatacgcttgggggtgaagtttggttggggtgaagtttaggagaggcgttgcttaggcccttaccttgggatagggtttgggtgagttgggagctggttgaagacctcgagctcagatgacagaaagtt

SEQ ID NO: 39662 - DNA, 2300 bp, Homo sapien
tgcagtcccattgccaaagtgggctgcagttctgttagccccctcccccccaccaacacacacacgtttcctaaaacctacaagaggtgacatttgcagaggccgcagccaataaatctgccagagatgttgcagggtatctgctacccccagatatcctagggcatcagtgacacacatcgtccttcttacgcacacttccacttccctggccaagctggatcttttcccagcatgaagctgtccactgtttgattacccacacaactcagccccagaaccaacccagtcactattcccgagttccttgtaccttccaaagcacctggtgcaagctaatcaacacacagggtctcctaagctcctgaggaacctgtgtttctatctccctgcataagcttaaggatatcttgtgccctctctgggtttcatctgcgaaatatagtggttgaacataaaacctagttctgatgttgtataattctaaaagtaacatccaacatctcttttaggtgcttaattagaattgacagcaggaagtagcaccaggtatacctcccaagagagacactaagagcaaagagctcctcaaatgtgttgccccagcaactagcacacacgtgttatagcactgttgggctgttcacacgtctagctcttctactagtatatggagccacatgagggcaggaagagggtctgattcaccattttattcccagtatcttgcacaatgcctgggatatagtgtgtgtgtgtgtgtgtgtgtgtgtgtgtgtgtgtgtgtgtgtaattttttttgagacggagtctcactctgtcacccaggctggagtgcagtgactcgatctcagctcactgcaacctccacctcccgcattcaaatgattctcctgcctcagcctcccgagtagctgggattacaggcgcccgccaccacgcccagctaatttttgtatttttttttgtagagacagggttttaccatgttggccaggctggtctcgaactcagtgatccgcctgccttggctcccaaagtgccaggattacaggcgtgagccactgcgcctggccatagtacatcttttaaaaaatatgttagtagaataaatgaatgaacaggagggatggaactagaggtaggttagttctgtatggtatcaatctagactgacattcctaaggcaatatttgggccacttgctcccacagtaggcaagaaccatgggaagactaggatagattattttaaatcaagactggcctgtaaaaaccaggatgtgagatctctgtggctacaggagcccagagggaaaaatccagatatccacaggcctgggattcaatgccatccacacagtaacacaccaaagacccgactcctgagaccaggtttgggtggaggtgagcgaatagctactgtgtgacatgtaccttagtttttacactttttaataaaacatctaatttcttccttatgattgacttacgaggtgtgttttagagaggaagaaattaatgttcagagagattcaataacccacccaaggtcatatagctgagaagcacaagataagggatcaggatttctgccaggttccaaggtctatgcttcttccacagccctgaaggggctgtggagtcccgaaggtggaggaggggaccaaggaaaggggcagccctgaggatgggtatccctagccagcctggtggggcagcccatggatattgggctctgggctgaagaattaattttggtggccaaagtgccttctggcgtccactgtgacataacagtaggggccacctgagttcctcagagccttccacactgcatcacgaacacgggtactctgacgtgctccagctgacgtcggtgtctggtgtgatagatgccctggctgttggcaggggagggggcggacgctgctgccgcccaaacctctagggggtagcacaacccccaaaaccgcccccgccagccccttcgcgatctgcaggcgcagagaaccgcgggtggagccccacacgtgggtccgcagggcggagggcggggacagcgcggcgccggactacaagttccacaatgccccgggccgcggcggcggggaaggaggggtgcttcaggtgcctgcgacctccgcgcctcccgcccggaagtgcccgaggggccgcgatggagctgggggagccgggcggtgagtccccgcgccgtgaccgcgcccaccccgccgcccagggccccggtcgggccgggatcgccgtgccctcctgcggcttcggggggcgggaaggtgg

SEQ ID NO: 39663 - DNA, 2300 bp, Homo sapien
ggagcacgtcagagtacccgtgttcgtgatgcagtgtggaaggctctgaggaactcaggtggcccctactgttatgtcacagtggacgccagaaggcactttggccaccaaaattaattcttcagcccagagcccaatatccatgggctgccccaccaggctggctagggatacccatcctcagggctgcccctttccttggtcccctcctccaccttcgggactccacagccccttcagggctgtggaagaagcatagaccttggaacctggcagaaatcctgatcccttatcttgtgcttctcagctatatgaccttgggtgggttattgaatctctctgaacattaatttcttcctctctaaaacacacctcgtaagtcaatcataaggaagaaattagatgttttattaaaaagtgtaaaaactaaggtacatgtcacacagtagctattcgctcacctccacccaaacctggtctcaggagtcgggtctttggtgtgttactgtgtggatggcattgaatcccaggcctgtggatatctggatttttccctctgggctcctgtagccacagagatctcacatcctggtttttacaggccagtcttgatttaaaataatctatcctagtcttcccatggttcttgcctactgtgggagcaagtggcccaaatattgccttaggaatgtcagtctagattgataccatacagaactaacctacctctagttccatccctcctgttcattcatttattctactaacatattttttaaaagatgtactatggccaggcgcagtggctcacgcctgtaatcctggcactttgggagccaaggcaggcggatcactgagttcgagaccagcctggccaacatggtaaaaccctgtctctacaaaaaaaaatacaaaaattagctgggcgtggtggcgggcgcctgtaatcccagctactcgggaggctgaggcaggagaatcatttgaatgcgggaggtggaggttgcagtgagctgagatcgagtcactgcactccagcctgggtgacagagtgagactccgtctcaaaaaaaattacacacacacacacacacacacacacacacacacacacacacactatatcccaggcattgtgcaagatactgggaataaaatggtgaatcagaccctcttcctgccctcatgtggctccatatactagtagaagagctagacgtgtgaacagcccaacagtgctataacacgtgtgtgctagttgctggggcaacacatttgaggagctctttgctcttagtgtctctcttgggaggtatacctggtgctacttcctgctgtcaattctaattaagcacctaaaagagatgttggatgttacttttagaattatacaacatcagaactaggttttatgttcaaccactatatttcgcagatgaaacccagagagggcacaagatatccttaagcttatgcagggagatagaaacacaggttcctcaggagcttaggagaccctgtgtgttgattagcttgcaccaggtgctttggaaggtacaaggaactcgggaatagtgactgggttggttctggggctgagttgtgtgggtaatcaaacagtggacagcttcatgctgggaaaagatccagcttggccagggaagtggaagtgtgcgtaagaaggacgatgtgtgtcactgatgccctaggatatctgggggtagcagataccctgcaacatctctggcagatttattggctgcggcctctgcaaatgtcacctcttgtaggttttaggaaacgtgtgtgtgttggtgggggggagggggctaacagaactgcagcccactttggcaatgggactgcagaggaactgggacatttcagggagctccctggccctagagggagtgaaaggacaggatggacaaggggtgaggacaagaaaaattgagagccacgtgggctttggttggtctctccaatgggatgagtaggggagaaaggcatatactatttcatccctccctcttcttcctctatgtaccaatggggtcgggtagcatttagctaatctcccaagtccggcagggggagggtcttttaggagagcactgctgcagccggcagtggagagcctgggcagggagacagggagaaaactccggcagcagggtggtctctagggctgacctcggagcctggggacaggggagcctatgccgcactgaaggcgggacgctgtaagcgaggagcagctgggcctgggcggactcctcggccaatcagcctcggtcagc

SEQ ID NO: 39664 - DNA, 2300 bp, Homo sapien
ggccaacatggtaaaaccctgtctctacaaaaaaaaatacaaaaattagctgggcgtggtggcgggcgcctgtaatcccagctactcgggaggctgaggcaggagaatcatttgaatgcgggaggtggaggttgcagtgagctgagatcgagtcactgcactccagcctgggtgacagagtgagactccgtctcaaaaaaaattacacacacacacacacacacacacacacacacacacacacacactatatcccaggcattgtgcaagatactgggaataaaatggtgaatcagaccctcttcctgccctcatgtggctccatatactagtagaagagctagacgtgtgaacagcccaacagtgctataacacgtgtgtgctagttgctggggcaacacatttgaggagctctttgctcttagtgtctctcttgggaggtatacctggtgctacttcctgctgtcaattctaattaagcacctaaaagagatgttggatgttacttttagaattatacaacatcagaactaggttttatgttcaaccactatatttcgcagatgaaacccagagagggcacaagatatccttaagcttatgcagggagatagaaacacaggttcctcaggagcttaggagaccctgtgtgttgattagcttgcaccaggtgctttggaaggtacaaggaactcgggaatagtgactgggttggttctggggctgagttgtgtgggtaatcaaacagtggacagcttcatgctgggaaaagatccagcttggccagggaagtggaagtgtgcgtaagaaggacgatgtgtgtcactgatgccctaggatatctgggggtagcagataccctgcaacatctctggcagatttattggctgcggcctctgcaaatgtcacctcttgtaggttttaggaaacgtgtgtgtgttggtgggggggagggggctaacagaactgcagcccactttggcaatgggactgcagaggaactgggacatttcagggagctccctggccctagagggagtgaaaggacaggatggacaaggggtgaggacaagaaaaattgagagccacgtgggctttggttggtctctccaatgggatgagtaggggagaaaggcatatactatttcatccctccctcttcttcctctatgtaccaatggggtcgggtagcatttagctaatctcccaagtccggcagggggagggtcttttaggagagcactgctgcagccggcagtggagagcctgggcagggagacagggagaaaactccggcagcagggtggtctctagggctgacctcggagcctggggacaggggagcctatgccgcactgaaggcgggacgctgtaagcgaggagcagctgggcctgggcggactcctcggccaatcagcctcggtcagcagcaccctcaggcgcagggcactgtttgggcattgcctagagatccgacaccccgcccagatcagcgcagggaggcgaaagcgacagccgggcgcgggaggagaccagggcagctgtcccctccgcgagggtggccctcgaggcaatgcgggtgggggctggtgaggaggcggaagggccgaggctgagtgggaggggccggggcgccagggctggagcgcgcggctcgggggtggaggctgcagagccagcgagcgagcgaggggcgggggcgcccgggccggcgcgcaggaggggcgggggcggcggggaggggggctcgggctgcgtgtgccggagccggcgggggcggcggtgcgtgcgcatgacgcggggggagggcctgggccgcgcgctcccggtcccgttgttgttgccgctggaggctgctccgaggcagcgggatcacggcgctgggaagcgctcggcagcggcggccacagcgtgcgcggcggcgcctcctggcctcggcctccggcccccggcccccggctccatgcgctagccccgcgccgccagcccagtagtcccggccccgccagccccgcgctcccgctcgccgctgccgccgccgccgccgccgccgcctccgccgcgccgccccgggcccgcctcgggccccacggctccgaagccatgaacttccaggcgggcggggggcagagcccgcagcagcagcagagcctggcggctccggggggcggcggcgctgccgcgcagcagctcgtctgcggcgggcagttcggcggcgcggggcccggggccgggggcggcggcggcccctcgcagcagctggccggcgggcccccccagcagttcgcgctctccaactc

SEQ ID NO: 39665 - DNA, 2300 bp, Homo sapien
ctcccatagctgctgtcctgtgcttgcttcttatttattgagacagggtctcactctgtggcccaggctggaatgcagtggctccatcttggctcacggcaacctggaccctctgggctcaagcgatcctcccacgtcagcctctcaagtagctgggaccacaggctcgtgccaccatgcctggctaatttttcatattttttttgtagagacggggtttcaccatgttgcccaggctggtctccaactcctggactcaagtgatctgcctgcctcggcctcccaaagcgctgggattacaggcgcgagacacggtgcctaattttttgtatttttagtagagatggggtttcactacgttggccaggctggtctcggactcctgacctcaggtgatccgcctgcctcagcctcccaaagtgttgggattacaggtgtgagccaccgcgcccgaccctttgcttgcattttcactggcttgcaggatgagcttgtgagtgggcagccttattctttggcagaacagccattccctgttgtgcgtgagagagagggcagatacacgtagatagggaagtcaaggcagaatgtgtttccttttgatctgcagctcagtgacgttggccggcttcactgagttgtgttcttgtctctgtacctgcctggggacctgggaagggcccctctgctggtacttccattgtggggggaacatgcatcccatacaggaagaagccgtcttcaccaacgctaataactagtcccacggaaatacaaactcaccaccagggcctctccaggcctgggagatccagcccaggacttgggaatttccagcgctcttttctgcagggagcacctaggatggagaggccctgccttccttaggcattcccactcagcccctcaggaatgtgccacttgtatctcccacttggctctgaccaggtccatggaattctaaagctgaaagggacgctgggagttgggctggactgggggtggaggaaagtgggcagtattgtctttttaaaggaaatgcaagcccctggtcccttgccactacttaaactggtttctcctgatccgtggctggtattgaggcagccagtggtttctgactttatggatgaccggaaactggctgggcttcagagcctgggagaggactgatgtttacaatgcagtgtcaatcacagccggggagctcttgcctccaattctgggtgagctctgggtttactgggtgtccaggcagcccacagtcatgaattggaagggcctcggagcttggaggagtgttttcatttacagaacgtcaggctggagccagtaccgcaggctaccacttgatctcagcccatcatcccgacaggaggtgagacccagtgagcagcaggggcctggagaggtccgggcctcagaagtgagtcactcacccagaactgcagcggaggttatctttgacttctctgctgcccttaggcaggacgcttaactcagtccagacagatgagtatcttctggattttataatctccaaagaagacagcctcagtcatcaacagaaaccgactgtagcagccagcaactctcgacctcagaatgtcagagccgaaactaagacaggaccacctcgttgaagctcgcgtgctgcagacgaggacacgcgcgcagacccggcatggctgcctctgacgtctcactcaggcttgtcatacttctgggcctcatgttcttggctcttctggctcttcctttgaagaatgagaaatggcccgcttttctccaaaatggggcccagtgtgtggtggactgaggactgttatttagttggcctgctcgtaatgacagctcctcacctacctgccggatcctaggaggcgccctgggctggaatttcctgttttcgagggctcccaggggctgccccagcaggccggctcccccgcgccgcgccgccgttcccgggcgttccaggccagacttgccgcctctctctccgggctgggctgactcccggcctctccaggtctgggcttgccggccgcgaggtggaggagttgagggactcggtcggcccacaccaggtgcccagaggccggaggtccgtgcgccccggccgcggccccggcccgggcccagccccgtgcccctcgccatgggcctggcccgcgcccgccggccctgagcatggagcggggctggccgcagggggacagctgtcccggggagcggcccgccgcttgccgccgcgcccacagcgtctgcgactcgctggacctgcacggcgcctcggc

SEQ ID NO: 39666 - DNA, 2300 bp, Homo sapien
cgccccggccgcggccccggcccgggcccagccccgtgcccctcgccatgggcctggcccgcgcccgccggccctgagcatggagcggggctggccgcagggggacagctgtcccggggagcggcccgccgcttgccgccgcgcccacagcgtctgcgactcgctggacctgcacggcgcctcggccggccgcgctgccgccgccctgcaggccgccctctgcgccgccagtgagcagccggcgcggccgcggagcgtgtgctcgggcggcccggagccgccgcccaccggcgcccgcggccttttgctcggcctcctgcgcccgcgcctcggccgccggggcctggcgccctcgggaccgcccgtctcgcctgcgcccagccccgcgtccagccccgcgccgacccggcgcagccgcacccgcggggagccgactccgcggccccggccggccagcatgactttcctggaggtgaaccgcctggagctggcggccgccgaggcgccgggcgcgggtctggggcgcgcgggcagcgcgggcttcctgcgcggcgcggcgttgtggagcagccagcgctggccagtgctgcgcggcgggcgcgggccggaggggccccggcgcggcctggcggcgctcaggaagagcttcagcttccgcctgcgccgcggccaggaggtgcggcgctccgagtcagggctgctggcccggccgccgcgcgcgcgcacccgtagcgacggcgacgccggctccctaggcgccttccccagccgccgcgacctgctgggctccgacgccccgcgcgcagcgccggagcccggccgcccccgcaccgccgccggcctctggaggctgctcacgagccgcttccgccggagggagcccgcgcccgccgcgccgctgtggggccgtcgggcggctgcggccccggagctcctgcgcgcgcccagcggtaagggggcgggcctggggggcgtctggcagaaaacagctcgcgggagaaaagccggacgcgcccagggcaggcgagctgccgcgcgcgtccggggctggcggggtctggggtctggaccgagtgtcgtccgcgcctggcgtctggggtcttcggcagtggccgaggaggacaggccggagggggagctctcgggtgcggcccaggaaaggaagaggagactcaccagagtcagagggctctgggctaggccagacacctttcctagttccctgtcggggcagcgcgctcgcctccggttgcccctgtgcatgaggttagggactgctgtggacctggtcgtcataactgctctttgacacaaacttgggacagtgcctctgggagccagggagggaagcagtgctgcccagctagagaggggttcccagagctagcccgagcacccatgtggaacctggaggtgacggagatgggggcctggctgtcggagggctctgggtaaagggacttgccagtcaggttctgaggacagactgaagggaagggagcccaggaggcggcctccctgctaaggaggagcttagagaggaggcgggtggggtagatggctccctatccacctgcccctggcagaacagggccaggccaggccaggctcctccctcttcacccggctcaggaatgtggtgggtggccccaccctgccagggtgcgctgttcttacttgcaggagtctgccccccaaccaggtgcccagcccttgggtctgttctgagacctgctggagtggcctctaacctgggcctggtatttgggccacaggggcactaggccaggtgtggcttggtggggggacaataaacctgctggagcaggaagaggaggaaggacacagggccgaaaccagggggactgagcccacagccctcagagtcctgttctgaagaccatccttactctgcttcactcaagaagaaccttcccactgcctcctggggaactaggggtgagggttgggggtcccgtggaggaagctgctgtcctctggcctgggcttggggagggcatcataggtgacacaggcagcagtggttgggacaggtgtgtgtgccaccctggccctgacggggcggctctgtcttccgcagactcgtttgtgaacagccaggagtggacgctgagccgctccgtaccggagcttaaagtggtgagtgtggcccatgggcagcaccggcggcctggagctgggggggcgaggctgggtgccgcgggcctgggccttgcttctccggcttctgtccccttctctgctcagcttggccctctctgccctctctcctccccttc

SEQ ID NO: 39667 - DNA, 2300 bp, Homo sapien
tgggggcctggctgtcggagggctctgggtaaagggacttgccagtcaggttctgaggacagactgaagggaagggagcccaggaggcggcctccctgctaaggaggagcttagagaggaggcgggtggggtagatggctccctatccacctgcccctggcagaacagggccaggccaggccaggctcctccctcttcacccggctcaggaatgtggtgggtggccccaccctgccagggtgcgctgttcttacttgcaggagtctgccccccaaccaggtgcccagcccttgggtctgttctgagacctgctggagtggcctctaacctgggcctggtatttgggccacaggggcactaggccaggtgtggcttggtggggggacaataaacctgctggagcaggaagaggaggaaggacacagggccgaaaccagggggactgagcccacagccctcagagtcctgttctgaagaccatccttactctgcttcactcaagaagaaccttcccactgcctcctggggaactaggggtgagggttgggggtcccgtggaggaagctgctgtcctctggcctgggcttggggagggcatcataggtgacacaggcagcagtggttgggacaggtgtgtgtgccaccctggccctgacggggcggctctgtcttccgcagactcgtttgtgaacagccaggagtggacgctgagccgctccgtaccggagcttaaagtggtgagtgtggcccatgggcagcaccggcggcctggagctgggggggcgaggctgggtgccgcgggcctgggccttgcttctccggcttctgtccccttctctgctcagcttggccctctctgccctctctcctccccttcagccctggcctttctccctcctgctgcttctttgcttttcctgctgggtcttctccctcgtgccctctgccctctgacccactcaccccttcctctcccgcagggcatagtggggaacctgtctagcgggaagtcagccctggtgcaccgctatctgacggggacctatgtccaggaggagtcccctgaaggtgagcgtcacaggcccagcctgggccctgaggccggccactcctccagctcctgcccacagggtctgggtggggggtctccagcccccttccagtcctcttccctcccgcatgggaagctgtagatttcttcttggcccctggattctttctccacactttggacctgactgcgcgctctgtcctaggggggcggtttaagaaggagattgtggtggatggccagagttacctgctgctgatccgagatgaaggaggcccccctgagctccaggtgatgctcctgcccagggttagggcccaccgctgtgcctggagccctttctcgagcttgctggttgggactgggagaggtggtatgtccagggagaagggtctacttgagttcacctgccctgcatgggagtttgccaggtccagttgcgggtgctaattttacttgctctaccctagtttgctgcctgggtggatgcagtggtgtttgtgttcagcctggaggatgaaatcagtttccagacggtgtacaactacttcctgcgtctctgcagcttccgcaacgccagcgaggtgcccatggtgcttgtgggcacgcagggtgaggcggggccctgcaggagctggcagagagcaggaagtcccgggcaacgatgcatgggggcaggggtgggcaggtgtgagaaagcccccaagcccctactcttttcccagtgctgactgggaccctcagcactctccgtgctgctcgtgtctgagggcttttgcccccactgaaacctgctgtccctgtgactagcaggtctgtgtttttttagatgaataaacgtgctcagagcttaagtgcttgctggtttgcactcagtgaggccatggaagggttgaaatgagacccaggcacccgcgttcttggtgctctgtgtgttccactcaccaggccctttgcacacctgcccttgggccaaatgccccccaccacactaccccagcttctccgaaagctgaatgactcccgccctcccacctccaacagatgccatcagcgctgcgaatccccgggttatcgacgacagcagagcccgcaagctctccacagatctgaagcggtgcacctactatgagacgtgcgcgacctacgggctcaatgtggagcgtgtcttccaggacggtaactcgggtgccgggtgggagtcactggcagccgcggccccagtgctggcgataggaaggctcccagt

SEQ ID NO: 39668 - DNA, 2300 bp, Homo sapien
tctgtggttctgggacaatgaacaagactttagcacatgtgtgctcaggccaggcacttggtactgtccctcacagaggactggggtggcaggagggcataggtaagcccagggctgccaggagcagcagtggcagggagtgtgggctccttcctgaacacaccttctaaatgtggctcctctgctctggttggttagtcccctggtcctcttcctgaagggctgtctgcctgggaagatgccatagccaccttgagaatgaaggcgactgcaggctcggcgagacccacagggctggacctgggcagggaggccgcgtgctgatgccaggcctttccaccattcccctgatggcacggagctgtgggtgacgtccagcccagccacagaagtgcaggcggaggctggtgtttggcgcctctttcctccgtctagctggtaacctcctcaccttctcttagtgacctgggaccaggtgactccttgtctacctgatgtcttcattattcctgccagagggagccctggtgagacttcctgcccttccactgcttcccaagaggcagcaggccccctgggctcttttcagcagaggacagtgtcagttttccctggagctaacggggtgagaagatagagccagcctggcgggaaagcagtctgatggccagtgcggtaaaggtgaaggccgggctcctcagggtaggaggagcgcgtctgggaaggctcgtcgcacggccgcccttaggatgcagatattccagaggtgctcacagaggggaaaggaggagcggctttatgtccaatcaatgtaattcagtcagaagttaaatctggcaccaccacccaggttcttctctcaggaaggggcatagacccatggagaggaatttgtgccactttaccaagggcattggctaggaattgccgtggagctcagggacagtgacagggacagggaagcaggaggcaacaggctgggacagcccttagggcagtgtctgatactaaacacttgtcaaacagtttaaagggaagcctctggaggagaggctggaagcaggaggcccagcggggctccaggccaggaagcggcaggctcccaccctccctccctgcactcggccgtggtgctccctaaatgatggggggagtccaagcacaaagtggccccccatctccggggccctgacttgaaagcagggtgagtcccgggcccaggacaggctggaggaagcctgcacacagggcacaggcttgggaatctgaaaaaccttggcttgaatctgactctgctaccatttaatcgtgtgttcctgggcagataagcctttctaagcctcagttgcttcatctacaaaacaggcactacctccctcaggtggtgaagattacgcgaggctatacgtggaatgtataaatacactgctgtaggatggtaaataccctgcacgcgacaggcagatgacatgacggcgatgacgatgactgccgccagggaattggtggtacctgtgagagcacctgttgctgtattccaaagtccagcaaaaagaatcagaggcttccttttaaactgtttgacaagtgtttattatcagacactgtcctaagggctgggactattctaggctttagaaggttcttaatgcccaggtgggggctgcagtgcttggtggccaccctgtcatccatgtccccgagtgtctccgctcccctcctcagccaggggctctccctaaatcccagcctggcccagcacttggcctgctttgtgctgttgcctctgaagccgttgttcctgagggcctgagcctcagcgcttagctccaggtccttcgccgcccccaactctacctccctcctggcagactccccctagagctgctttgagcaccgtggagatcgaggtggaatccagactcggagacattctgtggcttagaatcctgcttttcaagattggagccttccctctcctcccacagcagggagagacctaggagttgcaaggctcaacgctggagtgactgctgctaaccagtcttcatctgtctctcccacccggcctgcaggattacatgcagaacatccacggcaaggagattgacctgctgcggacaacggtgaaagtgccagggaagcgcctgccccgagccacacctgccacagccccgggcaccagcccccgtgccaacgggctgtccgtggagcggagtaacacacagctgggtgggggcacaggtgaggcggctgctgaggtgggggcctggggggtggctgccttggagccaaggcaa

SEQ ID NO: 39669 - DNA, 2300 bp, Homo sapien
ttggggtttctcttatcattccaaaaatgaggagcaggcccaagtgagtccctttccttgacagcagggagccagaggacagctgggctgtttccctagagcaagggaaacgagaagacgctgtcctgtcccgttcctgtccctgacatccctcacctgggagcggcagtggcatggaggagacagccccgtgccctcgctcctgtaatgacagcgcccacacgcaggagctcgcggacggtgcccacccagcccgcgtcccgctgccgcatgccgacgccgacaccgaccctcgtgcacactcacacatgtctctcactcaccgggcgatgttaacatctcattatctttgttactgtaattacattatccgctgctttatgcagaattatcctccgaggactaattgatggctccatgtttaattcattaatcattagcatcaaattcgacaattacagtgcacactgattgtgggattgcaggcgtaatgaggggagaattaacaaagaaaagggaaagcactttccctccctcaggattttgggtcgggggcttggggaggaagttgggcctgtgatgtctttggatggggctagggatgagggggaataagatttggaacctggaagggaatgaaagcaggggtgaggagaagcaaggtatctgagaaatgagggaccaagtgtgcaccccggaaggtttcctgaggcgggacctgtgagggcagaggacgggaggtgggtgggattctgaagaggcagcctctacatgtttcttcggggcctggagatggagaccggcctgtagcctctgtgctgcacgtatgtgactaagcacttactatgtgtctggtcctctttggggtgttgtgacagatacaagaggaacataaaacttgctccctgcctttgggcgtctcccagcagcagagctgtggccccttgggccattcctttaccttccagctgctgcagcctggtgccgtctccccgcaggcttcccctcagtcccgccgcctgcagggctggtgtgagacctggcgcctgcccttcccctggctgggcctctgcctgctgtctccagctttggccagctccgggccccttctctgctttcccactaacctccagcacctggcgggctcctccgcttcaaggttgaagcacctcaggttcggcccccgtgttcttagaccgcctggggccatttctttgtggtctcagtgttgggtggactgaagaaggggaaggaagcttaggttctcggagttccaactcaggccttgtaccacaggcctctgaggccccacggctgttcccagaatctctccagcaggggctcagccagggagtgaggtgggagaattgtgcggcgctctgtcctccctccactgccggccgccgcgcctgccccagccttggctttcctagagccttcggttccccctggctctgccattcttccctgatgggaaacgaaagattaattttctccagcccaacaggataattactaatactaattagacataattacttgaatttgatacacttatttctcgtcagaatggcagtaaagctgaggcgaagcaaatggcatatgtggactagaatggagggtgcaggggcccaagccaggaggggcccctcaaggagcactgcggcgatgggtgtcagcaccacccagctcgttccacaagttggaagatctctgatgcagagaccccccgccccgctcccggaccacagtgaggggacagagctgtggaccgtgaagatctggggacaggctgcttcctaaggcacacagggtccctgcgcagcctctggctctcccagaagctggcccgccacctgatgaacccagtgccctgctgaatgtctcaggctctgctctgcagctctatttttaggatagtatctttgagaatcctcccctgcccggcctcccttcccagtctgacccttcccgcccccaggtgccccccactcggccagcagcgcatccctgcactctgagcgccccctcagcagctcggcctgggctggcccgcgccctgaggggctgcaccagcgctcctgctccgtttccagcgccgaccagtggagtgaggccaccacttccctgcccccaggcatgcagcaccctggtgagtggtggctctgctgcttcccaccttttctggggccccagtgacagagaggaggggaactgggcagcattcttggcttgggaggctgcagtgggacagtgtccaggccaaggggtggggcccagctgggccctcctgggcttgt

SEQ ID NO: 39670 - DNA, 2300 bp, Homo sapien
cattagtaatcagagaaatgtgaatcaaaaaccataatgagatattatctcacacctgttagactggctattattgaaaaatgaaagataagtgttggcaaggatacggagaaaaggggactctgcatggttggtggtgttgtaaattagtaccattttgaaaaatagaatgaaggttcctcaaaaaactaaaactagaattaccttatgattcagcaatcccactactgggtatatacccaaaggaattgaaatcagcatgcagaagaggggtttgcacccccacgtccactgcagcactactcacaatcgccaagagatggaaacaactggtgtccatcaatagatgaatggatttttaaatgtggtgtatctggaggacattgtgctaagtgaaataagccaggtgcagaaagacaaataccgcatgatcttgcttattgtggaatctaaaaaagtcaaactcatagaagtaaagggtagaatggtgattcccagaggctgggggctcgagggaggtggacagggaaagggaaagggaagacattggtcagtgggtatgatgttacaggtaaataggataagttcaggtgttctattgcacagcaaggcgactgtagtgaataatgatgtacatttcaaaatggctaaaagaggattttaaatgttctcaccacagataaatggtaaatatcatttgatagatgtgataattaccctgatatgattacacattatatacatgtatcaaaatattatagccccataaatatatacaattatttgtcaattaaaaatgaaactttttaaaaagcaattgatttaaaaaaatttttttaagccagcgtgagccaaaggggcaagaccaatggggctggagcacctcaagcccatggtgggcagtggtgggtcagagctgagcccgagggcctggtttctcatcttctttctctctttttttccttttgatccacccggcccccaaacaaaagtcagtgcctgagtacacagagacatttctcctttctcactctctagtgaagagaccccatgtaaccacagcaggggagagatgccacccaaggtcatccagggagatgggggggttggcatcaaggacgagcatggggagtttctgtggcttgcctgtgggttacgctctgttactcaggcacacgtctgtctaagggagccccctgaggggtgcctcacacagcgagggcaatctgtgtcactactgtgaactcctcccttggtttgggagtgggaaggtgcagggctaacagatgacatttggaagggcaggaaatattatctggcacccacaggccttcccagtgggatcagagcccaggcagctggaggccgatttggtgaacaagaaagagctcaaggccctgggttccagtcctggctctgcaacaagctctctgcgtgatcttgggaaattcacttccctttaatgccgagatgacggactgggcagcatggtccgggtggtccctttccaccctgaggtcatacagccctggggtgaagctcagggttggcgggctcaggcctcacttgttctcctgcccctccctaattcccccacccggcctgactgacagctgggccagtcagggctatttatggctttgcctgatgttgtgctcccctgcgcctcccatgctgggccccacccagctcgggcccagcacccacctgcccagtccaccagcaacatcgctgggagtcgtgctgctttggctctcccagaacaagccatgccctggggaaagaactcctctccccactggggacaccatctggggtgccttccctccgccccggcctgccggatctggaggccccactcccgcccagcctgggagccccctcggccatcaccactgctctgccaagacatggccctgcagaatgccctctacaccggggacctggcaaggttgcaggagctgttccccccgcacagcacagccgacctgctgctggagagccgggccgcagagcctcgctggagcagccaccagaggggtgaggggcatctgggggttgctgagaaccagggggctgggctgactgcctcggccacagaggtcctaagggcttgagtgaaaggagaagcccccggctgtttctccccgacctcaaagcttgcccaatagcctacaccttggcccaagaacacagtcatgtggagcccagaatagctcctgctggatgcgtggccaggtcagcctcggagcgtgggacacaggggccttctgtctgtctgtatttccctcctgctctct

SEQ ID NO: 39671 - DNA, 2300 bp, Homo sapien
atgtacacagtgtgtggatgaaggccaaggtgtgtccacaggtagtaagagacaacaggagacctgaaactataaaacccctagaagaaaacataagggaaagctccatgatattggtctgggcagagatttcttggatatgacctcaaaagcacaggcaatgaaagcaaaagtagatgaatgggattgtaccagactaaaaggtttctgcacagcagaggaaatgacagagtggagaaacaatctacagactgggaaaaaaatatttgcaaatcaaacatcggataaggggtgaatatccaaactacacaaggaactcaaactactaaataacaacaacaacaacaaaataccccattaaaaaatgaacaaaggacttgaacagacacttctcaaaagaagacatacaaatggccaacatatattggaaaatatgttcaacattagtaatcagagaaatgtgaatcaaaaaccataatgagatattatctcacacctgttagactggctattattgaaaaatgaaagataagtgttggcaaggatacggagaaaaggggactctgcatggttggtggtgttgtaaattagtaccattttgaaaaatagaatgaaggttcctcaaaaaactaaaactagaattaccttatgattcagcaatcccactactgggtatatacccaaaggaattgaaatcagcatgcagaagaggggtttgcacccccacgtccactgcagcactactcacaatcgccaagagatggaaacaactggtgtccatcaatagatgaatggatttttaaatgtggtgtatctggaggacattgtgctaagtgaaataagccaggtgcagaaagacaaataccgcatgatcttgcttattgtggaatctaaaaaagtcaaactcatagaagtaaagggtagaatggtgattcccagaggctgggggctcgagggaggtggacagggaaagggaaagggaagacattggtcagtgggtatgatgttacaggtaaataggataagttcaggtgttctattgcacagcaaggcgactgtagtgaataatgatgtacatttcaaaatggctaaaagaggattttaaatgttctcaccacagataaatggtaaatatcatttgatagatgtgataattaccctgatatgattacacattatatacatgtatcaaaatattatagccccataaatatatacaattatttgtcaattaaaaatgaaactttttaaaaagcaattgatttaaaaaaatttttttaagccagcgtgagccaaaggggcaagaccaatggggctggagcacctcaagcccatggtgggcagtggtgggtcagagctgagcccgagggcctggtttctcatcttctttctctctttttttccttttgatccacccggcccccaaacaaaagtcagtgcctgagtacacagagacatttctcctttctcactctctagtgaagagaccccatgtaaccacagcaggggagagatgccacccaaggtcatccagggagatgggggggttggcatcaaggacgagcatggggagtttctgtggcttgcctgtgggttacgctctgttactcaggcacacgtctgtctaagggagccccctgaggggtgcctcacacagcgagggcaatctgtgtcactactgtgaactcctcccttggtttgggagtgggaaggtgcagggctaacagatgacatttggaagggcaggaaatattatctggcacccacaggccttcccagtgggatcagagcccaggcagctggaggccgatttggtgaacaagaaagagctcaaggccctgggttccagtcctggctctgcaacaagctctctgcgtgatcttgggaaattcacttccctttaatgccgagatgacggactgggcagcatggtccgggtggtccctttccaccctgaggtcatacagccctggggtgaagctcagggttggcgggctcaggcctcacttgttctcctgcccctccctaattcccccacccggcctgactgacagctgggccagtcagggctatttatggctttgcctgatgttgtgctcccctgcgcctcccatgctgggccccacccagctcgggcccagcacccacctgcccagtccaccagcaacatcgctgggagtcgtgctgctttggctctcccagaacaagccatgccctggggaaagaactcctctccccactggggacaccatctggggtgccttccctccgccccggcctgccggatctggaggccccac

SEQ ID NO: 39672 - DNA, 2300 bp, Homo sapien
aatatgaaaggtataggggcttgggggaaaagaggatgttacaaattgagaggtgggagaagggttccaaagaccagcatcacctgctggctgtgttaaagctagcaacccctcaatcaacttacctctccacccagctctgaacggctggccacatcctacgggctaaggtttaagagaattaacaggccacttctcaatccaaaacaaggcactgctaattttagaaatatgtattttgtggacttttaaagcattatttaaattaccaaggttgacatttttcttgacaaataagctgactagactatttccattcctccaggttctgaagatctcctgtcctagtatggagactctggagatcccgagactacctgaattcttagcaatatccagcacttccttaagtatcaagggctctgtccctcactgtccccattatcccagcagcccactctccagatgccattctcccctgaaccaaggctctggactctcaggacagactaacctgggccattttgctccaggccccacttaaggcataaagcagtcaagccagtaccctctggggtcagaggactcccatctgtctcagctgcagtgtctcacgggaggctcctgtccctgttgcccagggcagctcctggactttgtggccatctgagaagatcctactcatttttcaagtgagagcacaccaattccacctttctgggcagctactcacaagaaatttccctcctttttgaatacttctgtctcctatctaaatcacaatttagcatctaatttgtgtcctgtatggttctgtcttactggctttccaagaagatcatgagctcctaaggggtttaagcaccatctgggacagttgctcccgccagtcctggctgtattatgagtactgaaaaatcatggctgtgtcttcccatagggatggctgatttcagaggcagagtgatgaatccacaccaggaaggatggccactggtgaaatgctattgaagttcaaaagacccagataaggtatgcagagccctgggctggaagtgaattcaacagtgatgataactatggctgtggacaggtaaaaatacaaaatttcctgtatcccaataggaagagaggttcacagacgttggtgtgaaaatgcaaactcctggccatctctgcacctctctcattctaccaaatgcgattaatcaataggtctgatgctcagcaatctgaatttttttatttttttgagacagtgtctcggtctgtcatcaggctggagtgtagcggcacgctctgctcactgcagcctcaacctcctgggctcaagtgagcctcctcttatcagagcagctgggaccgcaggcacatgctactatgcccggttcattttattactatttgtagagaaggggtctccctactttgcccaggctggtcttgaacttctaggctcaattgatcctcctacagtggcctcccaaggtgatgagcttacagtcggattacaggtgtgagccactgtgcctggccagtctgcatttttttgagacagggttttgctctgtcatccaggctggaatgcagtggtgcaatctcagctcactgcaacctccacctcctgggctcaagcgatccatccaccctagccacctgagcaggtgggattccaggcacataaagacgggttttgccatgtttcccaagctggtcttgaactcctgagctcaagtgatccacctgcctcagcctcccaaagcgctgggattacaggtgtgagccaccgcacctggcctgcatttttaacaagcagcccaactgctgtgcagttggggcagaacctcagatcacaatcagaaaaccacgctcctggacagtggttctcaaaatagtctctagaccagcaacaacagcatcacctggaaacttgctagaaatgttaacgttcttggtctcccccaaaacctattgaaccagaaacgctgaggcgagatctggcaatctgattgcatgagccctccaggtgattctgattcatgttaaagtctgtgaatcacaggcctgagaaaaggtacaatttcaaatcagaagtaaagggacaaagttcttccagctcctatggactagtcttcagttcccatcgacacactgacgctggatccagctcctgctgtgggcagtgcatgttggcactgcagggaggagaaggccccagagacccgagaaggaaggtagggaccgtggcttcctctttctttattgggcgctttgtagatgtcacgcaggtctaaaagtta

SEQ ID NO: 39673 - DNA, 2300 bp, Homo sapien
agatccacctgcctccacctcccaaagtgctgggaatacagtcatgagccaccacactcagccaaatgagtgctttttatgtgatccacaatcataaataacttttttttttttttgagatggagtctcgctctgttgcccaggctggagtgcagtggcgtgatctcggctcactccaagttccacttcccaggttcacgacattctcctgcctcagcctcccgagtagctgggactacaggtgcccgccaccatgcctggctaattttttgtatttttagtagagacggggttttaccgtgttagccaggatggtctcgatctcctgacctcgtgatccgctggcctcggcctcccaaagtgctgggattacaggcgtgagccaccgtgcccggcccataaataactcttttgcttcatacagaagggttttacagtcatttaactgtattctttttgtaactatattcccattttacagaggagaacatgtactttgcccaaggccacacaatgaagcatagaactggggttatgctcttaattatgctatgccaagtgaggtctccacctaggtaccccagcaacacacgaaagtcacttcgtttagggcacttaatttcatggtgtcaaggtctgttttttttgttttttgtttttttagagacagggtctagttttgtcacccagtctggagtgcagtggtttgattatagctcactgcagccttgaactcctgggctgaaatgatcctcccactacggccttccaaagtgcttggattacaggtgtgagccaccacacccggcttgtttacttttcacatgttccttctttattatgagctccctgaggtcagggagtgactttgcaccattgcaactccagcacatatatctgagcctgacagatagtaggcacttcgttggtggaggatattctaggaaaatgtatgttcaaaggcatgcaggtgtaaaatagcacgcttaatctccgaactatttaagtaggtaagttctactgaagtatgagtttgagaagaaaaactaattctcattgtttgagtcacggactgtgggcgaaaaggtgccacatttggagaatatgctcaaagggagcaatagcttcctttgctgccccaaacgtcactgatggtgaggcttctgctgcacaggagcctggagaagtaacaaagatcacaaagggcctgccttgtacttgaggctaaacatttggagtttacaatgtaggtaatgtgaagtccttgagagattgtatttatttttaaaccatccagcccaaaatgtcatgtgagagattttaaacagtgagactcaaagggaaagtaacgggcccggtagcatggctaactaataataaaacaaatctcagccaaggggcctttttatctcggggccctttccaccaaacttgcatggcttcagtggaaacctaacaatgcggcagcggggaggctaagcggccgaggttccaaaacaacgtctggcaccttctaaaagtttaacaatgaaccagcctctaaaattaaggtttaatgaaaccaaggcgctttctttcgtgaaggaattccgttggcaacatctttgcagcgatgccccgctttctggaacccctccctgcccagcgcccccttcattttagtcctcccctcacgctcccacctctcctctcccattgtttcgatctactcccgctgaggcaagctgggaagtgtagttgcacgccctgctgcctgagtcggttaggtagctctaaaaactcgtaactccacaacagctcaatggattttcgagaggtggggtaaagcctgaaggctcagccggtttatccaacgagcaatctgggatttgcagtttccagcgcccgaagtgcgcccgctagcagagagctcttggactctaatcccgccccctccccgagcctcgcgcatcctgatggcgtcacgcggccccgcgaggtctgtgggatacatagtagtcctcaaggcgggtctcactcttggccgctgcaacttgaggactacacttccaaggaggcagcgcggcgcgccgagaaccacccgaggccgtgattggctggtgagccggccgcacgcggaggatcctaaggagcagctctgttgcgacataggccgagcagcgaggcccagtgagttaggggaaggggagctgtagggagagggtccccgccggtgagggggaaagagaattagaagaggaagcagggacggggtttggatggagggctctgcgagggggaagatagggctaagggagaga

SEQ ID NO: 39674 - DNA, 2300 bp, Homo sapien
aaatgtctcttggagaattacctaggaacttagtaactgaaaaggatctggacctgcagtgttcagtatggtagcctccggccatatgtggctatggagcacttgaaatgtggctagtctgaattgagatttgctgttaagtgtaaaatacacatcagacttcaaatattccatataaaaaaagaatgtaaagtatctcatcaataatttttcatattgactccatgttgaaatgattgggatatatctaataatacaataaaatattaaaattaattttaccttttttaactctaaaaaatgtggttactaaaaaattttaaacaacatatatggctcacatttgtggcttgcactagatttctactggacagcgctggtctagaaatcttctgaccttgagctaagtgtatctgctgtttcccagtctcttccaacaagtcatttacaacctatcatgtgccagctgatgagaacagattcagttgcagtctaaggatgagactaaaacagggataacaggtgctggtaggcaatatcagtgagttctatcttatatactcctagaatggtatctataagatatacatacaagatattcttgagtggttcttaactttaccagccccaatgttccattttaataacatttttataactccccatttactattgtgaaatgaagtttatagatagtatagcctaactacatacataatttcaaaaaaaattatagtgtctgaaccaaagcagaaagaataaaaggaaatcctttataataagataatacttttcagtatgctagaaagcataattagtcagatgctagtagttatgcataggagcaccttgaatgtgacagtacaaatgcagactgaacgctatgaataacactgctatcagtgacccagttctccaaaatggtgagtaattcctaataaattcctgaacacaacaaagtataatcttccttctgttaacatggtggttacattccttaaaaattcagcacattttacacccctacaagattactttgttttttgtatataagacacaggcacatcagatgattataaccagtttttttttaacctatatgaatattcagtaggacatgtgaaagctgtgtgggatcaggacagttttcttgtgtgataccatcttgcaatgtgcaagacatggagcctccttggctcctctcccccaatcatttgacaacaaaattgccccgaacatttccaaattgctccttagggagggtgccattctggttggggaaccactgtggtggtctgaatgctttacctgttccctgttccccagccttaccttgggctgttctcccctcaccaggctcaaagatgccctgggccttcccagttcttctccaagccaatctctttcctctctcaggacattctggtgctcttttctttgcctggaaaactgtccacttcatgtctggataacttttcctgaacctttggatctcagcattgccaaattcccagtctaatttaatactttgtttagtttttccacaggactctgtgcttttctgcaatggtacttatcagactgggatttctacctgttttattcttgctatgtcaagcgtgtttattacctgtctccctcaactttcagttccctgagagcagggaccatgcccatctcgtccaccgcttgtttacccagcactcacgaagatgcccggaacttagcatccttagatgaacgtacgtgcctggcaaacaacaaacatttcttaggcaactgaaaggctgatgggattccacagccaattgggagaaaagcgctctcgagggtgggggtatgctttttccagggcagatggtgttcagcccaagttacggggcagctttggtccactctggatttgcctggattcgcgtatgtgggggcgaacgcgtcttatcggggggcggccggttggggccaggcagcccggatcccagccgaggaggtgcgcggtgctgagaggccgtgggagcgaccatagagaacgcgcgggcggagcgagcggccggatgcggtcaccatagagacgggtgactgacaggcagcggaagaggaagctgcggacaggggctgtgaggtggcagcggctgcagcggcggagccggcgcctcagcgggcactggggtctgttcccccttccccgtccctgctccctgccaggcgcgtgcgggacgccgctcttggtccccacgcctccgccccgccccctcccgggacgccgggagaccccggccgtcctttatccggtgtccgcc

SEQ ID NO: 39675 - DNA, 2300 bp, Homo sapien
ttttgtatataagacacaggcacatcagatgattataaccagtttttttttaacctatatgaatattcagtaggacatgtgaaagctgtgtgggatcaggacagttttcttgtgtgataccatcttgcaatgtgcaagacatggagcctccttggctcctctcccccaatcatttgacaacaaaattgccccgaacatttccaaattgctccttagggagggtgccattctggttggggaaccactgtggtggtctgaatgctttacctgttccctgttccccagccttaccttgggctgttctcccctcaccaggctcaaagatgccctgggccttcccagttcttctccaagccaatctctttcctctctcaggacattctggtgctcttttctttgcctggaaaactgtccacttcatgtctggataacttttcctgaacctttggatctcagcattgccaaattcccagtctaatttaatactttgtttagtttttccacaggactctgtgcttttctgcaatggtacttatcagactgggatttctacctgttttattcttgctatgtcaagcgtgtttattacctgtctccctcaactttcagttccctgagagcagggaccatgcccatctcgtccaccgcttgtttacccagcactcacgaagatgcccggaacttagcatccttagatgaacgtacgtgcctggcaaacaacaaacatttcttaggcaactgaaaggctgatgggattccacagccaattgggagaaaagcgctctcgagggtgggggtatgctttttccagggcagatggtgttcagcccaagttacggggcagctttggtccactctggatttgcctggattcgcgtatgtgggggcgaacgcgtcttatcggggggcggccggttggggccaggcagcccggatcccagccgaggaggtgcgcggtgctgagaggccgtgggagcgaccatagagaacgcgcgggcggagcgagcggccggatgcggtcaccatagagacgggtgactgacaggcagcggaagaggaagctgcggacaggggctgtgaggtggcagcggctgcagcggcggagccggcgcctcagcgggcactggggtctgttcccccttccccgtccctgctccctgccaggcgcgtgcgggacgccgctcttggtccccacgcctccgccccgccccctcccgggacgccgggagaccccggccgtcctttatccggtgtccgccggcccccggccctgaaacccgggcctcctccccgagggccttgggcgtccctcctggtcctgcgctcgcggcctcgatgctgtctctggcgcggcctccgctcccgccgactggcctgagaacgaggtctgtgccccagtctcccagccgcgacctccgaccccgcctcgcagaacgacccgagctggtctcccgagcccccttctcagcagcccggtgacgtggccagtttatttctgttttgagacgaacggcgaagactcgcgtcgggtcttcgttctagggctagacttggtctctgatcgccgagaggtagcgcaggggctgtgggcccccggcaggggtcctgtcggaagctggccgcgcttctgtttgcgttcccaggaccctggcattgtctctagttgctgcttgtgctctctctttgcttttggtttgcttcatttggcccctggggccctggtaaaaccaggcaccgaatcgctcgcacacagagttccagtccccgcctgctgtctcctcagcagctggggttccgaggagaatgccctgcaagatggctccatcggccatggcgctcctgagaggctgtcagtgctgagtcaccgatctacctcattcgggtgggcagaacttatgtgtgccatgcgagtggctccagaccgctcctgagtgggaggaggggttcctgtagccgttgcgtcttctcaaacacggggagcagagtagaaagaggctctggccccttcccttgtgcccaccgggcctgccgcagtggctcagcagccccttcagtagcccgcctgaggaccgatgccagaggcaggcattcttccggaaaggcccactgaggcaggctccggctcctctggttggggctgttgttttgatggatcgtgtgcttttcccttacctcttatcacttgctgtcatctgttgacttaggcccagtctgcagatgtgtgtagtgttcctttttgggttagctttggcagtattgagttttacttcctcctctttttagtggaagacagaccataa

SEQ ID NO: 39676 - DNA, 2300 bp, Homo sapien
gtcatcctgcatgatgaagaaccagtcgtagtcggccccaaagtgtgtgtgaaggtggcgcagggtctctgacatgagccaggcgggccgctcatccccatgagacaccacctgcatccctgctggagcccgggccccccgctgcccagtgaagtagagtaaccgagggaagtgatgggccaccgtacggttcacagccacggccaaagtggacagtgtagctcgggaggtcaggacagccaccagcaaccgctcacgggagcccagctctgtctggatgtaccgagtcctgtggaaagaccagtgtgccagaggtcaactccctaatctttaggaacccagcttgttcagaatatacatccccctctaggagtgagttggggctgagaagggagaaacttccttccttgtcaatattaattaggtactgaactgagtatccactaagtagctgacacgaattgatttgggaggggagggagtctaccaaggatagattaggtaggttagatgcaattcctcctctgttcaagaacatcgaaccctggctgggcacggtagctcacgcctgtaatcccagcactttgggaggccgaggcaggtggatcacctgaggtcaggagttcaagaccagcctgaccaacatgaagaaacctcatgtctactaaaaatacaaaattagctgggcgtggtggtgtgcacctgtaataccagctactcgcaaggctgaggcaggaaaatcacttgaacctgggaggcagagattgcagtgagccaatatcgcaccattgcactccagcctgggcgacgagagcaagactccgtctcaaaacaaaacaaaaacaaacaaaaaacatcgaaccctaatttaacaccaatgaatgtgagactttctaagacctgagaaggagggaaaaaacagaaagaaaccatgatggaaaataagccagaattgctccaagtcgcccgacgccgattgccaatggaaaggcagaggcaaggatttacaccagcccaaaacagggccagtgtctggggactatgcacacatgttgctctcacctgagcaccttcttgtagggcttgttggggtccctgtagtaggggacaatccggggtttgaagtcttcatcactttggtctagccgagctctggaatctggattctgtggccctcctcgctcccctacagcctcgacacagggatcttctccctccccctggatccaggaaacccgcaggaggctcaggctgcaccccagagacagccctaagatgaggggaagcgctggccgcagcagagccaacagggagctcagtcgcatggtggtaggccctgccaggtgggtgccccaggggcacagcctcaaggatcaatggattgatgggcaccaggccagtagtaggctttcagttttaaccagagaacctggggtcaatgaggccaaagacagagcgaggcccgctggcttccaggaccagcatccccaagaagattgtcctgtcttcacaactccttctgcctgctcttcaactgtgaaggtgtcggaactaacccccagccaaaacggtaataaatgaaacaatcaatttcactcacactgggattatggtctgtcttccactaaaaagaggaggaagtaaaactcaatactgccaaagctaacccaaaaaggaacactacacacatctgcagactgggcctaagtcaacagatgacagcaagtgataagaggtaagggaaaagcacacgatccatcaaaacaacagccccaaccagaggagccggagcctgcctcagtgggcctttccggaagaatgcctgcctctggcatcggtcctcaggcgggctactgaaggggctgctgagccactgcggcaggcccggtgggcacaagggaaggggccagagcctctttctactctgctccccgtgtttgagaagacgcaacggctacaggaacccctcctcccactcaggagcggtctggagccactcgcatggcacacataagttctgcccacccgaatgaggtagatcggtgactcagcactgacagcctctcaggagcgccatggccgatggagccatcttgcagggcattctcctcggaaccccagctgctgaggagacagcaggcggggactggaactctgtgtgcgagcgattcggtgcctggttttaccagggccccaggggccaaatgaagcaaaccaaaagcaaagagagagcacaagcagcaactagagacaatgccagggtcctgggaacgcaaacagaagcgcggccagcttccgac

SEQ ID NO: 39677 - DNA, 2300 bp, Homo sapien
ttgtctctagttgctgcttgtgctctctctttgcttttggtttgcttcatttggcccctggggccctggtaaaaccaggcaccgaatcgctcgcacacagagttccagtccccgcctgctgtctcctcagcagctggggttccgaggagaatgccctgcaagatggctccatcggccatggcgctcctgagaggctgtcagtgctgagtcaccgatctacctcattcgggtgggcagaacttatgtgtgccatgcgagtggctccagaccgctcctgagtgggaggaggggttcctgtagccgttgcgtcttctcaaacacggggagcagagtagaaagaggctctggccccttcccttgtgcccaccgggcctgccgcagtggctcagcagccccttcagtagcccgcctgaggaccgatgccagaggcaggcattcttccggaaaggcccactgaggcaggctccggctcctctggttggggctgttgttttgatggatcgtgtgcttttcccttacctcttatcacttgctgtcatctgttgacttaggcccagtctgcagatgtgtgtagtgttcctttttgggttagctttggcagtattgagttttacttcctcctctttttagtggaagacagaccataatcccagtgtgagtgaaattgattgtttcatttattaccgttttggctgggggttagttccgacaccttcacagttgaagagcaggcagaaggagttgtgaagacaggacaatcttcttggggatgctggtcctggaagccagcgggcctcgctctgtctttggcctcattgaccccaggttctctggttaaaactgaaagcctactactggcctggtgcccatcaatccattgatccttgaggctgtgcccctggggcacccacctggcagggcctaccaccatgcgactgagctccctgttggctctgctgcggccagcgcttcccctcatcttagggctgtctctggggtgcagcctgagcctcctgcgggtttcctggatccagggggagggagaagatccctgtgtcgaggctgtaggggagcgaggagggccacagaatccagattccagagctcggctagaccaaagtgatgaagacttcaaaccccggattgtcccctactacagggaccccaacaagccctacaagaaggtgctcaggtgagagcaacatgtgtgcatagtccccagacactggccctgttttgggctggtgtaaatccttgcctctgcctttccattggcaatcggcgtcgggcgacttggagcaattctggcttattttccatcatggtttctttctgttttttccctccttctcaggtcttagaaagtctcacattcattggtgttaaattagggttcgatgttttttgtttgtttttgttttgttttgagacggagtcttgctctcgtcgcccaggctggagtgcaatggtgcgatattggctcactgcaatctctgcctcccaggttcaagtgattttcctgcctcagccttgcgagtagctggtattacaggtgcacaccaccacgcccagctaattttgtatttttagtagacatgaggtttcttcatgttggtcaggctggtcttgaactcctgacctcaggtgatccacctgcctcggcctcccaaagtgctgggattacaggcgtgagctaccgtgcccagccagggttcgatgttcttgaacagaggaggaattgcatctaacctacctaatctatccttggtagactccctcccctcccaaatcaattcgtgtcagctacttagtggatactcagttcagtacctaattaatattgacaaggaaggaagtttctcccttctcagccccaactcactcctagagggggatgtatattctgaacaagctgggttcctaaagattagggagttgacctctggcacactggtctttccacaggactcggtacatccagacagagctgggctcccgtgagcggttgctggtggctgtcctgacctcccgagctacactgtccactttggccgtggctgtgaaccgtacggtggcccatcacttccctcggttactctacttcactgggcagcggggggcccgggctccagcagggatgcaggtggtgtctcatggggatgagcggcccgcctggctcatgtcagagaccctgcgccaccttcacacacactttggggccgactacgactggttcttcatcatgcaggatgacacatatgtgcaggccccccgcctggcagcccttgctggccacctca

SEQ ID NO: 39678 - DNA, 2300 bp, Homo sapien
ttcgatgttttttgtttgtttttgttttgttttgagacggagtcttgctctcgtcgcccaggctggagtgcaatggtgcgatattggctcactgcaatctctgcctcccaggttcaagtgattttcctgcctcagccttgcgagtagctggtattacaggtgcacaccaccacgcccagctaattttgtatttttagtagacatgaggtttcttcatgttggtcaggctggtcttgaactcctgacctcaggtgatccacctgcctcggcctcccaaagtgctgggattacaggcgtgagctaccgtgcccagccagggttcgatgttcttgaacagaggaggaattgcatctaacctacctaatctatccttggtagactccctcccctcccaaatcaattcgtgtcagctacttagtggatactcagttcagtacctaattaatattgacaaggaaggaagtttctcccttctcagccccaactcactcctagagggggatgtatattctgaacaagctgggttcctaaagattagggagttgacctctggcacactggtctttccacaggactcggtacatccagacagagctgggctcccgtgagcggttgctggtggctgtcctgacctcccgagctacactgtccactttggccgtggctgtgaaccgtacggtggcccatcacttccctcggttactctacttcactgggcagcggggggcccgggctccagcagggatgcaggtggtgtctcatggggatgagcggcccgcctggctcatgtcagagaccctgcgccaccttcacacacactttggggccgactacgactggttcttcatcatgcaggatgacacatatgtgcaggccccccgcctggcagcccttgctggccacctcagcatcaaccaagacctgtacttaggccgggcagaggagttcattggcgcaggcgagcaggcccggtactgtcatgggggctttggctacctgttgtcacggagtctcctgcttcgtctgcggccacatctggatggctgccgaggagacattctcagtgcccgtcctgacgagtggcttggacgctgcctcattgactctctgggcgtcggctgtgtctcacagcaccaggtgacagctctttcaagtcagtcccagtccctgataagctagtgggggatgagtgattggccttcctcccagcagcaccttagaggccattgttcccccttcctggccactggccgctctgtgggccctccgttgctcacctttggcaatctgagaacctggggctatcaaaagtagtatcttgttaggaacccctaagcaagaccaaagggtgctcctactcagcagtccttctcccctgcccccctgccctccacacctcccccgacatccacacttcagttatggcagtgtgggcatgtcttagagatggctagtctccagagaagtgaggtgatcacttttccagcccagagagctgccctgtttcttgtgctggagaagagtggaagaacccagaggtggctcatcctctcaaaccaaagtattgggaggattttctggcttgtgtcattcattcccttgaagaacaatgggaatctttgggggaagaaagtatcattattattatttttaatatgttatttctgtgatggctccttgcagagcagggctagcctgtaagcaatgcactgagagtagccgagagtgtccttagttgcctacttgctttctactttccaaaatgtgggcagtgaaagaactggggttaagcgaggtgctggaaagggtgcctcttctgtcctctgttctaacgcagcagtgctaacagatgtgaacactgagtatggttaagggcggtttgggactggcagctcttgtgtgtgtcattgattggtctgattgtccctctaggggcagcagtatcgctcatttgaactggccaaaaatagggaccctgagaaggaagggagctcggctttcctgagtgccttcgccgtgcaccctgtctccgaaggtaccctcatgtaccggctccacaaacgcttcagcgctctggagttggagcgggcttacagtgaaatagaacaactgcaggtgagctgaagaggagcaggtgggcagaggaccgcagtcagagggtcagagagagcctgagatgtccaggcgtgcaatgaacgagcagctggcagtggggctgggctaggccctgtataatggcagggcaggaagaggccgaccatacttaaatttaaagcaactacagggacaaaggtctttgg

SEQ ID NO: 39679 - DNA, 2300 bp, Homo sapien
gatgcgttggagactgccctggagcagctcaatcggcgctatcagccccgcctgcgcttccagaagcagcgactgctcaacggctatcggcgcttcgacccagcacggggcatggagtacaccctggacctgctgttggaatgtgtgacacagcgtgggcaccggcgggccctggctcgcagggtcagcctgctgcggccactgagccgggtggaaatcctacctatgccctatgtcactgaggccacccgagtgcagctggtgctgccactcctggtggctgaagctgctgcagccccggctttcctcgaggcctttgcagccaatgtcctggagccacgagaacatgcattgctcaccctgttgctggtctacgggccacgagaaggtggccgtggagctccagacccatttcttggggtgaaggctgcagcagcggagttagagcgacggtaccctgggacgaggctggcctggctcgctgtgcgagcagaggccccttcccaggtgcgactcatggacgtggtctcgaagaagcaccctgtggacactctcttcttccttaccaccgtgtggacaaggcctgggcccgaagtcctcaaccgctgtcgcatgaatgccatctctggctggcaggccttctttccagtccatttccaggagttcaatcctgccctgtcaccacagagatcacccccagggcccccgggggctggccctgaccccccctcccctcctggtgctgacccctcccggggggctcctataggggggagatttgaccggcaggcttctgcggagggctgcttctacaacgctgactacctggcggcccgagcccggctggcaggtgaactggcaggccaggaagaggaggaagccctggaggggctggaggtgatggatgttttcctccggttctcagggctccacctctttcgggccgtagagccagggctggtgcagaagttctccctgcgagactgcagcccacggctcagtgaagaactctaccaccgctgccgcctcagcaacctggaggggctagggggccgtgcccagctggctatggctctctttgagcaggagcaggccaatagcacttagcccgcctgggggccctaacctcattacctttcctttgtctgcctcagccccaggaagggcaaggcaagatggtggacagatagagaattgttgctgtattttttaaatatgaaaatgttattaaacatgtcttctgccaaactgtttttaggtctagggaaaattgagtaaggagaagaatccaagggaagggaatggggagtcgtcccgagggacccactgcctccccaccttcttcccttccccttctctccccctcccctccccagtttccaatgaccacacggctgctgtcagatgaatgacttttaatccagccccacaccccaaggtggcagaggagtgatgctggagcccggggcaaaatgctggggcccgggacacggctgaaagttccgtcgtgctgcttatttttgggctcctaggtgttgcgcacaaccagcgactgctccagctcctgcctgcgctgctggatctttagaggaagtgagaacaggagcaggtgtcagtgttctggtgagtgatcaggacaatcccacctactgacaccgcctgccctgaaagagcatctgggagcagggagggccattgcatggtgaggcagcgtggtgaagctttactgtggggagctgcgagggctgcccacaagctgaacagggaggtttctcttggagttgaggatggggaagcctcagggcaagggtccctgcataccttgcagtagaagtagcgactgacggcctcctgggaccagggctggtggtagaactcagcccggcgctcctcttcagggttgccggctacatctgtcatcacctgggagggagcgtggggtgagccctgagccctgaatcccctcacctgcccctggagtacaacgtttactctctttcccgctgtgcttgtcttccactccagtactccctgagtctccctcttcaccttgaggtcccggctctgggagcggagcaggtcttggacatagcctttggggtctctggagaagcttagcatgaagtccctctggatcttgagctggtttatggactcaatcgtctcatggatctgcaggtagaaagatagatgctttccacctggctttggtgatgtgggagacgaggggaaaggaagcgggtgggaaggggagggagagggggtttcttctgtgaaggacaacccctcagagcccctga

SEQ ID NO: 39680 - DNA, 2300 bp, Homo sapien
tctcctctgctgtcttcttttcccaaaaggtctctccaatagttgagaacactgagctttaacaaagcctaggggtgtctatctccaacccccagaacctccaaggcctgtggtttcccatgcccctgctagacgcacccatggtgggtgggggtgcccatggtaactcacaccatcaggtaaatggcagagtaccagctccatgcattggctcattaagctttgcaagcatcaggtatctggggtactgttgagttcctgtgcccaggcatggaggaagagtgggagttaaagatcagtctctgaccttatggggaccttagcctctctgggaaagcaaagctaatgtccttgaagcacagtgcacgtcaggccagtccaatgccaattcatggtgctgggtagatggcaatgagcatttggagaagagaaaaatctttgcatacaagtaggacgaaggaaggcttcctggaggaagtggggcctgggctgggctttaaagaataggtgtgatttggacaagcagagggaaggcagagggcaggcaaagggcattccaggtaaaagaatcgggggcaggggctaagaaatgggagtgagcggggattctggaggttagcaggcagactgggcaagtcacttccccaggttcccagcagcatgacctatggcagacagaggcaggccacccacccatccccaccgtgtcagggcccaggctctgtgtgtgggggtgtgtggggggtagtctaggctaaagccctgggagagatttggtagcaaggggatctctaggtcccctttcaagctaggggtggtggaggagcaacctggaccagatgtcctccctgacatttcagattgacagtgggcacctaaatgaacagtgacagccaagagcacaaccagggccagcagaaatcaggctgcaggcagaaaggaccccctgggcaaaggcattctgaagggtttagggtcagtacccttcagtcttcagggcccaacttcaagtaagtgtttcaacaaactcccctaggcactaggctatggtcctgccctcacctggattctcacagtgaggccccagcagacccccaaacttgacccaagggccttgttccaaagcccacggctcctccccaagaaggagaaaaaaggggcgtggcctttggggacctgggtaggcccaggactccctgcctgggtatgtcaggatttgcccctcctccttccggtccctcctccactccagggactgccaactccttccacacgccccttctggggctcccttgccaccccacgccacaccccagcctcaagacccctctctttggggtcttgaggccggcccaatatacccactatacccagcccagctgccccaactcctctgggtcccctaaccccactccacccccaccccaaggaaaccaagcccagcttgcctcgttctctccacgcacccacccgagcacccccctggcgctgcgccattccccacattcattctcttcctgttctcatgagcacaatccctgtccctctttctgaaatacttcccctattgccctcactttctcacagagcggcaaacaaagactcacatacccagaaatagcctctcacagagctgaaaggcacaggccatgtcctgccacacacgcaggcgcgcgcgcacggaggctgtcgtggagggaggcacacatacagggcgtctgtctgcacgcacataagctgccacgccacaaaagggcgcggacacacacggcgtgtgagacaagggcacacacagcagtggacgcagggccacgccgccgcccgggcacacccaccgccgccggccccgggcaggcgcgaggcctcgcgggccgggctcccccggttcctgccagcgaatgtttccctgctcggcctgccaggtctctggggaaagggcctcagaaatgcagcaggagccgctgggggaaaagttggaactgactgttccctgcctggcgcggccggcgaattccctgacggagaaactatttgtggcgagagccggtggccggcgaccccccgccgcctcccctggcgtcccctccccgcgccgcctcccgcgggcctcggcggcttcgggctgcagcactgctgcccagcgcccgcggccgggctggtcggcgcgcctcgccgcttatctgcgctgtttggacagcgggcttggaaaggcaggcggccccgtccccgccgagtcaacaggcagaccccgggccgccggactatttctgtcttatcagtgcaggaatgcggcagccgcg

SEQ ID NO: 39681 - DNA, 2300 bp, Homo sapien
ggggagaggctggatatcggcaggggcagagacgggaacctgagggagaaggacctgaccttgacctcagcctcagaccatgggtccctgctgcctgcctgcctcctactgggggcctacgaggcccacctggccccaaatgcttggcaggctccctgcccgctggctgcttagggaggtgctcccacttcccccgccgttgcctgagctctctagggctccttcactctgcaggtaggctggggtccccctctgtgctgggcactgtggtagctcagccgtgtgaggcggggccctggaagagcccatgagatggccagagctgggcttgtctggctggaagctgggaataggcttctccaagctgccaaatttaagtattgagtacataaaaggaggagattggcattagtgagaacatggccctgaggcttgatggacccaaagcctcccagggtatgtgcgttttgagggggtggggggtgcacatgggtgtccgggacctcgtctaggtaatgtctgcagccacataggatgatctgactgaatctgtgtgaggacaaccgtttgtgtgcctgtgtgtgcgcgcccacgtgcatgcgcgtgtgtggtcctagtgtaggtgatgtctgcggccacacaggatgctgactgcgtgtgtgactcgtgggcgtgcagatgcaagcacaggcctacgacacatctgtgtacaggctgaagatcacaacgggtctggccagggcccgccgagggcctccgagctggcgagcacaccgacggctggatggggcgacgcttcctgctccggtccctaactcattattaagctcctcgctctttgcagacgctccctgcgcctcccccgctccgggctgcagcggcgcaggcgccgggccgagccgagcgccgagcagggagcgggcggccgcgctccgggccggggtcccgggggagcaggtgagcgacccgcgccgcgcggcccccacggcccttggcgaaggcgcctcccggccgcgctgcgccggcgcccccgccttccctgcctggcagtctctgctcgcctctgttggcatcctcctcctcctcctcccccctgcctggcatccccctcctccccctgcctggcatcccttctcctccctgcctggcatcccttctccccctgcctggcttccccctcctccccctgcctggcttcccttctcccactgccaggcatcccccctccttctcctgcctggcaccttctcctcacctggcacttcccctcctccctacctggcatccccttctcccttcctggcatcttcctcccctcctcctttccaggtatctccccccactcctgactctttccgtccccccgcctggcacctccctccacccccaccccaacctcgtacctcttcctcctaccccttccttgcacctcttccctgactggcagactcccattcagcccctctgtgacaccacctcctccccatcgctgcctggcatcttcccctccttccctctccagtaccttcctatcctccctccacctgcatctcccctccttccctcgtctggcaccctcctgcctggcaccttcccctcctccccctgtctggcaccacctcctcccattgcctgtcacctcccccctgccgagcactttctcaacctgctcctgcctggcatgctctgcttcctactccccctgtctggcaccttccctccttcccctgcctggcatcctctccctccttcccctacctagcaccttcccatcattcccctgcctggcaccttctctgtctccacttggccaccgtcttccctggatacccctctcctattcaggttgtccctctgtcccccaccttcttgcagggcacctcccccccgaccctggactggtagcccctcccctaccgcatcttcctctcctcatcctcccctcccactctgtctcccggaccccaccagctctcccatccccagcactccctgtctccagcctcctccttcctcatcccctttcctcccaaccctgctcaggattgatccatgggcagcagcctcttttgctcacatggcttaaccagaccctgagccactcccaagccccacctctgtcacccacaccccgctcctacagcactgctctcttcttagctcccatgccccaccgtctgctcagggacttcatttcataagttgggtcctgacccaacgagctggaggccttcctgctcttccagcaaggaaggaagcagggcaggacaggacagagcaggcactagcagggaccagga

SEQ ID NO: 39682 - DNA, 2300 bp, Homo sapien
agaaaatcctgactcgtgttacaacgtggatgaaccttgaagacattgtgtgaagtgaaataagccagccacaaaggcattatatgaggtacatggagtagtcaaatttatggacagaaagtagaatgtggttgccaggggacaggaagggggaagggggagttgttgttagatggatacagagctccagtttgggatgatggaaagagttctggagactggttgcacaacaatgtgaaatactttacaaaacctaacatacgctgcaaaatggctaagatggtaaattttacattatgtttattttatcacaattaaaaatttaaaacatgccgggtgtggtggttcacacctgtaatcccagcactttgggaggtcgaggcgggcagatcacctgaggtcaggagttcgagaccagcctagccaacatggtgaaaccccgtctctactaaaaatacaaaaattagccaggcatggtggcaggtgcccgtaatcccagctacttgggaggctgaggcaagagaatctcttgaacccaggaggcagaggttgcagtgagccgagatcgcgccatcgcattccagcctgggggacgagagcaagacttcatctcaaaaaaaaaaaattaaaagaataaaacagaaatattttcagatgaagggaggataggaagataccagaaagggaaggggtggaaaagctctgtctctgccttgggcctgcccataacagagacaaacccaggcagtgcagagcccagaccccaaaatacccctagtgttgaaggtgtgacctggcctgggggagaggctggatatcggcaggggcagagacgggaacctgagggagaaggacctgaccttgacctcagcctcagaccatgggtccctgctgcctgcctgcctcctactgggggcctacgaggcccacctggccccaaatgcttggcaggctccctgcccgctggctgcttagggaggtgctcccacttcccccgccgttgcctgagctctctagggctccttcactctgcaggtaggctggggtccccctctgtgctgggcactgtggtagctcagccgtgtgaggcggggccctggaagagcccatgagatggccagagctgggcttgtctggctggaagctgggaataggcttctccaagctgccaaatttaagtattgagtacataaaaggaggagattggcattagtgagaacatggccctgaggcttgatggacccaaagcctcccagggtatgtgcgttttgagggggtggggggtgcacatgggtgtccgggacctcgtctaggtaatgtctgcagccacataggatgatctgactgaatctgtgtgaggacaaccgtttgtgtgcctgtgtgtgcgcgcccacgtgcatgcgcgtgtgtggtcctagtgtaggtgatgtctgcggccacacaggatgctgactgcgtgtgtgactcgtgggcgtgcagatgcaagcacaggcctacgacacatctgtgtacaggctgaagatcacaacgggtctggccagggcccgccgagggcctccgagctggcgagcacaccgacggctggatggggcgacgcttcctgctccggtccctaactcattattaagctcctcgctctttgcagacgctccctgcgcctcccccgctccgggctgcagcggcgcaggcgccgggccgagccgagcgccgagcagggagcgggcggccgcgctccgggccggggtcccgggggagcaggtgagcgacccgcgccgcgcggcccccacggcccttggcgaaggcgcctcccggccgcgctgcgccggcgcccccgccttccctgcctggcagtctctgctcgcctctgttggcatcctcctcctcctcctcccccctgcctggcatccccctcctccccctgcctggcatcccttctcctccctgcctggcatcccttctccccctgcctggcttccccctcctccccctgcctggcttcccttctcccactgccaggcatcccccctccttctcctgcctggcaccttctcctcacctggcacttcccctcctccctacctggcatccccttctcccttcctggcatcttcctcccctcctcctttccaggtatctccccccactcctgactctttccgtccccccgcctggcacctccctccacccccaccccaacctcgtacctcttcctcctaccccttccttgcacctcttccctgactggcagactcccattcagcccctctgtgacaccacctcctccccatcgctgcctggca

SEQ ID NO: 39683 - DNA, 2300 bp, Homo sapien
aaggggagtaaaagcacaaatcgcaacagccagatgatggaagcatcccaagtgtcccacagtaaatgaatggataaacaacggtgcagtggctccagcctgtaaacccagcacttcgggaggccgagctgggtggatcgcctgagctcaagagttcgagaccagacttggcaacatggcgaaagcccatcactacaaaaaatacaaaaactagcctggtgtggtggtgtgcacctgtagtcccactacttaggaggctgaggctagaggattgctttagcccaggagtccaaggctgcagtgagcctagatcgtgccactgcactccagcatgggcgacagagtaagatcccatctctaatacaataacaacaacaggggtgtatacacacagtggaatacatttcggccttaaaaaggaagaaaatcctgactcgtgttacaacgtggatgaaccttgaagacattgtgtgaagtgaaataagccagccacaaaggcattatatgaggtacatggagtagtcaaatttatggacagaaagtagaatgtggttgccaggggacaggaagggggaagggggagttgttgttagatggatacagagctccagtttgggatgatggaaagagttctggagactggttgcacaacaatgtgaaatactttacaaaacctaacatacgctgcaaaatggctaagatggtaaattttacattatgtttattttatcacaattaaaaatttaaaacatgccgggtgtggtggttcacacctgtaatcccagcactttgggaggtcgaggcgggcagatcacctgaggtcaggagttcgagaccagcctagccaacatggtgaaaccccgtctctactaaaaatacaaaaattagccaggcatggtggcaggtgcccgtaatcccagctacttgggaggctgaggcaagagaatctcttgaacccaggaggcagaggttgcagtgagccgagatcgcgccatcgcattccagcctgggggacgagagcaagacttcatctcaaaaaaaaaaaattaaaagaataaaacagaaatattttcagatgaagggaggataggaagataccagaaagggaaggggtggaaaagctctgtctctgccttgggcctgcccataacagagacaaacccaggcagtgcagagcccagaccccaaaatacccctagtgttgaaggtgtgacctggcctgggggagaggctggatatcggcaggggcagagacgggaacctgagggagaaggacctgaccttgacctcagcctcagaccatgggtccctgctgcctgcctgcctcctactgggggcctacgaggcccacctggccccaaatgcttggcaggctccctgcccgctggctgcttagggaggtgctcccacttcccccgccgttgcctgagctctctagggctccttcactctgcaggtaggctggggtccccctctgtgctgggcactgtggtagctcagccgtgtgaggcggggccctggaagagcccatgagatggccagagctgggcttgtctggctggaagctgggaataggcttctccaagctgccaaatttaagtattgagtacataaaaggaggagattggcattagtgagaacatggccctgaggcttgatggacccaaagcctcccagggtatgtgcgttttgagggggtggggggtgcacatgggtgtccgggacctcgtctaggtaatgtctgcagccacataggatgatctgactgaatctgtgtgaggacaaccgtttgtgtgcctgtgtgtgcgcgcccacgtgcatgcgcgtgtgtggtcctagtgtaggtgatgtctgcggccacacaggatgctgactgcgtgtgtgactcgtgggcgtgcagatgcaagcacaggcctacgacacatctgtgtacaggctgaagatcacaacgggtctggccagggcccgccgagggcctccgagctggcgagcacaccgacggctggatggggcgacgcttcctgctccggtccctaactcattattaagctcctcgctctttgcagacgctccctgcgcctcccccgctccgggctgcagcggcgcaggcgccgggccgagccgagcgccgagcagggagcgggcggccgcgctccgggccggggtcccgggggagcaggtgagcgacccgcgccgcgcggcccccacggcccttggcgaaggcgcctcccggccgcgctgcgccggcgcccccgccttccctgcctggcagtctctgctcgcctctgttggcatcctcc

SEQ ID NO: 39684 - DNA, 2300 bp, Homo sapien
cagtaacccacttccaccaccaccctagcagatctcagactcgaatctttgttttgcaagtctatcaaaaacttctgctttcagaggccttccatttacatttcagtttcttgccccatacaagccttgaattcagcaattgtccttggaatttccccctacatcgctgtgttggttttgtgtccccagcagtggccctctgtggtctcaaagtctaaattctcagcctcatgcttgtatccagaactggcaaaagccctcacacaccaatacaagccactgcagacattagctcaccccttgaaggttcctcattctctggaatatcaagtccccccattcttgcctcagcagctttcactgccttcaaacagatgttttctgacttcgctttctggcttttctagttgttgttagtgggagccttggtctactgcaagctgctccatcacacctgagcgtggacattcaatttcctgatggtctactacgtaaatgtaaaagtgaaactatctttgttactcatctcagagaaagccctcagaaaaaaatgtcagaacagtttctgttgtccttctaccttgctgcaattgctactgagcaatcaacgggctttttcctgatgtgctagaagccaacaccatggcacgggcttttgagaaaagaaaggctttattgtgagttgactgtcaaggagacatgaggaaaccctcagctctgtctccttgagcttggggctgggttgggttttataagcatagggtaatgacgcatgatcggattagattttgcgatgaggtgatgctgggatgctcatctgactggaccctgccatggggtgacaccagggcttgatctgattgcattctggatctcaccatgcagtgcccatttcttaattcagtccctgctttgatctgagcactcaggttccgcccctggttgcatgcttggttcacctgggcatcctcaggttacgtgcgaaaccttccatctgggagtccatgcaactgaaaaacaactcacaacttgggtatataaaaggcgaatcagattggtctggtgcggttatacagttattaatatccctttgtcagaagtcaaaattaccacaaatttagattaaagatctattggtttttattgattcatgaatcaggatggcatcttctctgaaaatttagaaacggtgctccaacgagctgggcagaggaggtgggctttataggtagaaaagggctaaagaaagcagcaacagggaacgaaaaacggattggtcactgcaaggttacaggagtcccctctcgtccacacacaggtggtgtgtcccaagacccacagtggatgcctgaaacctcggatagtactgcaccccattttacatacacacacatatatatatactatatatatacacacacttcatttttcctatacatacgtacatacctacgataaagtttaatttattaggcacagtaagagattaacagcaataactgataataaaatagaagcgtcactgttgagcacagccttgggaataggaccttggaagtaggcagagctccctaggccttgtggtccctagtggccgtggacagcatgggggaggaaattcccgggaagcagcctaatttcaccccagggaagcccctggtgggcttgtggagggcggggtgaaaagccgctggtttagggaaggggtccagcctaggctgaggaatgagatgcgggttgggacggtcccgacccttcccccagcctctttcaaggattctggagaaacaaagccaggatccatttcctcttgatggctggcaaactgagcccgggcgggaagtcctggaagactgagcctggggtggcgttggacaccaactcccaggtcctcgccccacacggccacatcctcgcccagccccgcctccgcttagctccgccccgtcgcggctccgccccgcggtaaccacgcccacacaaccgtatccccgcccacagctggcttcgccttggccccgcccacaaccctctttccaagcggcggcggcggcggcggcgcgaaggcgacagcggcggcgggggcggggctggcctcacccggaatgaaaacaaacggcggccgctgccgcatccgggcactctgctggtcgcggcgggagtggcgtggcgcaggtgaggacacggcggccgagtgtcctcgaccccagcctcagcagcactgcttggcgccccggttcccggtccgactgggcacctctcctggccaggggtggagcggccgcggggcgggggtgagc

SEQ ID NO: 39685 - DNA, 2300 bp, Homo sapien
cacacagcagcctcattggctgtgttattccttcctctcttttctcctccctgtcctgattagcctaattcttgtccccgcactgacataaaatagatttgaactttcttttaaaaaatatttgtttatgaaatacacaagctaccaaagttttcaaagatttcaaagttgtgtgaattgggtttggggggatgtggaatactggccctcaatagaagaaagaaatttatcttggtaatattaactcatattttttccactctctagaacttgtcttcatcattcaggggctaataacatttttctttacttattgcttgtctgatttgggaaaccttaaagcgctgtgctacacctgccagctgccttacatctcagccgcctcactcacctttgaattgctgtgctagtatgggatgagtagacagctccatcgcggtacatacttctctgggagagagaagttacatacctggaacaggcaagcagcaagggactccatgacggaagttcagagtccagtgttgtgggtggaagttgtgctcgttaagatgctgcctaattttgtgtctttgcctgagtcatggtacaaactcagggccctaattttctcagctgtaaaatgatccgatcagtgttagatttgaatagtagggccaggcgcggtggctcaggcctgtaatcccagcactttgggaggccgaggcgggcggatcacaaggtcaggagattgagaccatcctggccaacacggtgaaaccccatctctactaaaaatacaaaaaatcagccgggcgtggtggcgggcgcctgtagtcccagctactggggaggctgaggcaggagaatggcgtgaacccgggaggcggagcttgcagtgagccgagattgtaccactgcactctagcctgggcgacagagtgagactccctctcaaaaaaaaaaaaaaaaaaaaaaaaaaaaaaaaagtagatgtgctgttaggctgttaatcagaaaatatgcaaaattttcctagtattgtaatctttttaatttaaaaaattctgacatagaaaatatttatatatttattattattttgagacggagtctcactctgttgcccaggctggagtgcagtggtgccatctcggctcactacaacctctgcctcctggattcaagcgattctcctgcctcagtctcccgagtagctgggattacaggtacctgccaccacgcccggctaattgttcatatatttttttttttttagtagagatagggcttcaccatgttgaccaggctggtctcgaactcctgacctcagctcctgaactcagcctcccaaagtgctggggttacaggcctgagccaccacacccatccgaaaatatttattatcgatagtttacagttcaagcaagcttttctttatatttaactaccaggatggttggccttttgttttatgttaaactagccaaagtatgagagaatttacaagctcacgcctgtaatcccagcgttttgagaccaaggtgggtggatcacttgaggtcaggaattcgagaccagcctggccaacatggcgaaaccccgtctctactaaaaatatgaaaattagccgggcgtggtggcgcatgcctgtaatcccagtgagtagggaggctgatgcaggggaattgcttgaacccagggggcggagcttgcagtgagccgagatcgcaccactgcactccagcctgggcgacagagcgagactccgtctcaaaaaagaaaaaaagaagttcacgactcgagggatttatctttctcttattttctcttttctcttagataagagaatagcagattaagaaatagaaacatgtaataatccttgctacatattagcaactttgaaatacatattttatatatgtaatatatataattgaacatatatttctatatatatttttagagaagtctggagctcatttaaaccatagtaatttatatttaatgacagaggaagggagctttgcttacccaacaaagcaccttaacatgtaggtaagttattaacattttaaaatgcgatgtggagttttattaatgtattgttttgctttcagggatggcacaaaagaaatatcttcaagcaaaattgacccagtttttaagggaagacaggattcaactttggaaacctccatatacagatgaaaataaaaaagttggtttggcattaaaggtatttttcttttaagacatcaataattagcagcattataaatctccttggtaaataagattctgaattgtcaggcatg

SEQ ID NO: 39686 - DNA, 2300 bp, Homo sapien
ataatatatattctaggttttaaaaagtatgtatataaatacaaaaatataaagaatgtatttttaaaatatgttaaacatcgttaacataggtatattcttcctcttttcctacgtaactattaaaaaaatgtattgctggacacagtggcgcatgcctgtagtcccagctactcaggaggctaaggcaggaggatcacttgaacccgggagttggagactgtagtatgctatggtcccacctgtgaatagccactgcactccagcctgggcaacgtagtgagaccccgtctctaaaagaaaaaaaaagtatatataggtttatgttacttacaaaattttttttcctttttttttgagacaaggtcttgatctgttgcccaggctggagtgcaatggcatggccatagttcattgcagcctcacactcctgggctcaagtgattctcccacctcagccttgggagtagctgggactacaggtgcatgccaccatgcctggctaatatatttttagtttttgtagagacggggtttcactttgttgcccaggttggtcttgaagtcctgggcttgagcaatcctctcaccttgccttccaaagtgctgggattacaggcatgagccatcgcgcccaatctatactcatatctataaagttttccaacttcacttttatcatgaacatctcttctgtcataaatttatgcttacaccataatttttacgtactacatggtattacattatgaatttaatgaaaccttgacctttagggttttttgaagtgtttactgttttatgagatgtttaatgaaacattaacctcacatgcagatacagattgagaggagtatcccgtaactgaaatatttgggactggaagtgtgtttggattttggaatgtttgctttatacctactagttgggcatcctaatctgaaaattcaaaattcaaaatacttcagtgtgcatttcctttgagcatctccagatgctgaattttggcgatttcagatttttagattagagatactcatctggatttttttggggaggaaccataatgactttgctctcagtaataactggttcccatcctttcttgagccctttcaatcttcttttttttctcaattctaaagctctcccttacaaatagttttacaactagtacccatgattcacagattttcattaagagaattgtttaagtccaacttgatttgttctcacaagtttgaaaaattggaatattttctgggtttttttttcattttcccttccagtggagttgaacagttcattatactttttaaatagatcacagtcacataagtcatagcccacccttttcttctccttagaagattctctattattattattattttactatttgtaggtagaaaacatttatcaaataaatgtttttgttttttgctttttgcttttttttttttttttttttttttgaggcggagtcttgctctgtcacccagggtggagtacagtggcacaatcttggctcactgcagcctctgcctcctgggttcaagcgattctcctgcctcagccccccaagtagctgggcctacaggcacacgccaccatgcccagctaatttttgtatttaagtagttatggggtttcaccatgttggccaggctggtcccaaactcatcacctcaagtgatgcgcctgcctcggcctcccaaagtgctgggattacaggcatgagccaccgcgcccagtctcaaataagtgttttcactttttcctggcctctctaaactccacacctctcaagatgtcaaaccacagtgtggactgcagtgtaacggggcgacctccactcatcagagttgatggccttagagtctttcatgcccttttctatattttgcctttttttttttaagtcagtattgcattttctgatttttcttgataggaccttgctaagcagtactctgacagactagaatgctgtgaaaatgaagtagaaaaggtaatagaagaaatacgttgcaaggcaattgagcgtggaacaggaaatgacaattatagaacaacgggaattgctacaatcgaggtgtttttaccaccaagactaaaaaaagtgagtaatttccctaaatttgagtaggcactaatgtccagttagtgatgaggtcaaataaattgttgttgtttggaaagttacaatccaaagtcagaattcttttaagtgactttacatattgaacaatttatcagcttgaaagtcaatgttacaaattcttaaactggaacattcc

SEQ ID NO: 39687 - DNA, 2300 bp, Homo sapien
ggtggggggaggggggagggatagctttaggagatatacctaatgctaaatgacgagttaatgggtgcagcgcaccagcatggcacatgtatacatatgtaactaacctgcacattgtgcacatgtaccctaaaacttaaaagtataataataataaaataaaattaaaggaaaaaataaataaaaataaaaataataaattcttactggtagtggagtaatagtaaagcaataaatcagtatcagcaatgttcatttttctgttagtactgaattagaccatgtaaaactcaaacacacagaactcaacttttcagctggtcgcagtggctcacacctgtgatcccagcactttgggaggccaaggcgggaggatcacttgaggtcaggagttcgagaccagcctggccaaattggtaaaaccccatctctactaaaaatacaaaaagtaaagctgggcgtggtggtgggcacctgtaattccagctacttagaaggctaaggcagaagaatcacttgaacctgggaggcagaggttgcagtgatcacgccactgcactccagcctgggtgacagagtgagactctggaataaaaaaaaaaaaaagaactcagcttttcaaagtctctgcctttacctactcattgacttctatagcaagacccaaaggaccacgattggactaggcaagagagaaaggtaatgaccacagctggtgttgtaaaaggagaaaccctgtgactgctcaccacggaatgaacccacgaatccactccctctctggcatcaggtaggcaaacaaccacggggctttcctgctcccatccaaatacccctgaggctgcttttttccttcaggattatcctagtgtttagcaaaaagggaaacgaggtaacatacatgtgaagattctagagacttctatggctggagtttacagctagaaaggacctgtgagataatctagtaccaacttcttgttttggcaagaagaaaaatggctctcctgctaatattccaccatgaccgccctctagacctcagttctttcactgcagaacatattggatagaataaggatgcttccaactccaaaattctaaggttttctttaatgtacttaattgtttcaaatgattatagttttttaacctgtgctttcataatataatacaacttgtttctatgatttgacttatgtttctaggcaaggatgcaatccccaactttaataatgacctcatgaaaaaacaattttgtttttaaaatgacttccagaaatacactatggtgttaaagaaagagagagaggggaccgtttgccaccacagcaggaaacaaaactaaggagactgcagcatgtgaaaaatgatccaattgaaaaagacaagtttcggccaggcgcggtggctcacacctgtaatcccaggactttgggaaactgaggtgggcgcatcacttgaggtcaggagtttgagaacagcctggccaacatggtgaaaccccatctttactaaaaatacaaaaattagccaggtgtggtggcacacacctgtaatcccagctactcaggaggctgaggcacgagaattgcttgaacccgggaggcggagcttgcagtgagccaagatcgtgccactgcactccagcctggatgacaaagtgagactctgtctcaagaaaaaaaaaaggacaagtttctccttccttcccaatctggagtaataaagagttcctggttattaacactcctgtgggattatctttttttgttctttcatacccaagagagctagggcatgtgaaagtgggtacctctctgcggttggtaatatgagtggccgcatgatccacgttcccatcacacgccctcaggccaagccgggcttcctgggcagtaaaccccaactgcaacaaattgtccacttttgatggatcaatatatagctctttaaagagctgacgtgcctagagacagggaaatgtaagaatcatgtaaccacggcaatacttaaagcttaatacaaagtgaaagcctaaaagaaattagattgtatccaatgtgaattaaaaggcatcagattttggataaaatctctaaactaggcctgttattaacaagtacaaatggaaacagaccaacactacctctactcacataacttagccacagcacaacacgaggtaagaggctgggtgttgcagaagtgactggtaaccactttgtttttgcaacaaaagcccccgaatttcagctgtgcacgtggcatttctcaccctcccttgcagctgggtgtag

SEQ ID NO: 39688 - DNA, 2300 bp, Homo sapien
ggcggccagctggacgttgcctctgaacactctcagcgcagcttcggccacgagtgcatcaaaacccatgtacaccaactaggggagagcgcaggggtcacagcatcagcccctggcgcctcttctgccacccccgtcagccatacgagtggacagccgactctcatgtttaagagctcccggcgtgtgcaccatggccctttgtgcacaagtcatgcttctgtgcaatgtgagcgtagagcaacctggaagggggcttggaagactcaagtcgggtgcgtcagggagcagccatctcaggacaggcagtgacctcgggctgagagcagggcgccacaccagcctcaccacgagcaccgcgaggtcagtggccacagcatacaggcgtgctaacgcgtgtaggggcacaaatgtggacagagccgtcacttgggatacaaagctggatgggtttcccaggtcacagtgccatccttttaggtcacaggcagagaaatgaggctgatgcaaacagtggtgcatagacaaaggcagcaaacctaaagagaacttcctgacacttccccagttttcctgctttccaaggaggcctcccctgccctctgttactgcgtgggtggcctctgaggtgggcaggttacacctggagcctgggagccaaggtttcagcacggactcccccagtcctgctgcctgattcacccgggttaccccaagcaaccccacccgaggctgtccaagctgagggcacaaaggcctgtcactcactcggtcaatgttttcctgggaaggactttcttgacggttgtcggtttcaggattggaatcatttaaccaccacatctgaggattgctgagcagaatctaaaacacacaggaacaccctttacccatcactaagaactcttcacacattcagacaggcgctgcaccctgccatgtgctaggcagaccccgccgtcctctgctgctatgaggcagagaaaggggctcccactcaggctggtgttcacagaaggcttccagccagagaccaggacagctggggtttgaaggaggagcaagactagtcagggaaaagatcccttctgttagagcaggaagggatggagagcaggtggaagcagcatccaagaaaacaggttttgtcagagctacagacagaaaggtctcaagcagctcagggctgcctgattgatctttgaaagcgtcatgccctctagacttaaaatgtcaggcaggtagtagggttattttgacccttgatttcttcatcacacaatacttaatcttcaaagaccctgtggagactttcctttccaacactcagtacttccattttgactggaagtatttttgtgccactcgtataattcacatctattttgagacccatcagtcccttcgaatattcagaatttcccacctcttaatatttctccaacacacaaaaaaacgaactagatgatattcaaataaaaatttaaaatttaacgtatatgttaaatatacatgtacatagttacaaaagtactgacttgtggagccttccggggaacagggcagggataagaggcaaaggcagggtggactccccgtgcctgctgcacccacacccgcctcagcagggcaaacgaggacacctgccctgcaccccaccccctccaaccccatctctgtccccccagccccgcccccagcacgtgcacaacctaagccagctcctaccactctgcttcctgcccgccgcgctgccccagcatctgtctggactgctgcctccacacagccagccccctgcctcctgtgcaccccctcgggacccctcaccacgtgtgctctgagtttgtctctcactgacctgcggggccgagagggcagagggtggttccatgccaagctgctgagacgcagcgcagcacctgccctactgaggattcgatatgcttctccaacacagggaaggaagtggcccaggtaaagtcactgctgtctggatcccaacctgctgtcactcctgaggggttctttgaaaagctctccctttgccaacatgtacgatggactaaataaataaaactagatacttacatttaaaattttaatgccaaacaattatactacaagttgaattcccattctcttttttctgccgtggaaactgcctgtttcactaaactctgctgcacacagaaaccctacacaaagtcctggcctgtggactgtgctggtgtggacaggcaccacgttttggagccaggcctgggccaagcactgagcatggggcctcacgtggcctc

SEQ ID NO: 39689 - DNA, 2300 bp, Homo sapien
tagcaaaatgggccacagttctttcattccagtgtcctgcttgagcggggatagccctgccctcaattagggcagaaggttgggcaccctccctgggaagtgagtgtcagtacctcaaggggacaagcagccgtgagggtcaccaaagtgggtgtgaaggaaggaggcacaggtgccagacacagagctgggcaggagggtgggccctggaggcttggtgaggctccagagctgccgtgggggcaaagccaagtgcccaccaggctaccggcagcctggcaaagcctggggcctcactggggagaaaccccacctaattgtgggctaagctgggctcccacaacccgtccccagcccaggggctcccggggccagctgtgcataagacccacccaaaagcttgttagaaatgccaattctaggccgggtgcagtggctcacacttgtaatctcagcacttcgggaggccaaggcgggtggatcacctgaggtcgggagttcaagaccagcctggccaacatgatgaagccccacgtctaataaaaatacaaaaaaattagctgggcgtggtggcgagcacctgtaatcccagctattcaggaggccaaggcaggagaatcgcttgaacccgggaggcggaggttgcagtgagccaagatcgtgccactgcactccagcctgggcaacaagagcgaaactccatctcaaaaaacaacaacaagaagaaatgccagttctacagccctattcatggaggactgcatcactggagcccaggcctggggatctgcatttctgaaacaccacccacccctctacccccaagacagtcttatgtttgggagcaataccaactggacttaacatttctaaaagacctcatattttccattcctggttgaatgcctataagtgtgtgtggctgtttgggggggatgtgtgttagtttgtggccacctctccattatccacaccaactcccaagtaaccggtaatccaaaagtcatccctgttgggtttgaaatatctgccctaactatgtaatatttttttcttttcttttcttttttttttttttttagacagagtctggctctgtcacccaggctggagtgcagtggcacgatcttggctcactgcaacctctgcctcctgggttcaagtgattctcctgcctcagcctcccgagtagttggaattacaggcgcccgccaccacgcccagctaattttttgtatttttattagacacagggtttcatcatgttggccaggctggtctcaaactcctgacctctggtgatccacccaccttggcctcccaaagtgttgggattacaagtgtgagccaccgagcctggtcaactgttcttatttaaaaccagcagtatcaggattagccaatattggggctaatatcctacctaagttggaaggcctgggcgaggccacagagagttcactgatgatggtggaaaagcccgcggtgataaagaactacccacagcagaaagcctcgcggctcatccaggggactacgtgtgctacctgggcagtaggagggccagagctgaaagggacctcacagtgcatgggacaggcccaggggaaggtgcacccgaggcacactgacctcctgagtgagtacagggcacaaatagaaaccaacaggcatgcaggcagggtttacagcaatgagagggctcagactgccatctacccctcactggctgtgcgacctgggcgaattacttaactcccagcctgtttccacgtctgtatgtggggtaacatagtgtgacgacggcacacttctccgcaccgctggcccttaacaagcgtctactgttgctgtgagagtcgtcaacaggaaatgccagcagaagagcacaattggccacaaagaggccacaaggcacctagagacaagggaaggtttgcttagaaggagtataggtgcaactttttgtttgttaacattgttgtcaagggagatttcctgccgctggttgacaaatgatcttcgcctttgtagcggacgcccctcgacccacccacccgatcccggccgcaccctgctctgcacccgcaccccacccccagacctcaccctgccctgccgtgcgctcaacagccagatgctgggcccagacaagcgctcttccgctagtgtgccgggatgagcgggggctggacttctagaaaggggtctgcgggcgcaggagctggggtccgcggtctggggccggtgagctgcggcgaagaggtcagggagggagtgggagggtctaccttgcagga

SEQ ID NO: 39690 - DNA, 2300 bp, Homo sapien
caggggaattcggtgctgttttccaatctacccagcttcttgtactcctgttagatctgggggcaatttcccagaggagagtctgtaatctacgacctgcaagagaaaagggaagacaggctggctgaggacatctgcacccacagctctacagtccagactcaacccccagagatggctggctcatccccaccagggggccactttgtgccaaaccggagaaggaggggtgggggaggtggagaagccaagaacaaaaaatctatcaacctggaaagaggaagtaggtaaggtcagcggtgtgtggactgcaggctcccaagatgatggcgctggcgcttctgaacgctctgcctgctgggagctgagcatggggctgatggcttgtgttggctgcagaggagaggaaccagagtgcatgggtgccaccttgctcaggaatcctgggtgacctccttgaaagttaagcttttctcctggtggttctttcctctggcccacgaccaggcaagctcgcccaacctacgatctgtccccagctcccaaactgctttcaaacccctcccctcttagtttccaaaagagtcgatgcctggttctccttggcccctctgcccagaaagtttgggtttcctctggcacttctccggataaaccctcccagcctccatggtcctcacattcaccttccccaagggctgcagccgcagggcctgcccaagatccccactataccgagtctgtcctcacctggaggccacaccgcagtttcacacctggatgtgcaatgggccccctgaggttcaccggttcctaagaggaactggtgatcagcctgtaggggacaaaacagtctacccagcctctcagcacaagacaggctccccggcctctcccgcctcgcaggcatccaaatgctgaagcctccacctcctgaaaacgtctctcctttcggcctccctctctccggctggatgaccccaaatctcgtcctaacgctcctccactgcccctctctccaccacctgctaaggaagggccacgctccttaagctgaggcgccagctgctttacaagttttgagggaaaagaacggatttctctggttaggccactctgggtataaacgacccaacggcctgggacaccccacgatggggttttcttttggagtctggatagagcagagcgtgcagtactggtcgtcccattgcgggctagctcgccaaagacgccccttccttgcccttctccctaggctcctgagagagccctggagcgttctggaaatcctgctacctttaggacctgggggatccgagtaggggggtcaccttccccgtccccagcgaagtcggcgccggaactgccctaatggaaaccagccgccgggcgctccgggagggctcaggccgaccccggggtccattagaggcgccccaggccgagggagcccgcggcggctggaaggtgaacttgacatcccggctccaccgaccccgcagcggctcgcacctcatccccactccggccagaccaaagtagaatcctgggtgtgcgcgtgatttcccagggagggcggactcggggctttccctgtcgcaccctccattgggggaccgcccccaagtccccgagagcccctcgggcagagtccttagggctcagagcatgggaggacctggcttgcctggtggaggcgagtagccgaggggtcggtggagctgcgccccaaatgagttcccggcgcgcgattctccccgaccccgaccctttgtccgcctccccctccctcgtcccggcccttggctcaggggacccaggcggcggcggcggaggtggcagaggccagagcccagaggcgcagcccgggcagctaggagggtcgcacgtggagccgtcccccggacccgcacagcgacgaaggggggaggctgcaggcgcgcggggtgggggctggggcgcagcccgagaagtgggaggggatcgggtgaggggtggtctctgaggaggagccaggctggaccgtattgttccgcgctcggccggggagggcgcggggcgctcggcttcccgtgttcctctccccgccccagccccgtgggcgcgagaggaggcggggggctccttgtgcaccagagacgcagctgccttgttcgcccggtggggtgtggatcctccgagcggtgctgggaagggggttctctctgcccgcgcgcccaggactctacccagggcggaggtcccgagtgggccgccccccgcagcgccctgggttcgcgggcccagaggctggaggc

SEQ ID NO: 39691 - DNA, 2300 bp, Homo sapien
tctgcaggtggctgcaggactgggaaggcttccgtcctgttgaaaaatactagcacttagcacagtacctgacacacagtaagtacccaaactatgaagatgatgaccacaggcaccctcaccaccagcattgcaggttgtgccagaagggaaaaagcaattctgacaaagctctggctatgacgttccctgtgggcgcccctcaaggtgcctccctctgtcaccacctacacacacacacacacacacaactcaggaatatccagctttcaccatgcttctcagagaggccccagagggtcactctttccagcagggtaaattgtggcagtccctgtggcacggggaatgagcactccctggcacaaaatgcacccgccccccaacccttcacttgttaaacactgcccatttcttgcttcttaaagcttaaccatttcctcctacaccctaccaggttcccttcccaaggtgccttccatttataaagtgattaggtccaggagggcctgggcaccacgggactccaggccctcttggaggctccagaagagttaaaggtgtgaaaggggaagggagcccaggttctgctggggacccagcctgactcctgggtctctatagctttgctatcttaaggtggaggttgggggagaccccagtttcaggggaattaggggagacctcagttccaggggaattcggtgctgttttccaatctacccagcttcttgtactcctgttagatctgggggcaatttcccagaggagagtctgtaatctacgacctgcaagagaaaagggaagacaggctggctgaggacatctgcacccacagctctacagtccagactcaacccccagagatggctggctcatccccaccagggggccactttgtgccaaaccggagaaggaggggtgggggaggtggagaagccaagaacaaaaaatctatcaacctggaaagaggaagtaggtaaggtcagcggtgtgtggactgcaggctcccaagatgatggcgctggcgcttctgaacgctctgcctgctgggagctgagcatggggctgatggcttgtgttggctgcagaggagaggaaccagagtgcatgggtgccaccttgctcaggaatcctgggtgacctccttgaaagttaagcttttctcctggtggttctttcctctggcccacgaccaggcaagctcgcccaacctacgatctgtccccagctcccaaactgctttcaaacccctcccctcttagtttccaaaagagtcgatgcctggttctccttggcccctctgcccagaaagtttgggtttcctctggcacttctccggataaaccctcccagcctccatggtcctcacattcaccttccccaagggctgcagccgcagggcctgcccaagatccccactataccgagtctgtcctcacctggaggccacaccgcagtttcacacctggatgtgcaatgggccccctgaggttcaccggttcctaagaggaactggtgatcagcctgtaggggacaaaacagtctacccagcctctcagcacaagacaggctccccggcctctcccgcctcgcaggcatccaaatgctgaagcctccacctcctgaaaacgtctctcctttcggcctccctctctccggctggatgaccccaaatctcgtcctaacgctcctccactgcccctctctccaccacctgctaaggaagggccacgctccttaagctgaggcgccagctgctttacaagttttgagggaaaagaacggatttctctggttaggccactctgggtataaacgacccaacggcctgggacaccccacgatggggttttcttttggagtctggatagagcagagcgtgcagtactggtcgtcccattgcgggctagctcgccaaagacgccccttccttgcccttctccctaggctcctgagagagccctggagcgttctggaaatcctgctacctttaggacctgggggatccgagtaggggggtcaccttccccgtccccagcgaagtcggcgccggaactgccctaatggaaaccagccgccgggcgctccgggagggctcaggccgaccccggggtccattagaggcgccccaggccgagggagcccgcggcggctggaaggtgaacttgacatcccggctccaccgaccccgcagcggctcgcacctcatccccactccggccagaccaaagtagaatcctgggtgtgcgcgtgatttcccagggagggcggactcggggctttccctgtcgcaccct

SEQ ID NO: 39692 - DNA, 2300 bp, Homo sapien
tgtggggaggctttaaaaatgtgttattttaacaaagtctacgccgcattctctcaacttctcatcctgtatcccgatgtataacataggttcatcggctgtgacaaatgtaccactctaatgggggcgctgattgtggaggaggctctgtgtgtgtgtgtgtgtgtgtgtgtgtgtgtgtgtgtgtgtgtgtaggggcagggggtatacaggaaattgctgtaccttttgctgaattcaacttgaacctaaagctgctctaaaaaataaaacctttttttaaggcttatttttccctgttgaaaataagggaagaggcttccctttcctcccttttcttgcagaatttccttctctgtcattttcaaatgtgtgtaaatctttttaatggctaaacaagcctcttgccagtctaacaactcagtcatgtttcctctgggagcctctttgagtcttgacatcaaggagtaagtgcccccaccctccccgtttcctaagaagcctgacttcagctgtcacctgactccaaattgcaaaacccacctccagtcatagagatacaagaaaatcagcaattttatcctgaaaacatgaatgcagtgggttgtgtctgcttggctacagaagagtgagatctctctccatctttgcgatctcttaggggagagatcgtgatgcagatcgcattccagtttaaagtttattcaataataaaattgtttttttttccttctaccttcgtggagaagttttctgggttggctggagattttgtttttaattttatgtccccaccagggcccaggtccagagagaaacattggaatgtgtggcttggcaagtaagggcgccagtggaggcagctgggcggcgtccctagggaggggcgtccctagggaggaccgtccctgggttcaagggtgacatgcaggttctggtttgtaccctgtctacttttgaaaacctcccacagcagaggcaaggtcacccctctgccccaagaatcacataacctcctcttcctgggcctcagtgtctcatctgtgaaatggtcataaaaatatactgtttgaaggaagagcagcccaaactcctccccaaagctcctccctcccctccagcagaagcccctgtggagcacctgcccctctctcctttgatctcagagcctgtcccccaccaccccagccatctgagtcatgagtcctgtgttcccagctcatctccccagccgtgtgggggctgcacatcctgtgggctccatgttcgctctgctcactccacaatctctgagcctctgctgtctgccaagtgctcgttctgggccctggggaactctccctccgcggtggggctgctttgtgctgtaaactgatcctgggcgtccagggtggcttagttggtgcagcagagaggcaaggggcagagcactgtacccccagctcagggcagcgcgggtcacctggtcaccctaggcaggatcttcaaggagagagggacccagggagggagagtgccagggagggaggcaggcaggaagagagcgggaggagggaggcctgacctggcctggcgttttgtggggtgtgggggggtgcatcaggagctgggtgagttggagccggaggtctaaggtggggacctgggagctcagaccagagcagccaggggaggggcggtcaagggctgtctgtctgtccggggaagcttgggttgcatcctcgtggagacaaacaagttggcaccaaggcgagactacctgcagccaggtgagaaaggggagtgggctggggagctcggaacaggccttgggagggagggagatgggcgtgagggctgaggggcagcgcaggggaagaaaggttggagggctagagagacacctcccctcctccccccaccactccagggcagggcaggggcagccgcgggctgggcgggagggctcagggaggaaggaggctcgggagctaaacgcggagagcacagggagaccccgggcagggcgggctgcactcgcggtggcacagggtggccgcggcgggtcccaaccgcctggtggcccctcgggcttagcacgcccgacagcactaacgctccggggccggcccagcaaatcttttgtccggggcggcgctgagccagcagggcgctgcccggtgtaaacggggacccgcggaaggggcggggcgcaccatggcgcagcgctcggggaaggtgagtgcgtccctcaaccccaaggaaaccgagtggggctccgccttcgccccctgtgctaggggatgcaggagggtgcacac

SEQ ID NO: 39693 - DNA, 2300 bp, Homo sapien
ttggggattaagtttccaacacatgtgttttgggggacacgttcaaaccgtagtagctacatactgtaagattccaaatacatgacatcctgaaaaaggcaaaaccgtgaagatagtaaaaagatcagtggttgccaggagttaagggggagagagggataaacagatggagcccaggggacttttttttttatctttttttttttttttttgagacggagtttaactctgtcgtccaggctggagtgcagtggcgcaatcttggctcactacaacctccaccttccaggttcaagcaattctcactgcctcagcctcctgagtagctaggattacaggcgcctgccaccacgcctggctagtttttgtatttttagtagagacagggtttcgccctgttggccaggctggtctcaaactcctgaccttaggtgatccacccgccccggcctcccaaagtgctgggattacaggtgtgagccgccgtgcccagcccacacaggggacttttaaggtggtgagaatactctacctggtgctctaatggtggaaccatggcattacactgtagaggcagcaaagttctacctccatcctcttagggtcctggctgggcctgagaaataaattgacctaagacagattaacaagagaaaagcatacaaacttatttaatacaagttttatgtggcatgggagcccttataaggagatgaagacccaaagaaaaagttaagagtcaaacacttacatactcaactggacaaagagtagcaagctgtgaaaaatcaaccacattatgtggggaggctttaaaaatgtgttattttaacaaagtctacgccgcattctctcaacttctcatcctgtatcccgatgtataacataggttcatcggctgtgacaaatgtaccactctaatgggggcgctgattgtggaggaggctctgtgtgtgtgtgtgtgtgtgtgtgtgtgtgtgtgtgtgtgtgtgtaggggcagggggtatacaggaaattgctgtaccttttgctgaattcaacttgaacctaaagctgctctaaaaaataaaacctttttttaaggcttatttttccctgttgaaaataagggaagaggcttccctttcctcccttttcttgcagaatttccttctctgtcattttcaaatgtgtgtaaatctttttaatggctaaacaagcctcttgccagtctaacaactcagtcatgtttcctctgggagcctctttgagtcttgacatcaaggagtaagtgcccccaccctccccgtttcctaagaagcctgacttcagctgtcacctgactccaaattgcaaaacccacctccagtcatagagatacaagaaaatcagcaattttatcctgaaaacatgaatgcagtgggttgtgtctgcttggctacagaagagtgagatctctctccatctttgcgatctcttaggggagagatcgtgatgcagatcgcattccagtttaaagtttattcaataataaaattgtttttttttccttctaccttcgtggagaagttttctgggttggctggagattttgtttttaattttatgtccccaccagggcccaggtccagagagaaacattggaatgtgtggcttggcaagtaagggcgccagtggaggcagctgggcggcgtccctagggaggggcgtccctagggaggaccgtccctgggttcaagggtgacatgcaggttctggtttgtaccctgtctacttttgaaaacctcccacagcagaggcaaggtcacccctctgccccaagaatcacataacctcctcttcctgggcctcagtgtctcatctgtgaaatggtcataaaaatatactgtttgaaggaagagcagcccaaactcctccccaaagctcctccctcccctccagcagaagcccctgtggagcacctgcccctctctcctttgatctcagagcctgtcccccaccaccccagccatctgagtcatgagtcctgtgttcccagctcatctccccagccgtgtgggggctgcacatcctgtgggctccatgttcgctctgctcactccacaatctctgagcctctgctgtctgccaagtgctcgttctgggccctggggaactctccctccgcggtggggctgctttgtgctgtaaactgatcctgggcgtccagggtggcttagttggtgcagcagagaggcaaggggcagagcactgtacccccagctcagggcagcgcgggtcacctggtcaccctaggcaggatcttcaaggagagagggac

SEQ ID NO: 39694 - DNA, 2300 bp, Homo sapien
aaaagcattaccttttcaacacaatttttttttttttttttaagagacaggtctggctatgttgctagctggagggcagtggctacttacaggcacactcccactactaatcagctcaggagttctgagcgctgtttccaggttggatggcttcacccttccgcaggcaacctggcggtccctagctcccaggtcaccgtattgatgccgaactcagtgtacacacaggattagcacggcatactacagcccagaacgcctgggctccagcaatctcccacctcagcctcctgagtagccaggactacaggcacatgcatcatgcccagtgacaatgttttatcactgattataagactaatgctctgccaggcgcagtggctcaggcctgtaatcctagcactctaggaggccgaggtgggcggaccacctgaggtcagttcaagaccagcctgaccaatattatgaaaccccgtctctactaaaaatacaaaaataagtcgggtgtggtggcatgcgcctgtgatcccagctacttgggaggctgagacagaattgcttgaacctgggaggcagaggttgcagcgagctgagattgtgccattgtgctccagcctgggcaacaagagcgaaactctgtgtcagaaaaaccaaaccaaaacaaaaaaacaaaaccacgaatgctcaatcaagtaaacgagtcaactgtcttcttgggattgctgccttgggcagctggacgggggcctaccctgtgtggcatctccaaggttcagcgcaggattgacggcacacaggggtgcaggtttctctgctgtgttcatggcactcagagaagtgtctggcacatggcaggtccccagggcatatctgaaggaatgtgtgcactgcgtcacataaagaaatgatactatgctccctccactcaggaggtccagtccttaaaggaccacctcaggagagttcagttgaacttgagtttctagtacaatatgctgttctaagttccatttacatagacataactggatggactaggtccccattttctgttcagtgctcttacatttttagtcctaagaataaccctggtaataagtaacaatactgtgttgtcaaaatttaaaaggtgattatttggccaggcatagtggcttaggcctgtaatcctagctactcaggaagatcacttgagcatgagcccaagagtttgaggctgcagtgagctatgatctgcactctagtctgggtgacagagtgagaccctgtctttaaaaatgtatttggtggaagtcttctaaagcagaaatttcatcctggaatgacaaatgaggcaaaaatatttaaaagatccaaattaatggcatgtgttttaagaacataatttttcattaacaatcaactgcaaagcaaaactatattttattaataaagtcaatggtaacatttgcttacgtattagaaatagccctgtgaaattttagctgcaaaagggaatcgtttaaaaagcactgctcaactccaagtttgacttacagacaaggtaacagccaccaaacaaatgaaatccctcttctcctttacagctgctccttggacagagggaggcccgtcatctgggtctgaaggaggctcccaagactctgacacagaacactaaactccagggtgttctaggacagtgacaggcaaggctgttctcaatcatctcctgtctgacacggacatcgagctaagctatgagcaagggcgaacaatgcctctcagcagctcctcctccttgaccaggctcccgaccacggagcatttcagtcaaggtctagggatttgagggtggaaggagagaatttcatcactggggaggaactcccctcacagaccccccagggccactcagcttcaatcagctgtaacccagccccaacatctgcaggccactgcgcagggagtccacggtcagcagccacctcagcacacctcctcctgtggccacatcttcactggtttctggaatccaacctggggccttcctgaagccaagtgagaaactcaggacaaggcttctcttctttgaaagccacatcaagtagcacaaaggactgaggtttgcagctattttatttacaagtatacatttaacacaatgaaataaacactgatatactgaagcctagttaatagtagtgtaacaatatgcatcattttgatgattacattattttaaacaacaaactacactgaaaaattaatgccgataaaattcttggtcataatattaagaaatacaatatataaattga

SEQ ID NO: 39695 - DNA, 2300 bp, Homo sapien
tcaccatgttggccaggctggtctggaactcctgacctcgtgatccgcctgcctcgacctcccaaagtgctgggattacaggtgtgaaccaccgcgcccagcctggaaaactttttgaatgaatttgtcctttacaactgtgcttcacatctggattaccaatattctcaggctagggcagtgctttcaaactttttgaagcaacccactgtaagaaactttacaatgaggccgggcacggtggctcacgcctgtaatcccagcactttgggaggccgaggcgggcgggtcatgaggtcgagaggtcgagaccatcctggccagtatggtgaaaccctatctctactaaaaatacaaaaattagccaggcgtcgtggcgggcgcctgtggtcccagctactcgggaggctgaggcaggagaatggcgcgaacccggaaggcggagcttgcagtgagccgagattgcgccactgcactccagcctgggcgacagagagagactccgtctcaaaaaaaaaaaagaaagaaactacagtaaatcccaacatgcaataatacatatatagcatatctataaacatatatatctacacgtgcacttacacaaacttacccttactcatttttttaactcaccactgtactaatgaggacacatacttacccttactatgcataacgcagttttctattctgttctattttttttaaaaaaaggtaaaactaaactgattttataatgcaaggaatttagtagcatctgttcaaaaacaccgtggtgagggtatccgaatccacaggataaaaacgacacattttacaggagagtgcattttaagacctttattttaaaatacttaaaataactatagcgtaaacctcaacatttcatggaaacatagaacttccagacattgatcacttctggctggctgcctggggcttccatctgtagatccccgaggacaagaatgcacaccccagcccctcatcggagtgcttccgtgggaaagctggagggagtcgctcttgggttgggtgttccaagtcgactccagtcacctctaaaccttcctacgctggaatacaaggcctgccactcagcttcccctggcttcattcctccccaccgatcactggcaaagggcgaagggccatgcccggcctctgcaggtccccactgccaaacagcctgggcagaataggggcgggttccccggcgcggcggagtctctgctaactcggcaagtgccaagccctccagcagccaccacgccgggcctgcctgcaggctggtccctcaacggcacctgcgttcccggccgggcttcccttcccgcgcccctctgcactgcacccctgggaaggctgtgcccacaccacggtctccgcccgtccacaccgcggcccgaggcgttcctggcacccggctcgggcctgcccgccgcaccagccgccccggtgctggcggagaaccggcttcccgccccggcgctgttccaggaggtgcgccgagctccgcgcgaagcgaagcggacaccagaactgacgaggctcgccctgtttttaatgaaattcctaacactttgaattaacgcagactccatgcttcccacagtccttcggccgtcggtgacgcttagtcaccactacatcctcaaacccagacacgaacgctaacgcagctcaaggagaattttcaaaaaaccccgagggaggagccagcccacccgcccaggccacgcgcctcgcgcccttcacgggctcagcgggcgcgaacccgccaaccgcttagcgtttcgccaatcaccgcacctcccacctattgccccgccctgcgctccgttctggccaatcaccagggagccaccgtttgtctctccgcctctcccgcccgcccctaaccggttggaagtttgaagccttcaaacctagccggcgcccaacagcgcggtagcagcgaggtgtatttttagctcccgggcgggcagccccgcccccccctccccgcctccttgtttcccccaatgggagatggagtttccgacacgtcatcgcgcggctgtgcaggagctgtccaatcggcgctcggggagaatggcgtaattaaaaagcggcggaagaaggtgggagggtcatgacgcagcgagtttcagtcgtgacttttctgggggcatcgcggcgtcccctttttttgcctttaaagtaaaacgtcgccccgacgcaccccccgcgtatttcggggggcggaggcggcgggccacggcgcgaagaggggcggtgctgacgccggccggtca

SEQ ID NO: 39696 - DNA, 2300 bp, Homo sapien
agttttaagttcacgatccaatgtgagctaatttttgtgtaaaacgcaaggcttaggttggggtttgtttttgtctttttaccttttgatatccaattactccagttctattgcttttacacctccatcaaaaattggtttgccatgtttgcatgggtctatttctgggttttctatttatttctattgattattatatccattcttctgccaataccattgtcttgattgctgtatctatatagtttgctttaatattaagcgacttcaagattaaagaattctactgtagtcccagctacttgggaggctgaggcaggagaatggcgtgaacccaggaagcagagcttgcagtgagccgaggttgcgccactgcactccagcctgggtgacagagcgagactccgtctcaaaaaaataataaataaataaatagaattctagagcttgcacctttccatataaattttagaataagcttatttatgtctttaaaaaaaaccctaatttggtagcaattgcattaaaccaaaagattaatctgggggagaattgtcatttttactatgttggggcttccagctcaggactgtctctccatttattagctcgtctttcatctacagtttgtgattttcagcatacagctactatacatggtttcttgagtttatgcctaagtattaattttctttgaagtgattgtattaagtgatattgttttatatatttttccatgtgttcattgttagtttatagaaatgtgattgatttttgtgtgttgatcttgtatgctatgaccttaccaaactcactaattccaggtgagttttttctttcttttgtagattctttgatattttgtatgtagataacatgttatctacacaggtgtttttcttcctttccaatctgtatgcgttttctttccttttcttgccttattgcagggcctagtacttctagaaccatgttgaataggattagtgagagcagacaccctggcctggtttctgaacttcatagggaaaacagtctttcactatgaagtatggtatctgctgtagctttttaccatgaaacatcttagttttgttttctttttctctccccaccccttttctttttttaagaggtttaagacttagggattggcgcaagtaagatgacaaagctaaacgagaggcattttcaggacttcctctttcaggcccggcttgcaagagcgctagggccaagctcctttcagccctaatcggtactggagctaatcgcattcgcggcgcccgtgcactctgcagggatgggccgtggggccagggacctcagtcccctctcggcctgtcctgcccttccaggaggctagcggctgctggccgcgcagcctgccaacctgagttggccatagtagagtctcagatacccagctcctgagcggccagggccagattcagggtgtgtacgtttttggcagcggctccccaaccgagaagacactcggctgcgaagagaggacgcgaattaagagttccatgctggaaaaaaaaaaatggatagcgacaaagtgcatctacaatacgtgtagcccacggaacgatttttgttaagggggccgaggatgggcagttacatctaaaatttggaaagggaagaggaaagcgagaaaggatcccctagctggcgccccggggcgttctgcagcctccagcccctctccccctccccgcgccgcggagcccacacctgcgcaggtggagcctgccgagcgcggccgccggtgctgggaaggtgagcggcgccggggggcggagtgggggcgggccgcgggcctctcccaatggcggcacggcggggaggacgcgggccacggccggaggggggcgccccgggcccaggcgctgccgccctcgagctcccgggtcccttcccacgcttcctcccgggcgggccgtaccaaggcgcgggggggagcggcgcgtcccactcgcggaggggcacgcgggccgcggccgcgccacctgcggcggcggcggcggcctcgggcgggtgggggcagcgctcccgctccgcccccggcccccgctgcccgcgtcccctgccaggcccctcctcccggcggcgcggcagagccaggccccagcgctcggccggccgcgagcccgccggccggggacgagcgtcgcagctcatgctgatcgctgtcctcctcctccccctcaggcggcgctggcggcggccctgggacccgcggaagccggcatgctggagaagctggagttcgaggacgaaggtgagtgcgc

SEQ ID NO: 39697 - DNA, 2300 bp, Homo sapien
ctcaccaacaggctattttgttcaacacctggacttttgctgggttggtaagacgtggcatctgtgtaacccaaattgacatttgttttctttattccgtggtgttccatcgcggcacagagtcggcacttgaggtggcatcctgtggaactgcttctcaaactgcacgtaggacataggtcataaaatccactcaggacacacaggttttgttgcggctgctgttcatagaacaaaaccagagctccaggagttttctgggatgtctatatccaataggtcatgatgtgaagttcctcgccgtggctcactgtcaaagtctgaaagccgctgcggaagtggctcaacgcatggcaggcacaggggctccatggggtaagtagcccacaggacagccactaggaatgtggtccctccctgcatacatgtgctgtctcctgttgagtgggcgaatctgttcctccatccttgagttggggcagctgtgctcaacagaaatgcagcagaaaccacaccacctgacttctgggttaggtgagaaggaacctcgcagttcctcctggatctcttgtaatgtctgccgcgggtgaaaccagctgccacgttaggaatctgcaccaagaccaccatgttatgaggaagctcaagccagccacgtggagaggctgcacggatggagaaacagctgcacggccagccccagggagtgatgtgagagtgaaggagcctctaggatgtgccaggctcagctgccacctgacttttcaaataggaggaacccccagtgagaactcagctgagccagatgactcctaaatccatgaaagatgatttcaaatcatatttttaagttttggggtggtttgttatgtagcaataggtgatcttgtgactatgtaaccctgggaaagttacttcatttctctgttttttaatctaaaaactgggaatcatgggagttcctactggaaaatgagttaacatatagaagtatagaaccacatatgagttaacaaagacatggctgtgatgcctgggactcatttggaaaacatgagttatcactttaaaatgcttcactgagtttagaggcaatatactatgattactgaacccagggacactacagattcttccttctcagagctttgatgagaggaaagaggcagattccaccttaccttcaggtttgccaagatccttccccaacgtacaagtgaaagggagctcaggaaggcagaatgaagggacacatcaaatccttggtgacaaagtttaggacaggctgggcacagtggctcacgcctatagtccaagcattttgggaggccaaggcaggctgatcacctgaggtcaggagttctagaccagcctggccaaacctgtctctactaaaaatacaaaaattagctgggcgtggtggtggccgcctgtagtcccagctactcaggaggctgaagcaggagaatcgcttgaacccgggaagcggaggttgcagtgagccaggatcccaccactgcaccccagcttgggcgacagagcgagactccgtctcaacaactatgacaacaacaaacagtttgggacagagaaaaatccctgtaaacttcaagccttttggggtgctcttgggtgaactcctaaattgctcaagggctaacttcctcatttattattaaaagaaaaaagaaaaaggcagaggccagtggtgaaggctggcgatttctggtctagggtgagagataacagaaagtaacaatggaggctctcgcagtgctcgcaggcactcaaggaacggaaaggaaattgcacatttcacccgtgactgcataggcaaacgagaacagcaagtctctgctttcagctggaatgttatcaacttcggtcacgctgattatctcaggctgatcaggaaggctggtaccaggagtgagtgactaaatgaagaaattactaattaacaaatgcttgggtggacaatccttcaaaatttaggatcaatgggaggagacagaaggagtcttgggaggatttttaaaatatgccagagctggctgggtacagtggctcacacctgtaacctgaggactttgaggtggagacgggcagaccacctgagctcaggagctcaagaccagcctgggcaacatggcaaaaccctgtctctactaacactataaaaagttagctgggcgtgttggtgcatgctgtagtcccagctactcaggaggctgagccacgagaatcgcttgaacctgggagatggaggttgaagtgagccaagatcgcaccattgcact

SEQ ID NO: 39698 - DNA, 2300 bp, Homo sapien
tctccaagcgtagcaaacctctgaatcctttagacgacggagcccatttctctgacatttccagcttttccaaggaaaaccaattaggcttttttcctcaggctcgtatgtatgctttggaataaagcacacagaaaataaaacaggcccagctcacccagcaaggctagttccagaaccagcaggagaaaatattgagattggccggatctctggtcgaccacttgcatcggtgcccggggggctggctgcaggctgcaggaggtttggcccttcgatcttcgccaaatggcgccagctttctgctaaacctcaggtttatgctagcactgccctctggttccagaataatcccgcacatcccaggatgatgcttatttctgtcctgatgcgtgttcatccatgatcccaacagcagccctgggaggtgtgcagagcaagtgtttccactcagcttggtttttcaaaggaagaactgaggttcagagaaatgactgatccaggacttggacctgggttgttgacacagaatattaatgctctggtctgaaagggaccttgaggaacatcccataacacatggctcattctacggacaaaaaaaaaacaaaaaacagtttccgcttaaaatggcctgctcaggtaggcaagtgcagagctcaggcttgtgagttcttagagctatctggccacagcacgccaggcctgtgatttgtcaggtctctgagtggacagctggattgcctggtaccctcctgggctgaaagtgactttaagaaagccacggacttccaacccctacagaggccccccaaagtcccagctgactcagccgcctttttgtccgtgggccttagtagatggccatgcaacgcccttctgtcccctctaggaagccttcctgaatacgtcatccacattaatctttttccaccttgtgttgccatcaaccttacctgaataacacatttgcccactaaatcatagcctttgagtcacaggctcgtggaagaagcctccttttcttgaatacctgcagcaacagatcactcaatatctttggaagcaattcctccactgctgagaagttcaagtcctgagcaagttttatttaatgagggacacggcggggttctgaaatggggaccctcattttctcctaacaattcaagttcattttctgccccacagcctgttttcagggcacctgggatttgttgtaatcaggtacaggaagacatgcagactcaggaatgagtgtcacgaaggaaggaactgatgatactcacagatccctggaagcaggaggctaggcacaccactgccacgtggggaagcacggggttgggcaggaggcagagggagcaagggggagatgcaggcaagagactttattgtggtttctgtgaataattttaggggactgtgggtacaggggctgtccctagctgtctggtacctgccctggggtgatttgggtagtgggtgatggcctggggtgtgagagcccccaggaggaggtgaggaggggaagggtctgtgtgggttggcttgcataggaaaagcaagctcacagatgagttgcttactatctccaggaattgcccagccctgggagggcagtccctccaggatcagcaaggccccaggtgtcaaagcatcagaatacagaaaatcagagacatggctgatataggcagagaccatgttgtctcctggatgatgtttgcaggctgtctggttggagttgggggaatggagtgtaaatggggatttcactgccagagccttttggaaagccatacccatccttctggccagaggggaaaaaaacccccacaatctttgtgctccaaggacaggaatccccagggagttcagatttctgaagcctttgcctgaagttagatgggaacagtgcaggggttgtgctggccagaggacctggagcccagagctgtccactgctgcatcatcggcctctgctcctgcctccctccatcctgctgcctgtctttttaaaagctccggtccagccctccctcctgctggcttgctgtgtggtaaggagtttcctccccagcagcgcctgacacaggtgggaatgacagtttgctgcagtcccgtcaatgggggaatctgcccgagctctgcctgcattttgagcagcaaagcagctccagccaccaagaccgttgcctgcgctgtcttaggccagcccatgctgtctgccagccgcttgttgcgctgccttggggactgggaacacacccagccccggtccccatctgttgcagaca

SEQ ID NO: 39699 - DNA, 2300 bp, Homo sapien
aatgcaggcaatacagtaaaatgttttaatgtaggaagcactaaagtctttgttccaacaaaattaactcagagaacaaattattttacatatgtatacagatcaatcaacaaaagtacacattataacaattgctaaacactgtccataaagaaaacatttcaaatgagaagcgccatcgcggttttctccttctgggtcacccagtggaatgagggccctcgccaggggctcttcccagacgtctcttcacaccaaccggcttccttctgatggccccattttcctttaaaaccagttctcatcaaatagggtgttttatgcaccctggcaaatgatcattttgacaaggattaaaactgtaagctaaacagatgacacaaatgacaattgggaataatttttagtggggacagaggctaaatactaccccctccccttttctacttctaaccaatatcttgagcattcagtgggacaatacagtcttgctgggtctcttgaaatcctctagcaagaagccagccaggagaagacccagaagtcccacacctgtggggccaggatggctgcttggttgctaaacccagacagggtccttccagtgcatctgcccctgtcaggctctgtctcgagactggggatcttccaggctggcttcattctggaccagagagcagaggagaaggagaaagaatataaacccacccctatgagccagggaaccacccaagctgtaaggattttgtgcaagctgctggaactcgggttggaaaagccacccggcaagcagctgaaaggaaggatgcttctccctgcgtgggcgcacgcctgcttcctaagagatgatcctttgggtgggctgatcatgcctcctcctctggggagggagtcctgcgaaagcacgcacctcaaaaggagtaaaggccctatggtgtccccaaagcgacccctgtcgcgttctttctgcgggtggcctccctgcattactgattactcggagcggctgagctgacgtcagcattctgggagcgccaatgacctttggggtcatcacatcctcagaaactagagcaggaggggaagcgacccccaagccagcactccccctactttccaccagggagccgaggtcgcgccatcctggggcgcatctgggggtgggggacacaccagccccctcccccaacccctctagggccctcggcagcaggcggtactggatgcccacccggggctctaaaggacctgggccgcaccgggaaccctcgcccgggtcttcgagccctccccttctcccaattctttccgcagtctcaggagccccacgtttcccgcggcgtggggacacgcacttaccgcggatccactgcgcaaaccttgatgaacctgaaaaaagcagggtggggtggggtggggtgagggtgggggtggctagaccctgctcgcacccagcgccacgcaccgctctctgggcgggttcgagtgcgcgcgccgggcggggcgggacccgggggctgcggtgtttcgagaagcacgtgctacttcgcgcgcagcgcccccggagactgtgggcttcctcgctgcctggtctacggcagggcgggcgcgggggcgtgtttcaaagggtagggcacacagtgagacgccgggaggcgggatggatccgaaaccagctcgcagcgagtcccaagcggctgcggccgccgcaggggtctgggcgcggcgacgagggcggcgtggggcgacggggagcgggacggtggcgctgcacgccgcgcacttcctgttcaacacgcgccgcctcccaccacccgcgctccccgagcttgcgtcggtgccaggcccggcccctcactgtccccttgcggtcccctggggccgcggcgcggcggggggcgaggagcgggcgccctgcccttcttggcccgctggactccgggcgccccctccggcgcgcagggccgcgagcgccgccgccagaacttctgccagcggccgcccgtagcctaattgcgcagagggctcgccttgcacctcctcttcccccgccgccctccctctcgcccagaaaggaggacggacccagctgcaggctccgagctggtttattctgcggccgaggattacatttatgcacgaacgggcttactggttccagattccccacttgggcacaggcataggaggcttgttttccaaattgctggttttaattgcacctgcctttcagattacctctgggaatctgtgggaggagccgagagggtggaaaatgtttcttagctttgcaaaaggaa

SEQ ID NO: 39700 - DNA, 2300 bp, Homo sapien
ttactttattacaccaagcaaactgtgtaatggttgcaaaactcccacaataaaatctttgtccaaaagttgtgttgactcactttttttccctcgtgttttgaggatacgacatacatacagtgaagtatatacactttcagtgaccagcccaatgcacgtttgtacaagtaggctccgtgaagccttcactcccccagatcaagaagacccagaacattccagcactccaaaaggctctctcttgctccctctcagtaaccagcaatcctgttctggctcccaaacacagctacttgttactgatagatagataaactgttctatcactttagagtagctttgccttttcttgctcccttccacatgctgtaggaatttgggttgtgacctcagcaagccctcgttctgcagaaacttcacagaaatagaatcgcgctctcccatgagctgcttcggtctcacgccatgtctgcgagatgcatccatgttgtatgcagctgcagtctggtctttttcactgctggtttgcattgcattatatgaatatgccacagtgggtccattctactacagatggacatttgggttttttccagtttgaggctaatatgaataaaagcttacttttatattattaatgggcaagaaggaccttcccatcgagcctgcagaaaggagactcatgagtttggcttggacgtcattaatgcccgtccgtctgccccaggaggtcattatagcccattatgttgttaccgagcaaaagaggtcactgacccgtgcgctagaagccaataaatactaagacactgggtttcagagaaaagaaaagcttttcattgcaaattgaccaacacggagacaggagtccagctcaaatctgtctcgctgtgctgcctttaaggaaataattttattagaaaagggttagagggtgggttccgggattagcaggagatcggtggaaggaaagaggaggtctggcaagtcctcagacatgcgcagttatctcttcatgcttcctcatgggtgctgtgtgcaaatcaaattccggggcagttaatacgaaacatgcgtggaaattcaggctgtgatatcagcaagctctttctgcagaaactccagttggccatattgggtccaactgatttctgccagttttgttatcacttgtcacagtttcagtatctaccccaggaggtcacgattgcccattgtgtctgtcccaggagaggttgcgagaggttcccacccacccccttccactcacagaccctgaagcagagcttgtctggtttcaggcaaaacagagtcagcatcctgaagcggggagggtcaagtctcctgggatgcgttcagaagaaatttcacaagcatttggctgaacttgtgtactgacatctaaatgttgagtaacgtagagtaaagaattaaaaggcaatcaaataaccctttggctcatctttaagtttcttcatgttttctgaaagcttgttctttttcttaagtttatttcaaaaatgctaaaaattagccgggcgcggtggctcacgcctgtaatcccagcactttgggaggccgagtcgggccgatcacgaggtccggagatggagaccatcctggctaacacggtgaaaccccatctctattaaaaatacaaaaaattagccgggcgtggtggtgggcgcctgtagtcccagctactccggaggctgagacaggagaatggcgtgaacccgggaggcggagcttgcagtgagcggagatcgcagagattgcagagattgcaccactgcactccatcctgggggacagagcgagactccatctcaaaaataaataaataaataaataaataaataaataaataaataaataaataaatataaaaagctaaaaattaggccttgcctagagaagagagtcaccctggattctagcctcacctaatatgaggctttccctattttctcagctgaggggtaaggacccttaggaccttggaactcctggattccacctgctggttggagcttacaggcaggggcccctgtggggctgtgacgccctgtgtgatgtcatcaggctttgtgagggggactgtactgccctttgagtactactgtgtggccccgcaacccagcacaaccaggtatctgcttggaacccagccaccataaagcctgctagctaaaaaaaattttacatctctcagttcattcggcacagacccctgcctcattcagctgtgactctgcttggaaaattcatcagttacaaagcagccaatgcaatta

SEQ ID NO: 39701 - DNA, 2300 bp, Homo sapien
aaccagaatgatacgctgaaaagagcattttagtgtcattctgtatgatagtgaaaaattggagctaacccaaatcctcaattacgagaataatggttaagtaattattgcacattaatcaggtagaatagtatttaaagtaataaacagatgcatctcatactcatcaggttggcaaatatttaaatatctgatactatcaagggtcaggagaagatgaaacaatggaaatttacatgccctgattaatcctagagcatgatttcaaatgttaatttgtgtataaatcacctggaaatcttggtaaaaatgcagattttaattaagtaggtggagcacaagactccccatttctaacacactccaggtgacgttggtgtcgcttgttgctggaccaccatttgagtagtgaggccctaaaggtctggtcttcaaactcttttgcttgagtatatactaaaataataaggtttaaatacaagaacttagtatccccttatacatatttaaggtgatatttaacatttttcattactagtttaggtagttggaaggattactttctggaaacatatttatgtatttaaataaacttgtaatacacttttaaatatacctagtagactttgccctagtttgcctgccactgctgtgaatagtttctgagggggatcccagcaggattgatccccaatgacgcttatttgatattatactatgtatattttacatgagctgcaaccattgaaggaaactgggcaaagatacctgtgtgctgtctgcactgcccttgcaagagaaaccagtacctgaaatatctgtcaatctccaatcaagacacaagcatggtagaaggagtcaaaagcattcaacttggcacccagcagcagttctctttggctgagggaagtggccacaagactcagctgggggccatcagcggcctacacacccaacaactggagaaatgagtcctcagtccttaaggggaaacctgggtggtacaacatggcatcccctacaccctgacaaccccatggggtatctgtggaagaggggctggggaatgtggttagctcagttcagctcaagaaggccactactttggttcaggtggtgctctttaatttatagtagctgtagaagttcctccattgctacgcgtgtaccccatcagactttaattgtgaagcaatgagttctttaaaaaagttcaaaaatattcttaaccaagtgggatttatttcagaaatgcaaagaagattagtattaagatattcttcaatataacttggcattattggccaaagatgaatgcccacaccatttttcttaaaaattgccaattccccttttatggtatttgtatacattgcactattatcaccaaggtatgagtgtttttttcaccacttctctctttacaccttaatctacattttcttctatcacaagtggcgtttaacttcttttaatatgtttaagggcatttgtctttttttttttttttcacttatggggtctcgctgtattgcccaggctggagggcagtggctattcacaggcgcgatcccgctaccgatcagcacaggagttttgccctgcccggtttccgagctgggccagttccccactccttggggaacctggtggtccctgctcccgggaggtcaccacaccgatgcggaacacagatgcgtgtcgccgcgcaatgggcacagcgcatacagcgcagagctcccgggctcaagcgctgctcccgcctcagcctccggagtagccggggccacaggcagggcatttgtcattaatggggtcttttgagaccgcgggtgacagacaacaggagccaggccacgcgcggcgcctctgcgcgaacgctagggaggactcagcgcgcggcggccggtgacgtcagggcagcgagaggtttcgtcaccgcggcgcgggggcggggccgcctgtcacgcggcgccggcggacgcgcggcgctgggcggaggcagcggctcggggactgggcgagggccctgggcctgaggaggcgcggccgccactgcgcccagcgcctgcgcgacgcctggctgctgggccccggggcagttcagcccgcgccgctcctgcgggtcggactggggctgtggcgggagagaagatgccgcagcccgagtcccagaaggcggcgatcctgggctgcgggcaaggcggtgagtaccctctaggcggcggcctcccggcgtccctcagcacctcgagagctgcggcggcggcggcgcgcggggcctgggcaggctgggggcg

SEQ ID NO: 39702 - DNA, 2300 bp, Homo sapien
tgtcccagctactcaggaggctgaggcagaagaattgcttcaacctgggaggtggaggttgcagtgagccaagattgtgccacttccagcctaggtgacagagtgagactccgtctcaaaaaaaaaaaaaaaaaagaaaaaagaaattctaatgtgtagaaagcaaaagttcctcttcaaagcttcccctttaaatcataaatgttattgatatcttttctcagaactaactttcttcaagtttcttattttatagtaataactctctgttaagccttatgtagcaaatgtgacagaataagcatactctgacttcagtatctgtgttaaacatgctcacaggcacataatacattttgtgtccttgttccttagtcaaattattcgtgctgaatgtgcccaggcatgtcccagcttgcagcctcctcccttatttgggaatattattactttgtaaatcctttcgtaagtaacttccttttttcctttgttcctcactgcctttacctgtttagaaaagttttgaactgttagccaatcgggttttagtttagattgtgaggtctggctccagccaatggagtcagaacacagcaatagggacctcatgcgtaaaggataaatattctagtgtcttttttactttgtgtgtgcttgtggcaggattgctgacgggcaccaccctttctgcagagagtaaacatcgccttgctaaggaaactttttgtctgattgctgattcttctctgcgacatcggggaataagcatttatttccaacatagtgtttactctagagtttacaatatacattttattttatttttcaattggcatataattgtgtatatttatggggtacatagtgatgtttctatatacgtaacgtatcagtgatcagatcagagtaattagcatatccatcatctcatacatttatcatttctttgtgttgggaacattcaatattctccttatagctatttgaaactctacaatatgttattgttaactatagtcatcctagagtgctatagaccagtagaacttattcctcctatctagctataattttgtaacctttaacaaatctcttcctatctcctcccttcgcccacccttcccagcctctagtatcctctgttctgatttttctgtgagatcaactgtttttcagcttccacatatgaatgagaacatgtggtgtttaactttctgttcctggcttatttcacttaatatcctccagttccatccatgttgctgtgagtgacaggattccactcaaattatggctgaatagtatttcattgtgtttatattccacattttctttatctgtttatctgttggacacccagattcattccgtatcttggctattgtgaataatgctgcagttaacatggggatgtagatgtctcttcgatataccaatttcctttcctttggataaatgcccagtagtgggattgctggttcatatggtatgctatttgtagattttgaggagcctctatactgttttccatagtggctgtactagttgatattctcacccgcagagtgtaagagttcatttttctctgcatcctccccagcatttgttggttttgttttatttgtctttttggtaatagccactctaactgggatgagatgatacctcattgtgcttctgatttgctgttccttgatgatttgtgataagtgaacattttgtcatatatttcttggccatttgtcttcttttgagagatggctattcagatcatttgcccatttttaaatctgatttttttttcctgctgagatgttttagtttctggtttattctgggtattaatccccttttggatgaatagtttgcttatattttctcccattctataggttgtcttttcactctgctgattgtttcctttgctgtatagaagttttttagtgtgacataatcccatgtgtttgtttttgcttttgttgcctgggcttttgaagttgtattcataaaatattttcccagattaacgtcctgaggcatttcccctgttttctttcagtagttttatagtttcaggtcttacatttaggtctttaatccattttgagttgattttcacatagaggtgggaggctagtttcattcctctgcatatgaatatccagttttcccagtatcatctattgaagatactgtcctttccccagtgagtattcttggcatctttgtcaataatcagttggctgtagatattgtggattgatttctgggttctctattctgttccattgctctgtata

SEQ ID NO: 39703 - DNA, 2300 bp, Homo sapien
tgcagagagtaaacatcgccttgctaaggaaactttttgtctgattgctgattcttctctgcgacatcggggaataagcatttatttccaacatagtgtttactctagagtttacaatatacattttattttatttttcaattggcatataattgtgtatatttatggggtacatagtgatgtttctatatacgtaacgtatcagtgatcagatcagagtaattagcatatccatcatctcatacatttatcatttctttgtgttgggaacattcaatattctccttatagctatttgaaactctacaatatgttattgttaactatagtcatcctagagtgctatagaccagtagaacttattcctcctatctagctataattttgtaacctttaacaaatctcttcctatctcctcccttcgcccacccttcccagcctctagtatcctctgttctgatttttctgtgagatcaactgtttttcagcttccacatatgaatgagaacatgtggtgtttaactttctgttcctggcttatttcacttaatatcctccagttccatccatgttgctgtgagtgacaggattccactcaaattatggctgaatagtatttcattgtgtttatattccacattttctttatctgtttatctgttggacacccagattcattccgtatcttggctattgtgaataatgctgcagttaacatggggatgtagatgtctcttcgatataccaatttcctttcctttggataaatgcccagtagtgggattgctggttcatatggtatgctatttgtagattttgaggagcctctatactgttttccatagtggctgtactagttgatattctcacccgcagagtgtaagagttcatttttctctgcatcctccccagcatttgttggttttgttttatttgtctttttggtaatagccactctaactgggatgagatgatacctcattgtgcttctgatttgctgttccttgatgatttgtgataagtgaacattttgtcatatatttcttggccatttgtcttcttttgagagatggctattcagatcatttgcccatttttaaatctgatttttttttcctgctgagatgttttagtttctggtttattctgggtattaatccccttttggatgaatagtttgcttatattttctcccattctataggttgtcttttcactctgctgattgtttcctttgctgtatagaagttttttagtgtgacataatcccatgtgtttgtttttgcttttgttgcctgggcttttgaagttgtattcataaaatattttcccagattaacgtcctgaggcatttcccctgttttctttcagtagttttatagtttcaggtcttacatttaggtctttaatccattttgagttgattttcacatagaggtgggaggctagtttcattcctctgcatatgaatatccagttttcccagtatcatctattgaagatactgtcctttccccagtgagtattcttggcatctttgtcaataatcagttggctgtagatattgtggattgatttctgggttctctattctgttccattgctctgtatatcagtttttatgccagtaccatgttgtttccatcactacagctttgaggtatattttgaagtctgggagcatgacgcttccagctttataacttttttttcctctttgagttgtaagccacttttagtatatttggaaccctgtgggtgtggtggtgaagtgtgagggagggtgggagttctggaatctggttaaatctcagtctgacagtgggtctgggtctcacataggttcactcttacagtgggctgtgatcttcacaagtatttctctagcgttagagctcttctcccctgttatctattcctgccctatttccttgaggccctgacctttgcggatttttttgccctgtaggtatgacaggaaggctggagggggctggagtgggaggaatgccctttgcattcccctagttaggagaaggatctagcaaagtttttttcccctggagcaaatgactttgtggcagagaaaactctgggcttattactcttcccctcccctgccagagggatctctctgggatcttttaccttagtgcctggtggagttcctggaggtaaagcccacagaagtgtgggtctcgcacctcctgagactgcttccccgagtttctcactctcactagtccacaccgagcatccagcaccagcttatggctctggcagtttctgctccaggtaag

SEQ ID NO: 39704 - DNA, 2300 bp, Homo sapien
tgcttcatgagatcatccttgtggatgatgatagtgactttggtaaggaatgctgcacctggtaacattggatccaggctgtcagtcactacagcactgacaaacactaacacagctgaactttcaagtacgtggtaggtggggatcctacacgtgcagtcacagctgggctgaccacaaataagtctgaagaaatccattatctttgtaacctgcttataaactatgctacccaaatttgggccgtgaaattttttccgtggcttactttaaaaaacacacctctttttatttgaaataactgtaggttcacaggaagttacaaagacggcctatgtacctttatccagttgctccatcataaaattcccctgtcagaaccaggaatccacattggtacagtgtgtgtggtccagggtcattctgtcacacaggtggactcccacaaccctcactgcaatgatacagaactgtttcctcacccggagggcccttgtgctgcctctttctagtcacacctcctgctttcctctactcttccccagtccctgaaaccacgactctatgattttgtttccatctctgattttgttatttcaagaatgtcatataaatggaatcacacggtatgtgaccttttgagatgggcttttttcatttggcatgatgccttggcttatgcttctctattaagtctcttacactgatcgtccccagataaaagtggattgcattctgatagctcctcaatgatctctgaatgccagtattttatgattcactacatattctatattctgtacgcctttcttaattcaacatagactcttgctaagaatggctttgtgtacccaaacaggatagaaggctttttattacactgctcattcagctctcagtgaccttgcaagaaaggctggaagcccattttatagagggagaaatataaaaagtaatttgctcagaccccatagctgttaagtagtagagtggaaatgagacctctggtctgcatagctccaagccttctgctcttttcatgacagcaggctgcaggaacacagtggtacaggtgtatgccagtgactttttcatgcactcgagcgtttattaagtaccacttgtatcaacatcagagttggtataccagtatacttaaatatagaaggtaaagaaatggagagagtcatgggagcaaaattctcaaaccttggccaaaaacaaacaaacaaaaaacctaataaataaatctgagtctggaccacgtagaagattggttacatactgatttctagaatttatggttggtttttgtttttttttaagtcaacttgtattttggttttcactttgtggctattttacctaaaaggaaaaattcataatttgaggtggtttgtatattaactatggaaagaattactgcttattatcttacacgatctttcaagttattctgaaatatacaggtgaatgacatagaattccttaaaaaatatttagcaaccttggaagaaagatgctaaattaataaaaggacatattcaatgctgttcttgttattcttggtaggggcaatagaagttgtttcttaactattttgaaatggactaagacttaataaattcctttgtaataaaaggcatttatatctcattttctttgttatcaatgtgatttatatatggtcagctgaacatttatgcactcaaaatactcatttcaaacattctttgtgcaaagcattgtgctcgatgctatggagatacaaataagtctgtaactaaagtaagtattcctctttgctagtattccagctcttacccttcatttctttttcttcctacaggataagctacaatactcttttaaagtaaaatattctgtagtatttgcttgatagtttgttgtaaattttagcaagtactagatacaactttagaatagctgtaaagtgtctttatatatgtctcatacagtttgaataattgtgggactttattttcagatgatttgaaaggagaactagatgaatatgtccaaaaatacctccctggaaaaattaaagtcataagaaatacaaagcgtgaggggttgattcgagggagaatgattggcgcggcccacgcgacaggtatcacttctcgttagctttgctctacaggtgttggatgacaagggctcgagcctcagcgcctgtcctgattctgcaaagtctatgaagagtagtgtttcaaacggacattgccagcaggagagatgaggcttgttctgtttgggaaagacctgttcataacgcc

SEQ ID NO: 39705 - DNA, 2300 bp, Homo sapien
attttagcaagtactagatacaactttagaatagctgtaaagtgtctttatatatgtctcatacagtttgaataattgtgggactttattttcagatgatttgaaaggagaactagatgaatatgtccaaaaatacctccctggaaaaattaaagtcataagaaatacaaagcgtgaggggttgattcgagggagaatgattggcgcggcccacgcgacaggtatcacttctcgttagctttgctctacaggtgttggatgacaagggctcgagcctcagcgcctgtcctgattctgcaaagtctatgaagagtagtgtttcaaacggacattgccagcaggagagatgaggcttgttctgtttgggaaagacctgttcataacgccaagcctgccatcccaaagcacatagtgcagggggctgaactctcaaatcctcagtgtctattttcatagcaacccttctttgatacttactgcccctcaaatatattttatatcttattcacttatataagcagaaaagcccagaccaaaatgtaactgaatttttatgtttttaaatacaaaatttaaaatgtatgaacccaaactgtcgattggaactatgcttttaactcttagtgcggagtgcatccctctggagccacacatcatgactttaattggttaatggacgtaagattgacttacaaaactataaatggcattttctttaaaattccctcttaatccttctgattccatcaaggagcaagtctccgttgttactagtatatttccatcatacactgctctccccctttaaaaagaaataaccgatctcaaattcagtcttctgcagaaaatatatctggttagtcttcagttacgttatattgattctgttgtatttcgttttatggttacctatgtgtaattggtctccctgagtttcatttatgactgtaattaaaacatttttaaataaatgtaattaaaactaatgaatctgtttaaaaatgttaggcatgtgatattgcaggtagggcatggacatggcgaaaaaattttgaaaatcatttgagaatgatggaacttggtggggatattccctagcagtgacagcatctactgcagtccttcctatattccacgctctcctagataacctgcctctgggtttgtggtggtcggcactgctcaccaccactccccctgtggagccactggctcgtgtgctgggctgagttggaacttcacttttagtatctgtcttctcttatttctctgaagcccacagtgacctgaagcaattaacaaaaaaaaaagagaagcagctcctctacatcctatctgcagtggatgcagactgaattcaaggcttgtgagactttttttctaggtttctagtcatgtaaaaacttactgaattggctgtgtggagttatttaaggcaaagcaataaagtgaaaatcctggggtattttcaatattaagccactcaaaacattgtactgttacaatgcaagtttactgtgaactgacttttttttagatagcaatagctatttaggtttttttcccttatgatctcttcaggtcctcattgagatatagtttaggatctgtccgaagcaagccagtttgcatggaagtcattgtttcaggttcactgtgaccagatgtggtcttcctttaaattggtgttaattggaaaaagtaacacttttagaattaagaaaagctctgaatccattttctcctcgaagcaattgtgattggtctcacctcacccccactgatgtgcatgtggaaggttctgcctttctgcattaagtgacagcggagagctgcctacatcccccacccttcaggctgtttacagacactgagctgtgggactgattcacgggcatcattgaaaactgtctgagatactgcttttatcactagttgaagttggatagataacatttggtgctttaagtagttcatgtaaaatcttcatacatttcacgagtgcacttttagaaaaacaataatgtgacctgatgatgtcattctgagtttctcaactgctcagaagaaccgtggagctcttaaatttgaaattataaaaaaaaaaaaaacctcagttctgctcacatttatcaagaggagcttaaaatgcagaataaaatgtcgatgatttatatgttgctaactagaagaaaggtgtatcccattggcaggtgagagccactgaagctaagagggtggggggcagtagaaaggaaaggtgggagatggaagaaacagaaatgagcaagaggcgtccc

SEQ ID NO: 39706 - DNA, 2300 bp, Homo sapien
atatgccattgtctgcaggcctcacaccttaaacagcaccagcacctcaaagtcatttcagagcacagtcactggagaactgaacgcaccttatagtaaacagtttgttcactccaagtcatcgcagtaccggaagatgaaaactgaatggaaatccaatgtgtatctggcacggtctcggattcaggtgaagaaatactttgtgtacaggaagtggagagacagggtggagtctagcaatctgaagctattgatgtccagtatgtgaaaatgatttcacatagctgcagggacagaaacgtgttttcaaaatcgtatcaaatcctgtcccttggtaacactagggatttaatatgtagtcttgggacttggtgattggcttccccaaagggaaagcagaccagtggaatccacatctttgcatcttgttgagagctcctgggaggcaggtagcattgtaatttgcacacactggatttgtggagtgctcagtagagctgtttcaagcacttgagagaaatacaaatgaaaatattttccaaaggtacaccaattttggaagttaccttatcttttggaagctaccgtttcatgaaatcagtgcatgttttttggtagactgtggactatcttacaagtaaggccgtgtataggctaagcatttaagtttacacctatagtccatacttcctgagctgcagacccaaatatccaaatgcctgttcagcatttttctccttggatgtctcagaatggaattacaaagctcttactttgtcaaacttgtccagctcctaaaccccgccatcctacaagctccttgctgagtgatgttaccgtttgtgtacattggcctcagtactgccagattaaacctaaagcatcatcgagttctgttttctcctaaaaattctctcagatccactcttaggtttaccagccctatcttgagccacatatcacttgcctgtaccactgcaggcctggctgtctcctcccatccagttccctctcagcagccagcaaagtatctttaccctataaactggatcagcgttcctttgtctatactcattcagattcttgttcctttgttggaacccttttactcctcactagaagtttgtaggatcttctctttattgatatttggacatttcacagaactacacctcagtggaggtctttttgttgattgctttcctcccttgatgagccctttcaacctggagcatcgtgaccttccgtctgagaaatgtgttttgtattcattcttttgcaagttctgcccctctgtttcctctgtgtttgcactaaaacccctgagattcaggatctcacagtgtggacctgagactagaagcagcagtgtcacctgggagcttgttaggatgtgcaggttcgggggccccagcccagcctcactgaatccagctctggaggtggggcctcctggatgattctcatgcatgtcagagagtaatttctgtcttatatcctttctccccttctgttctttgtttccttgtctctctgttctttctgagacttcctctactttatctgctaatctttcttgtctatttttagagattagctacgagccctttctgctcttgatcttgtttgatattttgtttttacattatgagtggagtatctgtgttttctctgctgttgcccctctctgttgagcctctctcggattctgtgggtgaattagtgctttgcctctactccttccagttctagctttcccctgctaagtcaattacttttcattttaaatagtccattcactcttatacccattcgtgttctcgaggagtgtgcttttactgtgattttagtgggtatcttaactgtgttcaacctgtcacctttaacctgaagcatttttgagagctctggtttctgtctctttacttatttcatcctgccaccctcccatctgtccacctccctggggatcccgtggatgatctaatatgtatcctgtttttctgtgctaatatcttagaactatatacacttttatgtacatatataaaaatggaatcatgttatatttatttttctccgtcttccttttctctgtaataatcagaggtccctctcgatcaactgacgtagcttcatttcattcttttgaatggttacctgatgttccatagtgttgatgaactgcagttaaaccattgcattactgatgagtgtgtatttgatttataatttttctcataacaaacagtgttgctatatcttgtacaaatatcacaatgaattaatagtttcactcc

SEQ ID NO: 39707 - DNA, 2300 bp, Homo sapien
ctctttcaacttagttatttgacagaagtgggcagagttatgttttaaaagttcagtaaacagaacactaatattaaaatctttaattttaccagtttaatttttttttgagatggagtctcattctggtcccacaggctgaagggcattggcacctcttggctcactgcagactctgcctcccaattcaagcaattctcctgccttagcctcctgagtagctgggattacaggtgcgtgccaccacgcccagctaatttttgtagtttagtagagatggggtttcaccatgttggccaggctggtctcaaactcctgacctcgtgatccgcccacctcagcctctcaaagtgctgggattacaggtgtgagccactgcgcccggccgtaaatatcttaatattttaaaatcatttttattgatgttaccccaataggaaaacctgtttaaagataaaatttaagactatttgtgcattttaagagaaaacactttgctcacagtatggtgaaagaggtctgctttacttgattttatgtaatttgagtgtgtccaactaatggttgatacaaatgatatgtttataatcatgttttgaaggaagcttttcctgtacagtaatactgccagtcattcctccatccaggttattgctctggtatgtctttcacagaagaacattctgaagacttatttttaacaggtagttgtttgtagtatgcctgtaataaaatctaggctagatgacaaataaatttagatcttaaaatacatcagcctaaatgcaagaaggattttttttttcaccagatagtttaagttggtgtgcagtccctgcctgatttggtataaggcatgtcttttttcagataccttgtcaggattggggcatgtgaaaagagggcagcctgtgggttggtgtttattagtttatgatactctgtaccataaagtaaataagctattggagatttcccctcagctcaactgtttcagcagccggatcagagctgagaagcctcagagaaaagttagtatgattcatttgttgacaggggctccttccctttctgtaacatttacaccaattgattaaggctgagattaacagatgtgaattttagagtggagataagctctcaagaaacgatgctgcagcgttcttatttggttaaacaaaaaacactgttccattgtacaaattatattagctcttctgacagcattgtgagtgtgtgtgtgttttttctttttctggttttaatatagttagaaaggggattgtcccagaaagtgtaagagcagaatattctccagaattatggctttgtggaaaaggcctcgaaaggacgcggcacagctgccatcacccgctctctatccctgtgcaccttagagcatggtcagcttctgcggtgcatgagcccccagcacttactgctgactctccctctgcccctcaggtcacccatcctcttcagtcatactgctcagcttcttgtcttaacaagaattgctttccgggcttgtgaattatttttctttgtcatggtttctttatgttgcccaggaatccattccttcattgccacaatcacctatgagagaaacgccttccaaagcatttcatcagtacagcaacaacatctccactttggatgtgcactgtctcccccagctcccagagaaagcttctccccctgcctcaccacccatcgccttccctcctgcttttgaagcagcccaagtcgaggccaagccagatgagctgaaggtgacagtcaagctgaagcctcggctaagagctgtccatggtgggtttgaagattgcaggccgctcaataaaaaatggagaggaatgaaatggaagaagtggagcattcatattgtaatccctaaggggacatttaaaccaccttgtgaggatgaaatagatgaatttctaaagaaattgggcacttcccttaaacctgatcctgtgcccaaagactatcggaaatgttgcttttgtcatgaagaaggtgatggattgacagatggaccagcaaggctactcaaccttgacttggatctgtgggtccacttgaactgcgctctgtggtccacggaggtctatgagactcaggctggtgccttaataaatgtggagctagctctgaggagaggcctacaaatgaaatgtgtcttctgtcacaagacgggtgccactagtggatgccacagatttcgatgcaccaacatttatcacttcacttgcgccattaaagcacaatgcatgttttttaaggacaaaactatg

SEQ ID NO: 39708 - DNA, 2300 bp, Homo sapien
gtatagtagttcagagatagtaataagaattcagaattaggttgccaccactaaattcactctactttttataaaaaaacctttaaaagatatcttaggaaattaaagggttttttcttccatttctttttttctttctttcttttaaagttttttcccccctttaactgaaatgtggaataaacatatttgtaaattttacttattttaggatggcagtataacacatcagatttctaggcctaatcctccaaattttggtccaggctttgtcagtaagtataaatctaataagttaatgttttctggggattgcttgtctgcactctatgtgtgctgttctaaacctgaagtgagtgtaggtacaccagttcaagcccaggtgccctcctgtcttattaaacatcactgccctattaggcaactcttcttcaaggcgtgtgttttcattgcttttttcactgtgcatgaagaattatagttacagaaaagtattttaatacagaaaaaccatcttccccattctcttcaatattgttgctgtttttgtatacagattgggcactttacagtctatagaactaaaccacgttttgctctaagaactgtcttcctaagtgacaaggacactaaatgggaaaaacaaagggattatacttagcagtaagttgggttagcagcatggtgtaaaggtcaggtatgcaaggtgcccctgaatcctttctagttatttgcaggggtcccaaggtggttcaggatagtgtttaaagttctccccaaactgaacctttctgaaatcttcagactgtttagctaacttttttttcaccattatttttcattttgctcacctctgctctcctggttccagaaaccagaaaggctttccttgcggtaggtctcattctaccagaagcagaacttctgaaatcttgtgaaaaagcctgttcttaaaaaatgcccttcaaatttagtagactagatttcaagttcatacatgtactggaacttctgggtttaggaacaaacccaaagtctgaccttttgaaattccccctacattaattgttactataatttgaatacatatttgcattaaaaacaagtaaagaactataccaactggctttttctggctttattgtgcccattggctttggttggattcttaatgtatgacaatattctgttatcattgatgttattttcagcgaatgtccttcttagaaatgtatttattcatttctttgtcttgtagtgagtcaaaaaggtatattcagaatttcactacatacgatgactttttttttttccccttggactgggtatcaatgaagtaaagtgcccttaaagaataaagaagagaatattggtacaaaatgaagagatatagccatttggggagaattactggcagttgtaaaagtagaaaatgttttgcttggttaactattccctccccttattttaaaaaatataactacagaataataattaccaatgttttcaacttatggatttcctttataagtcatagactttaaattattccattctaaaacattctgggttccttttctctctgtttaggatattttttcattattaagaaataggaaagaacttataaactcaggaaaattaacatgggaagtgatttcctagtctatgcgctagaccttaatgggatatgtctttgtctcttcaaaatctgtaaaatcgtattcataaaatgcatgtataccttagtatgtagtttggcttgtgggttagagaatttgtttagtaaaaaaaaagaatttcattacataagtctgcttttccaagattggatttgtaatatttataagtgctaagttaaccagtatctcaagaatgtgcattctctggctttctcaattaaatatttttctaaaatctgatattttatcattacataatcgtctaatatttagtattgtgttttcaaatttcctattatgtggtcatggtgaaactacttccttacaaaatagatttgtgtaacttataatgttggactctttagaaaattaacacaactgaattttaatttttcctcagatgattcacagcgtaagcagtatgaagagtggctccaggagacccaacagctgcttcaaatgcagcagaagtatcttgaagaacaaattggtgctcacagaaaatctaagaaggccctttcagctaaacaacgtactgccaagaaagctgggcgtgaatttccagaggaagatgcagaacaactcaagcatgttactgaacagcaaagcatggttcag

SEQ ID NO: 39709 - DNA, 2300 bp, Homo sapien
tttatgcctcttgctatgctttgtattctgtgtaagttgcctgtaatcctgtctagaaggaagtacaatataaaatagtccaacaatttatacatttacttaatctttatagatgaggcctacttgtccttttctctaagtttattctatcccatcatcaaacctgtgcctttgtagtctcatgtactgaggcctgtaagtccctcaataggtatgaagacctatcttcattcaaacatcatccccgaatcagcttcctccatcgaacctccctaaatatagataaaagaaactcttcctgaaaaagtccagtagtattgttcttatctctgaacaattgatttcatctgcttggttgttcttcctttgtcttcatttttgttatctgttaaatcttaagcctttagagctcagatatggtgttcattataggattcttagcaaaatcttacttgcatatgaatactgtaaatactttttaatggtgatagctttgcttttgtaagtcatagtatttggcaacattttgtatgtacagtttaattgaagacttttctttttttcaacttaactctaaatttaacataatacctatttgctttttttttttttttttttttttttttaaaagatttggatttccaggaggtagtcatggtaccatgccgagtcaagagcgcttccttgtgcctcctcagcaaatacagggatctggagtttctccacagctaagaagatcagtatctgtagatatgcctaggcctttaaataactcacaaatgaataatccagttggacttcctcagcatttttcaccacagagcttgccagttcagcagcacaacatactgggccaagcatatattgaactgagacatagggctcctgacggaaggcaacggctgcctttcagtgctccacctggcagcgttgtagaggcatcttctaatctgagacatggaaacttcattccccggccagactttccgggccctagacacacagaccccatgcgacgacctccccagggtctacctaatcagctacctgtgcacccagatttggaacaagtgccaccatctcaacaagagcaaggtcattctgtccattcatcttctatggtcatgaggactctgaaccatccactaggtggtgaattttcagaagctcctttgtcaacatctgtaccgtctgaaacaacgtctgataatttacagataaccacccagccttctgatggtctagaggaaaaacttgattctgatgacccttctgtgaaggaactggatgttaaagaccttgagggggttgaagtcaaagacttagatgatgaagatcttgaaaacttaaatttagatacagaggatggcaaggtagttgaattggatactttagataatttggaaactaatgatcccaacctggatgacctcttaaggtcaggagagtttgatatcattgcatatacagatccagaacttgacatgggagataagaaaagcatgtttaatgaggaactagaccttccaattgatgataagttagataatcagtgtgtatctgttgaaccaaaaaaaaaggaacaagaaaacaaaactctggttctctctgataaacattcaccacagaaaaaatccactgttaccaatgaggtaaaaacggaagtactgtctccaaattctaaggtggaatccaaatgtgaaactgaaaaaaatgatgagaataaagataatgttgacactccttgctcacaggcttctgctcactcagacctaaatgatggagaaaagacttctttgcatccttgtgatccagatctatttgagaaaagaaccaatcgagaaactgctggccccagtgcaaatgtcattcaggcatccactcaactacctgctcaagatgtaataaactcttgtggcataactggatcaactccagttctctcaagtttacttgctaatgagaaatctgataattcagacattaggccatcggggtctccaccaccaccaactctgccggcctccccatccaatcatgtgtcaagtttgcctcctttcatagcaccgcctggccgtgttttggataatgccatgaattctaatgtgacagtagtctctagggtaaaccatgttttttctcagggtgtgcaggtaaacccagggctcattccaggtcaatcaacagttaaccacagtctggggacaggaaaacctgcaactcaaactgggcctcaaacaagtcagtctggtaccagtagcatgtctggaccccaacagctaatgattcctcaaacatta

SEQ ID NO: 39710 - DNA, 2300 bp, Homo sapien
gaaaacattacctttgtttttaagtattaactgtgttagcattaccttgcacccttaatgatgcagtttatcatatgacatcctcaaaatgtagctattctgcgtaggcaaagcctcctacgatgtgatgagacttgtcctctctccaaatttctaccttttaactttacattctaaattaattttaggctgggcgcagtggctcaggcctgtaatcccaatactttgggaggccgaggtgggcggatcacttgaggtcaggagttcgagaccaacctggccaacatggtaaaaccctgcctctagtaaaaatacaaaaattggccggctatggcggcaggcactgcacctgtattcgcggctactcaggaggctgagacaaaaggatcacttgaacccaggaggtggaggttgcagtgagccgaggtcacgccactgcactccagcctgggagacagaacgagactctgtctcaatttaaaaaataataataataaattttagagatttccgaactgaaaggactttccctttaggaactttccatggtgagatagggttgtaagttagtggtgatgaatcataagaatgtttcctttttcaaagtggctaaagtcaaagccaaacctatgccctagttataataaggaaatagttctttaagatatgctttttagttttatgtcttttagtcttatatctctacctccatgttatattcttttagtttccttttcttctaccttagttgtaatttatgcctctttctgcattttatattttgtgtaagttgcctgtaatcttactcttaatttcccttttttcttccaccttgttataatttatgcctcttgctatgctttgtattctgtgtaagttgcctgtaatcctgtctagaaggaagtacaatataaaatagtccaacaatttatacatttacttaatctttatagatgaggcctacttgtccttttctctaagtttattctatcccatcatcaaacctgtgcctttgtagtctcatgtactgaggcctgtaagtccctcaataggtatgaagacctatcttcattcaaacatcatccccgaatcagcttcctccatcgaacctccctaaatatagataaaagaaactcttcctgaaaaagtccagtagtattgttcttatctctgaacaattgatttcatctgcttggttgttcttcctttgtcttcatttttgttatctgttaaatcttaagcctttagagctcagatatggtgttcattataggattcttagcaaaatcttacttgcatatgaatactgtaaatactttttaatggtgatagctttgcttttgtaagtcatagtatttggcaacattttgtatgtacagtttaattgaagacttttctttttttcaacttaactctaaatttaacataatacctatttgctttttttttttttttttttttttttttaaaagatttggatttccaggaggtagtcatggtaccatgccgagtcaagagcgcttccttgtgcctcctcagcaaatacagggatctggagtttctccacagctaagaagatcagtatctgtagatatgcctaggcctttaaataactcacaaatgaataatccagttggacttcctcagcatttttcaccacagagcttgccagttcagcagcacaacatactgggccaagcatatattgaactgagacatagggctcctgacggaaggcaacggctgcctttcagtgctccacctggcagcgttgtagaggcatcttctaatctgagacatggaaacttcattccccggccagactttccgggccctagacacacagaccccatgcgacgacctccccagggtctacctaatcagctacctgtgcacccagatttggaacaagtgccaccatctcaacaagagcaaggtcattctgtccattcatcttctatggtcatgaggactctgaaccatccactaggtggtgaattttcagaagctcctttgtcaacatctgtaccgtctgaaacaacgtctgataatttacagataaccacccagccttctgatggtctagaggaaaaacttgattctgatgacccttctgtgaaggaactggatgttaaagaccttgagggggttgaagtcaaagacttagatgatgaagatcttgaaaacttaaatttagatacagaggatggcaaggtagttgaattggatactttagataatttggaaactaatgatcccaacctggatgacctcttaaggtcaggagagtttgatatcat

SEQ ID NO: 39711 - DNA, 2300 bp, Homo sapien
ctctgagaagcaattgaaggtttgaaatagaatagtgacttgcttgatcacatttgtacttttgaaaagtttctctggctgctgtggggaaaggcttcagtagatgcagggtcggagaagcataaccagcagtagactcttgtagcaggttaggtgagagatggtggtggccacgactgagctgctagtggtggaagtgacaagaagtagaaggattggagacaaaacttgaagataaaaagtcttgaatttgctgatgatttgcattgatgaagtgttgggggagaggactgaaggagcaaaggagagtgacaagggactggatgccatttataaggatggggaagactgggatgaaaccggttaagggagaaattttaaacatggcaaacttaagaggggttttgtgtgagaaaatggaaatgctaagaaggaagttgaaaatcctgctaatttggagatctttgattaaaactagaaataagaatatgggaagcatcaacttccaagatgccctcattgtagataataccatttaggatctaggctcaagccctgggaaactccagggctttggaagtcaaatagaggaagaacacgtacaggagatgaagaaagattagcgaggaaggcagtgaaatatccacaggtggactgctgccaaatccagcagaacagtatgccagatgtcaggagcatgagtaaaatgagaaaagagaaatggcttttgacaacacttccttactaatagtagggaagaagacataggtacagattcaagttgattggaaattatgaaagtgaggtaattgacctgcagtggttgctgctcagtgaaatcagcatagtgattacctgagctaggttagagatttgatgggtaagaaagaacacctaacggtaatcctggagggaaaaaaataaagtgtttgctggagagaatgagttggattgctggacttcaatgtgtgtggattcagtttgtgacttaaaaatgaaaccagtctattgcttgtgtggcttttctcaaaatactgttattccattacctatctcttaccccaagagtagtcacattcttatttctggttattttaattcctggtggtatttttatgtgattaatgagatagtactttttaatttgatgatattctagaaacctggtaagtactatgtaccttgtcttaagttttggttacttaattggtaaaattatagcatgcaccattgaattacctaattcaaaatatattcttttattgtttgacatttgtcttgtttttctttaaaatgttatctttgtggagtaaacatttttctttatgctgtttagcatcttcatcagattagttcagggtattgctgaatgtggttgtttggaagtaaaatgctttagttttagttatatagattttaataagatactactttctatataatttatcaggtactttaggcattttaatttgcaaatttaggacaatttgctttaacgtttcttcacttttgtccattggatgtaatttccataaagtattcatttccctaagtaaaaaccaaaaccaaaccgacaactaatggtcactgaagaaagagtgattaaatgcttagattataatggtatttgcattttaatgttaccagctctctacagtttaacgtgtatgcatttatcgattgcttatgtttctccttgcattctttggcctactggttttggttgtttatagctatagaatatagaattccttatggttatccatttctccttttaagtagagtgatagttgttagaagaaaaataaccccccaatactttcttctagtgttaattcttaaagtgtgattgacttttatttactttttggtgcagtaattgcagttcatgagtcaatgttgatgtcctataaaccttaatttttaatgtttcattgtagtgatgtctcaggcagaataaaatatttaatgtaaattgtagcagcaaacatttaagttatacttaaatgtttaaatcactgttagtgattaacttattttgccttccttgaagcaatttgtcctaaatttccatacgtttgcatttgtttttgctgttctaaaattccttagttgctggctttgaccttttatgttgctgagttttacacatctattttctcaactgccatatcctagggggcttggagtacccataatacagtgagcccaccttcctggtccccagacatttcagaaggtcgggaaatttttaaacccaggcagcttcctggcagtgccatttggagcatcaaagtggt

SEQ ID NO: 39712 - DNA, 2300 bp, Homo sapien
gtgcattcattttaatctttaagactagctgatctatggttcctggtagtttctctttttaagtgagcatccctttcatatcaacctggtagcacagaaagataaagttcccttttattgatattttagattcaaaatttggggtgggtaatgagagccccacaatgtattaaccttacacccagggatacccagggttttaaggctgactagctcacaggcacagaagtagttttggctggcctctggttggccttttacttcataaacaattctaatttggtaaggataggacactctctctattctaaaaacatgaagggccatcattggacttttgatgtggagcaatatattttcacattttcagacaccaagtcacatggcgttgaccgtgctctgtgtttccccacccaccatggcagtctcacattgttgcccaggcttgagtgtagtggcgtgagctccctgcagcctcaaactcctaggctcaagcaattctcctgcctcagcttcccaagtagcagggactacaggtgtgcaccaccatggctaattaaatttttttttttttttttttttttttttttgtagagaaagaggtgttttgccttcttgcccagattggtctcggatccctggcttcatgcgatcctcccatcttggcctcccaaagtgctgggattactggcatcaaccatcacaccaggctggccatgctattgttttagagttgagcagacttactccacaaaaattacttcctgctcctagcatatgtttctttttttgaattttgagttgctgtctttttggttttatctcttccacctatatgttttcctggatatccccattcccttatttaaattttcctggagattttagtgcagattttgtgaggccacatcagacattgaaaacagctttttaaaaggtgtataccctaaggccaggcgcagtggctcacacctgtaatcccagcactttgggaggctgaggcaggcagatcacttgaggtcaggagttgaagatgagcctggccaacatggtgaaaccctgtgtctttagtaaacacaaaaattagctgggtgtggtggcacacacctgtagtcccagctactcaggaggctgaggcaggagagaatcacttgaacccaggaggcagaggttgcagtgagccaagattgcgccactgcactccagcctgggcaacagagtaagagtccatctcaaaaaaaaaaagcatgtaccctaaattagtgtcatgaaaataaaagcttaatgtataatccacaaatgattcatgactttttaaaggtttacatcagaactacaattacaaatgcataacaaactgtttttgtttttatttttcctggtgtttagaattgcagaatatgtatagagtgtggcacacggtctagttctcagtggcaccacaattgcctgatatgtgacaattgttaccaacagcaggataacttatgtcccttctgtgggaagtgttatcatccagaattgcagaaagacatgcttcattgtaatatgtgcaaaaggtaagaagatagttattctattcagttgttttgtcgattgttttattcatgtggtcatttgctctaccatcttacagcttctaagtttttatcactctagcaattccatcagtactgattgctgttatagatggaattaaatgatgtttttgagtctcaaaggcataaggaagtaaatgggcaaaagataagaccagaccacatcagaaatgagcactaatagggaaaagtaaagagaaaatagcttaaaaatgtcaagtaaaaatacggcagcatctctagtgacatgcacaaatgtgctttaaaaaacctttgtcagttagcaactcctctaacctctctcctctcatacttaattaactgttttcatatccagcttttcagcaatgccttctctttacctagataataactcgatgttagaaatttttatttaagtatacttatcactgcaggtgggttcacctagagtgtgacaaaccaacagatcatgaactggatactcagctcaaagaagagtatatctgcatgtattgtaaacacctgggagctgagatggatcgtttacagccaggtgaggaagtggagatagctgagctcactacaggtaaatttgagaatgatttttttttaaattttttgtttttgtaatgttgtgccattgtatcaccaatatattgctttaatcaggaagagaggatcctgtattccagattccatcttgttctcagtttctcaacc

SEQ ID NO: 39713 - DNA, 2300 bp, Homo sapien
gtttatgaaagaattctagggccaataatacagatttaggaatcatggtggcattttatggcatgagagttgatgtgatcacaaagggaaactatgggggattaggaaagaaggaaaaggatgaaatcctaagaaactccagcatttagaaagattgtataggtacaaaagccaacaaaggaggatgagatgaaagtaagggaaaactaaggagaaattaggagagagttgccatgatagaaactaaggaaaggggcgttttaatgtgggagtggctagcaatgcaaatgctacaaagtgcaaaaagccaaagactaaaaagtaacaatcgggtttcctatgggcattggcaacctcactaatgtagcttcagatgagtattaggtgctaagccagccttcatgaagtacgtcagaggtccagccagcgtccacattttgaagcctgtttttgtactgccctcaagcgaggaattatttttacatttttaaaagagtgcaaataaaaacaaaaagtctgactttttgtcagagactgctatggctcacaaagcctaaaatatttactatctggcccttttcaggaaaagtttgcagactccggtacaaataaaagaaatatatttttactctgtttcaagatgcttgactggaaaagaaagaacgtgtgagtcagagagaaattgataggattgaccaaaccttcaaaatggaaaaaaggctgagtgtggtagctcacacctgtaatcccagcactttgggaggttgaggcaggaggattgcttgagctcaggagtttgagaccagcctgggcaatgtggcgaaacaccgtctctactgaaaatataaaaattagatgggcatggtggcacacgcctgtaagcccagctactggggaggctgaggcatgagaatcccttgaacctgggaggcggaggttacagtaagccgagatcgtgccattgcactctagcctaggtgacagagtgaaactctgtctcaaaaaaaaaggaaaaaaaaaaggttcatatactttgtgatacttgttaaatacaggcatatttatatatattatctaaggttggtatgataggcttgactggaaaagaaagaacgtatgagtcagaatagtagataggaatgatcaaaccttcaaaaaatgaaaagattcatatactttgtgatacttgttatatacaggcatattttttatacattatctaagattggtatgattttagaatacattattttccttattttgcagtatgcataagtttaactgtatatttggcagggcagtttatccttatattttctgttttatatggtaaaagaactgttagtacattttcttttaatccacatttagggatggatgatgtccataattatgtggattttaatgcttttacaactagaaattaatatagatgaatatataattagtatattaagtaatgtgtttgtgtatgaatatgtagcttctgtctttaatgttcttccacataaggcattttccagtaattaaaaaaaagcccttatatgatttgaatagtctgtttatgcttaagaagcatcttagtctaattgatattaatgtttcttaattttgtctcttatctgattttgtaatttcaaaatatatttaacattcaaagaaaatgtttatgttacactgcaaagcatttcttaatttgtattttccttgtttggttctttccagtaagcatatattgagcattaattaggtatccagcattatcattggcattaggaatagaaaattaaagaagacctgcttatggtctcaagtagatatagccacaaataattgcaaaactatacgattaaatttaatgtggttacatttagattaaataccctacagtgtttttattggtacctctttctgattagatgacaattcaatgtgaataacttcaaatgtctgaaaggttcatgatgcaaatcctttcaaatgattttactgtatagtcagaaaaaatttaaattcttatacaacaatttcattgtttcactgttaattatagcgaaggaagatgcaaactgtgcagtgtgcgacagcccgggagacctcttagatcagttcttttgtactacttgtggtcagcactatcatggaatgtgcctggatatagcggttactccattaaaacgtgcaggttggcaatgtcctgagtgcaaagtgtgccagaactgcaagtaagttttcatttcaattcaaagctgtgtattgggtttaagagggaccctattactaggtgctaaaggtttgtg

SEQ ID NO: 39714 - DNA, 2300 bp, Homo sapien
cgctcaaaggcaggcgaccctattcccaagccccttacagctaagacttacgagggaagcgacatttacatctgcactctctccgaataagtgctcttggtattctgccttacgaggggacgctggctacgtctccaaaacttaggcaggccgttccccgaagctgggggatcccacaggacttgtgctttcggagcccgggagtgcggtgctgggtgttgggggaggggggaggaagaagtcaaatggcttcctaatatatcatcaaaagaagaaaacacaggtttgggaccaggaaaagttccaggagcaagtcgctgacaaacaaaagctgcactcgcccggccgctttcttctcgcccccagcccgcgccccgagaccacctggcccgggcgttttgacagctccgagagtttcccgagcgccgacggctcggcggttcgcccggagtccgtccggggactacctgggcgcgctccgggcttgttttctcaatgatccagctaggccaagacgcggctacgagaaatttctccaaaagaagagtcgcggagaagacccagtgaaaaggcccgactgaaaagtaaagtgtgcggagccgggcgccggcgggagcccgggcgggcggcgcggagcgggggaggccgggcgcgggcggctaccgaggggcgcggggccggggccgggagccgccaccgcccgcgggcccgccccgcccccaccccgccggggggcgccggggcgcggaggccgcggggcgggcgcccggtgacagctccggcccggcgccgccgctggctcccggcctggctccctcgcactcaacttacttctttctggctctctggaaaggggaagcgccatctttgcgaggccggccccgaggtcttttgtctgcggctgcggggctcggggccggggctccaggctcctcggggggtggtggcggcggctgcggctgctccacgctcttgtcctcctccgacgacatcctagtcaccaggaaagacacatggatcccggtcctcctcctggggggctcccgccgccgcggccgccgccgccgccgctgctgctcgggttcctcctccccggctcagcctctcgcatttcccgcagccccgggagcagcagcaggtaccgggagaggcggcaacatggagcgagcaggacacgcactcacacacatcggcgcgggcgcgcgcacctccgcgcgcaggggccgggcggggggcggcgggcggggcgggcggtgcggggcgggcggggccggcgggtgcgggcgggcggggcagccgggcgggcgggcggcgtgaggggcgccggcccccggggtctccgcccgcggcccctcccccgagccgcccgcggcaggaggagaaaggggcccggcgcggggagggccggccgcggggcccggcgggggcggcgagggggtcgcgcccccggccggccgcccctcccccgcgcgtcaggcccgtcaggcccgggcggcggcggcggcgaagttttgacagctgctccagtggcggcgctgggcgccgggccgcggctcgctcctcacactcgctctctcacacacgctcgctcgctctcccggagcaggggaggaggaagttttgcgggtgtgcttggaccccacacacacgccgcgcgaccgtggccgtcgcgcgaggcccgcgccggggatcccccggggcgacccgcaccacagacctctccaactcgcagccgtcgcgcccacacaccgccgcctcgacggcccccgcccgctcccccacactcggcccctcgcccgccccccgcgcgccgccgctgccactcacgggcctcgctccgcgcatgcgccgctcccgccgcccgcggacgcgccgccgccgctgacctcaccgcccctccccctcccccccgggttccctccccctgtgacgcggcggccgggcccagccgcgactccggctccggctccggctccggctcgggaggtagccaagctgtggacccagagatccgggatcgggatcggggaactgcgggcgagggcgggagggagccgcggacacacgccgaggcggccgcggtcgcccggcgcagcccggcgcgaggagcaaatgtgcgcccgcacggcgagggcagcccgggcttcgctggttctcgccgaggtctttcctcgtagcgcccacactacggggaggaaaaggaatggagtcaacttcgttcgaatccaacgccagttagtttccttattataacgtcattttttttaatccagaaaaggttcataaggatgtaagacgaa

SEQ ID NO: 39715 - DNA, 2300 bp, Homo sapien
tttcagtacggaacacagctaaatatttggatcaataatccagttttgaaagcacactttatttaaagtacaatgtgctgaagaaaatgaaaaaagaaagggtgctttcaaatttgtactgagtaaactttcactagatcacatcatatgtttatcactagtcacatatatgttgtatttctatgtgtaatcgtcaggcacttttaatttctagtttgcatttaccatgccagcctcctcctcaatcccaaatttcctttggttataaatttagtaaatttgaaagagccagcagggattaaaccctgaaggtattcaaatgactatctgacgttattcctcatttcagccatttcaaaaaattatgctttcatttagaataggctctgggaatcaaagtgtgtgtattttgcccaagtagaagacacagtttaaagttaacatcctagctactagaagggaaagcaaacatcgctggaaaaggagcctatttttttttaccttacactaaaactacactgcgaagatcaaaagaaatcaacatgagagtgtgcctcttaacgctaggcccaaagtagatgcttattaaatgatagtttaccccaatccttcacaaatggttgataggtcttactatttccccccattcaaatctagaattttttcactctcataaactaatcgatagtgaatggaaagcacagaatagatcatcgtccaagtgttaggtattagcctgagaaatccagaatcccatatttgtaactgtccttcttgagaaagtgcatttttcaggcggattctagccccatttttctttttaccatttttacatattatgagaggtggcttagaagtacttcgatttttgcctcttcatcacaacacactgaacgttaaaatcaagtggttgggtttttattggcttattttgtctctaaccgttttatttctcgagctgtcatcgttcttttcgtcttacatccttatgaaccttttctggattaaaaaaaatgacgttataataaggaaactaactggcgttggattcgaacgaagttgactccattccttttcctccccgtagtgtgggcgctacgaggaaagacctcggcgagaaccagcgaagcccgggctgccctcgccgtgcgggcgcacatttgctcctcgcgccgggctgcgccgggcgaccgcggccgcctcggcgtgtgtccgcggctccctcccgccctcgcccgcagttccccgatcccgatcccggatctctgggtccacagcttggctacctcccgagccggagccggagccggagccggagtcgcggctgggcccggccgccgcgtcacagggggagggaacccgggggggagggggaggggcggtgaggtcagcggcggcggcgcgtccgcgggcggcgggagcggcgcatgcgcggagcgaggcccgtgagtggcagcggcggcgcgcggggggcgggcgaggggccgagtgtgggggagcgggcgggggccgtcgaggcggcggtgtgtgggcgcgacggctgcgagttggagaggtctgtggtgcgggtcgccccgggggatccccggcgcgggcctcgcgcgacggccacggtcgcgcggcgtgtgtgtggggtccaagcacacccgcaaaacttcctcctcccctgctccgggagagcgagcgagcgtgtgtgagagagcgagtgtgaggagcgagccgcggcccggcgcccagcgccgccactggagcagctgtcaaaacttcgccgccgccgccgcccgggcctgacgggcctgacgcgcgggggaggggcggccggccgggggcgcgaccccctcgccgcccccgccgggccccgcggccggccctccccgcgccgggcccctttctcctcctgccgcgggcggctcgggggaggggccgcgggcggagaccccgggggccggcgcccctcacgccgcccgcccgcccggctgccccgcccgcccgcacccgccggccccgcccgccccgcaccgcccgccccgcccgccgccccccgcccggcccctgcgcgcggaggtgcgcgcgcccgcgccgatgtgtgtgagtgcgtgtcctgctcgctccatgttgccgcctctcccggtacctgctgctgctcccggggctgcgggaaatgcgagaggctgagccggggaggaggaacccgagcagcagcggcggcggcggcggccgcggcggcgggagccccccaggaggaggaccgggatccatgtgtctttcctggtgactaggatgtcgtcggaggaggacaa

SEQ ID NO: 39716 - DNA, 2300 bp, Homo sapien
aaaacatatttttatgaaaaaagctgtatttttctaagaaaaaactgagaaaaatgatgttgttttacatatttgcaaatctttttaatatctggcttaatggaactgggttcttatgcagtctgttatcatatgttggttgggttaaagtatatgaagaacatccatcctctcagagaaagtcacgttgggaaagggaggagtattttaagaccttttcacagaattatagatattcttcttggttactgttaccaaagcttgacaagtagtagttttcctaaaggctaactacaatgtgggatataaaatcttaagaccttggccaggtgcagtagctcacacctgtaattccagcactttgggaggccaaggcaggtggatcacttgagcccaggagttcgagaccagcctgggcaacatagtgagaccctgtctcctaaaaataacaaaaaaaattagctggacatagtggcacgagcctgtagtccagctacttgggaggccgaggtgggaggatcacttgagcctgggaggttgagtctcatcgtgccattgtactccaacctgggtgacgggagtaagaccctgtctaaaaaaaaaaaaaaaaaaaaaaaggtttgtcttacagttggagtgaaatcttttacccaggaatgatttcacaccatgcatcttttggatggttcactgagttatgtgttaggcacagttttccagaggagaaacacaaccaacaaccaataggatacatgtagatatataagaggaaatttattatggaaattggctcacattgttaccagggcagcaagtctggttggggtccacagtccttagttcttgtcttcttggaagaaagaattcagccaagacagaagtagattcaaggcaggactgaagggtttttgaagtaacgttcacttggaagggaccaaatgggcaacttgaaatattgaatgcccctatttcctgatccttcctggtctcctctcatccttctccttggatgggctgctggctaattgcctcatgtgcagtgacttgccagcatctgaaaggggccacgactgccatttggtgtttggagttctgtgcatgctcgtgtagggcaattttcccgtactggtctagtgctcccagagaaaggtcatatactggtcacactccaccattttgctccctactgcacattcctggacatgtttgctcaattcctaggatcttatcaggaagttgttgcccgtaagcccaagatgtttcctgttaggaaattttcccctccctggtgccagctgcaaccagttatcattcctgaagaggccacctggacattccttggggcctgtcttgccccactcacacctgtctgtctacctactctaatagcgtgatgatggaggccaggaaatcccagacacaccatctgcaagctggagaaccagaaagcctgtggtgtaattcagtctgagtctgaagggctgagagccaggagagcccgtggtggaactcccagtccagggctttaaaggctcgagaatggtgtagggttgggggacaggcggcactggggtaagtcccagaatcaggggctccaatatctgagggcaggagaagatgggtgtcccagttcaagaaaagagggattggaggatgcccgtctgcattagtgaggatggatcctttttaatcagtctactgatgatgctcgtgtcctccagaaacaccctcatgacacacccagaaataatgctttaccagctatttgggcatctcttaacttaatctagttgacacatacaattaactatcacagccaccttcaggcttaataagtctctagaagaactcagaactcagtgaaagctgttatgctcatggttatggtttgcaacagcaaaaggatatagattaaaatcagccaagggaagagacacaataggacaaagttcaggaagttccaagtacagagcttccagctgtcctcttccagtggagtcatcaacagtgctaaattctcccagcaacaatgtgtgacaatagaatattggcaagcagggaatctcagctagactctggtgtccgaaggttttattggggctctgccatgtggacatagtcaaccgcctgcatagctgaccttagcttccagcacttccaggttggcctaacactgcatgacccaaagcccccaccataaatcacattgctgtgtggctcaaagttctcttgtaaacagagactatttttggggggggggggcagggggacagggtcttgctctgtggcccaggctggag

SEQ ID NO: 39717 - DNA, 2300 bp, Homo sapien
taattaaaaaaaaaaaaaaaaagatattgccaaattcctttccaaaaagaccgtatgttttcatgcctaccagcagtttgtgagagcgcttcaagtatccttttaaacgagaagtgatgtttccggagcattaaaactgaagtgatttcaaaaccatgttgcactcacacgaacaggtgtgcacttaatggactaaactagttcagctgacatgtcttcttcattaggaacagtgtggagactgaaaaactaatttagcctagagcagctatttaattgtaaagtctcctttctcaaatattgatttactatgtgaggaaatatttactttgtatagaagtgtgtggaattggacgagggggttgacctacacatgtggtttggtatacacatatcctcattacagagggtgtaatgaagatataggtggttcagcaccataggaaagggaaaaaagaaaaaaaaaagacggtagaggtggcctcccaagcatccactcccactcctcttgttaatgattcacaatttgttgttattgttgtcatttactgttctccacacctttccacaaggcctgtgtgctttgaaaaaatatgtctctactccggatagaagtggggcacacagggccaggcgcggtggctcacgcctgtaatcccagcactttgggaggccgaggcaggcagatcacaaggtcaggagttcgagatcagcctggccaatatggtgaaaccccatctctactaaaaatacaaaaattagcctggcgtggtggcacgtgcctgtagtcccagatacttgggaggctgaggcagaagaatcacttgaacccgggaggcagaggttgcagtgagccgagatggtaccactgcactccagcctgggcgagagtgcaatgagactccgtctccaaaaaaaaaaaaaaaaagaaaaaaagaaaagtaagtggggcacacgattcaggcctaagctaaccagaccaacctcattcctgatggttgttaatgtttcagatacgggcccgcagccctacgtagagaagaggccaaggtagaaaacatgaatctgaggtaaaaagaaatgaggtacttgtttgcctcatcaagcctctcaattaaactaaccttgaagcctgtcttacctttggacttctagtgatgtcacccggtaaagcccatttgtttcaggacgtaagagttgggttttctgtgacttggaaccaaaaccattccaatttacaaaatgagcaactttaatattacccatgagaaatacttcattggtatatgctctttcctagcgtttttgaaaactaaactaggtgggtgaaaagtatatctttgcatgaaactttttcattccagaaaacattttgtcatcttgataataatggccaatgctactatatccaaatttttgtctttttttttttttgagacagagtctcgctctgccgctcaggtgtgatggcgcgatctcggctcactgcaacctctgcctccctggttcaagcgattctcctgcctcagcctccctgagtagctgggattacaggcatgcgccaccacacctggctaatttttgtatttttactgtagacggggtttcaccattttggccaggctggtctcgaactcccgacttccagtgatcctcctgcctacctcaaaaagcaacttgataaatccacaggctcggtatattttaaaaattcttttaaatacagtatacttttctctttttttccagaattaaccatgaatcgcacacacagccagaggcttttaacccgagaacggacaaaggggcctgcttgtgcaatacaattatttttaatggttaaacaaattaatacataagaccagctttacctaatataataataacgaaccaaagtttacaacagacaagaaaagcaccagctgtccccgccaccccggagcgatctccaaggggacgcgggagagcgccgcgggggacgcggaagtctgacgtcacaggaactgggggcggggcggggaggcccgcacaccctattgcgcatgctcccgcctccccggccgcggcctggcgcagtgcgcacgcgcgcgggtgggcgggtttgactggccgtagagtctgcgcagttggtgaatggcgttggtggcgggaaagttgagtctctcctgcgccgagccttcggggcgatgtgtagtgccttccatagggctgagtctgggaccgaggtgagagccgccgggttgggagtgagggagatgggaacaaggccgccggtgggcgaggggagccgagggaacccg

SEQ ID NO: 39718 - DNA, 2300 bp, Homo sapien
aaatgggagctgggctgggagcagttgtacttgcctgtagtcccagatactcgggaggctgaggtggaagggtcccttgagcccaggagttctgtgccacccagaatgatggatctgcactaagtttggcatcaatatggcaccctcccaggagcggggaaccaccaggttgcctaaggaagggtgaactggcccaggtcagagatggagccgatcagaactctcatgcagatcagtagtgggaccatgcctgtgaatagtcgctgccctccagcctgggcaacatagtgagaccctgtctctaagaaacaagcaataagaaaagaaaaagaaaagggaccaaggcagggctttggcaaaacacaaagcaagccagccaatctttaaccccagccttgggcttctaaactgggattcctccacacttactcctttttattttcctcccatttgcttctctcttcagttctcctgaacattctctaggtctgggccttaatgggtacttatgagttaaaaaaaagaaatgatgatgggttacctaggagtggtcaacgtatctattacttctaggtaaaaaacacaatgttttaagtacctgtaaaaacaacatgtcttggctgggcgtggtggctcatgcctgtaatcccagtactttgggaggctgaggcaggcagatcacgaggtcaggagctcaagaccagtctggccagcatgatgaaaccctgtctctactaaaaatacaaaaaattaaccgggcatggtagtgggtgcctgtaatcccagctacttgggaggctgaggcaggagaattgcttgaacctgggaggcggagttgcagtgagccgagattgcgccactgcactccagcctgggcgacagagtgagactcatctcaaaaaacaaaacaaaacaaaaaaatacatgtttccagaaagctcctaaaaaattagtatcaagaatttacgatcgggcaagaagcaggaagcaagtggcaagtgggactctcagtacctttataatatagtaggtggtgtttgccttctttggtttcagtaagaacttttgggcgatcatcccatcttcgacacttgaaaacattttccaggagtgatcttggtgtggtttactcagtctaaggccattcattccttaaggctggccaagcatttgttttgcagatttttcttcttagaaaaatttaggccgtgttaggtataataattccaactaattttttttgttgtttttttgagacagactctcgccctgttgtccaggctggagtgcaatggcgcgatcttggctcactgcaacctccgcctcccaggttcaagcgattctcctgcctcagcctccggagcagctgggattacaggcacccgccaccacgcccggctaatttttgtattttcagtagagaaggggtttcaccatgttggccaggctggtctggaactcctgaccttgtgatccaccctcagcctcccaaagtgctgggattacaggcgtgagccaccgcgcccggccaattccaactaatttttttttttttttttattatatggggaaggttactcagtcattcaacaaacatttgggcacttccacaggtacaccaaatactgtgctaagcacctgctgctcatcaatagtgattaagacagactcaagccctatcctagaagatttgatagtccagtaggggaggcagacaacaaatacataaatataaaaatataaacactttgctttaagggttaggaatgaaaccaacagattgttgagacagaggatacagtaccggtaggggacatagtcagggtgatcaggaacaacttccctcgcaaggtgacattcgagcgaagacttacaggaggagaaaggcgccaggcctcggaaatggggtcacgttcatgtaagtcagttaaaaataaaccccaatctctccagcagcaaggttggacgtatggggccaagaagcctcgctgccagcactaaagatggcgcgccggagtgggggtgggggtgttgggggaggcggggcgtgcgcgcgttctgattggccgaccggggagtgacgtcacgtgtcggccgccgagcatccgggctcccggcagcggcgctgcggcggctcgcgggagacgctgcgcgcggggctagcgggcggcggagcggacggcgacggggcgctctcgggctgccggcggggccgagcgccgcgcgtcccgagcatggcaggctccctgcctccctgcgtggtggactgtggcaccgggtaagagcagctcggcgcccac

SEQ ID NO: 39719 - DNA, 2300 bp, Homo sapien
tttctccttagtattttattttattgtttttttttaaattgacacataatgtgcatatttatggggtacagagtgaagttttgatacatataatgtgtggttatcagatcagggtaattagcatatccatcatctcaaatattagatattttgattttgtaacatacttgattgacactgtggccagatatagaattcttgggtcgtaccttcttcccttgaagactctaagtgtggccctatgtgtcctagtgttaaatgtagccgtgttgaaggctgaggctgattgtactttccctgtcgtaggggtgtattagtctactcggctgctgtaattttgtttataccacaggttgggtggcgtaaacagcagacagttcgttgttttctcacagttctggaggttagaagtccaaggtcgaggtgccgtcggggttggctcctggcgcagccctcttcctggcttgtatgtggtcacctttcctgctgggtcctcacatgcctttcccctgtgtgagcgtagagtggggagagaataggagagagagactgatttctggtgtctcttccttttcttagaagaccttcctccagtcctgtcaaattagggccccacccctatgacctcaggtaaccgtgatgacctcttgaaaggccctatttccaattatagtacactgggagttagggctttaatgtatgaactggaggtagggggagcacagttcattcataataaagggtaatgtatacgttttgcccaaaggtccagagactttttattttttcagttttaaatacgagatatagacccatatttgttgacaaggaaaaatgttcatagtatattgttgaatgagaaaaatcaagtttatttattctttttctgtttctgttgtctgtcattttgtcctgtttgatgacggttattgttttaaaatagatacttggattcttggaaatgtctttggaaattcttggcaatttttatctgctttgtttcaatatttttccagatattttttttttcggtcttttggagacaggatcttgctctgtcacccaggttggagtgcagtggcacaatcttggttcatgtagccttcacctccgaggctcaagtggtcctacctcagcccccgagtagctgggatcacaggcatgtgccaccacacttggctgacttttaaattttttcatagaggtggggtctcccaatattgcccaggctggtctcaaactcctggactcaagtgatcctccctcctcagcctcctaaagtgctaggatgatgggcgtgagctaccacgcctgcccctggatatgtgtttttgtctgccatttgtttttcctcttttctctgtcccttttctttctctttgagtgtttttatatcactgttggctggcttctttgtgccccttactcgtctctgaatgagcagagttcttctggactaatggcgtgtgggtaggctggggaggtcctgggcagcgtctgggggaagctgtgatctgccctggactcttcccttgccgctggactgtaagggtgcttggcctaaccctgcctgctctgccaccctgtggctcctcacaccggcctgtcctgagcaagggcttgctgctgctcctctggctctcctttgctgagacctgaagtcaccggttcgcctttgatgtcctcactcgtcttggttgtgttttcatagcccttggcaacttgcttctgggatattcagtttcggggtgtttaggtgttacgttattgaagataagagtttctttttctgtaacttgttctaatttgggtgggtaataagaacagaggccttcagagaagtatttactctgacgtcttaaagcttttaaggcccatggccagatttctttaatacactttgggcatcctctgtctgtaaaattagggaattgtataatgtcctcgctaacatactttcaggttaacctgtttatggttctgatgtatttacatgaaattcgggtaaacactaaatatagtgaatgttttcttacagacagaacctccactcaatacaccagaaaacagagagtatcttgcagaaattatgtttgaatcatttaacgtaccaggactctacattgcagttcaggtaaaaccagttacgtttgtgattcctaaagcacctgagctgtctagtagcggaagaaatggtatttcccaaggttctccgctggaagactgcgctgtgtgcccttcctttttccactccctcccccgtccccatgccattcaggactatagggaacgtgtcccat

SEQ ID NO: 39720 - DNA, 2300 bp, Homo sapien
tggctgatgggttggctggttggctgaaatgtggacccagaggtagctcaactagatgaagttgaaatgccacaacggctttggtatgctgtacaggaaggggcccaaatgcttagggagattgtaatgttagaatagacttcacccaaaactctgtgttctcttctggggaaagggtgagcttgtatttgttctaagcaggatagctgtgtcatgctggttagaaatacgactttgttattgacttttcagttagagatgacgtatggtctgaggagttatgtctggtgttgagttcacgggggtgcactgcgatgggctaatgatacctatgtagcttagctacaatccccagcctttcactaaaacacccatctgtgaagatattttggctacatgattgtagctcgtatttatgactaccttctcccataataagaaatgtaagaaactaaaaaaaaaaaaaaaaatttcaaaacacttttgtattcatcatcacaataattccatagtttagataaatcgtgagtgatcatgctcaaatgacaggcaagtaaacgggaaggagaaattagtttttcagaaccacagagacccagaaataaagcaataaatatatccgtctgtattattttgttcattctgcttgtcagcaactttaactaaacttgaggcaaacacatcgttctttttccttttatgacccttcctcaagcctccaaatctcactacagtgggtagtttgtcttgacattgactatccttccagaaatatttttgtataattaataacctttactctttctgtcagctataaaatcagatgactgtcattcttaacatttaatctcatcaattttgacattctctgagaattggatttctgtaaatgcctggtgacacaatagcattagatggagaatatttatgtaaccaaggaaccaagcctgagatcatcttgaaactgacattgctgaagataagaataaaaactgcctgttgattaaaaagtagaattaaaagaaagtcccccgaaagcaggagagtaaaaccaaaaatgggagatgattcggagaggcgttttcacctaattctaacttggggaaatagattgatgcaggaaatcaggagataacagtaggccatttaagggataatgtacatattaatatgggatccagtaaagaggaggaaattcaaagttccagctgctgctcttccaatagaagagacagaccagcctgacagctcgtcagctccattacctgtgtccgagaaagttagttgagcaattaaattttttcctgcatgtatacatgtacttccatccataataaatagcaggtatcatatttctctttccactaaaatcaagtcaaaaactggatgaatatatctgtaataataactttcaggcactgaaccttgacagtataaaaatatgaaccataaaaaaagaaaaaaaaatgagataaccctgctcataaccccagattacagcctgaagcagtttcaggtcccagcacaacaggggaaattaaagagagcccccactgtggtggtggtggctactccagtccataaatgtgatgaaacctcagagaatgatatgcccctgaaagcaggtgcatgtaaaaatgggtgaaatccaaattaaatttttagtttagttaatagtactgttgtaatgtcagttttctcattttgataaatgtgctatgtttagggtgttatcatagaggaaactggataaagggtatatgggaaatcttggtattaaatttgtaacttctatgagatttaaattagtaccaaatgaaaagatttttttgaaaactaaaggctaaacactttttagaggatgaaactgagataaaattaatcaccaccagatttttactataagaaattgattggactccggtgaagactccaagatggtgattgccacctcggataccctgactcagcatttccgggttcacctttcctattcccaccaccccgactaacgtgcatgcccactagggcgtgtcacactcagaagcgcgaaactcaaccgaccccgcccctaccccacccactcctcacccagcatccataaaagcatgctgcacctttggcacagcgcgacttccctggccctccccctgcggaccagtgaacctcgcccgagggctcaataaagaagatttttgccctctttttctcacctctcagccttattgatccatggtgcccttccattgcctttcattggtgccgaaacccgggaggggacacctcctaagcccccccag

SEQ ID NO: 39721 - DNA, 2300 bp, Homo sapien
caactgggtttatcctgacattcaacagtgtaagtgacctgtactctaagtgttcccttcttgagaaaaggtgtgattgagcagcctgctgttgtctgaatttttgtctctcccttttccagaattcatatgtgaaacctaaccccagggtgatggtgttaggggctgaggactttgggaggtgatgaggtgatgagggaggagccatcaccctgataaaagggaccccagagaggtgcctttcctcacaccatgtgatgcacactgagaaggcgccatctgtgaaccagaaatcagattctcaccacacaaagcatctgcttgcaccttggtcttggacttccagcctccagaactgtgagaaataaattcctgttgtttataacccacgcattttacactattttgttatcacagccagaagacagtaagacaaatcccaacagagaagagtgcttctagaacctaaagtgcacctaccactttctagcaaagcctgatccacattactttaaaagtgacttttcaagcattttgctttggtttacctatttcttccacttacctctctcaagcccaaatcattagtttacacttgtaaccaattgctcgtgcacatgtcctaatgtttttgaatatacatatattaatacataatgtatcattcgtgtttgcatgtgggcattgtggataacttacatgtaattacagttgcaattacttagaatcatctacttcttcatgagctcgaaagtgacctcttattcttttttacaaacggagatttttttgtgaatgtaaataatggaaaagcttcccaaacccctcccagactccagctcccgccatgcccttcccctcaggcgctggcacgcccttacacacacacacacacacacacacacacacacacacacacagcctgatgtgtctatcagctctgaatctggtttttcaagtggcttgggtgggtctgcatatgaatttgaccaacctctgcgcgcgctcctgggagcgcgcatctgtgtgtggtccagggagccaaccgcgtttgtgaatggatgattgatgggaacagcgcccaggggcagcaggtggagacgggaacccaggtcgcggtcactggtcaacccgcctcttggggtggaggttagagaaatgggcgctgggatttggccccggccagtgctggggttccagggtagggagagccgtgggcgccagactgggctgcgggaggtcttcggggtcagatcccgcaggcagccaagagcgagccaaagaaacaaagccgccgagggacgcggctggggcggaggcccggagggaagtggaggccgggaagccaggtgtgcggcggggagagcggcccctgccacccgcgctggtagccgggcgctgccattcactgcaaggtcctctgcgccctggaattgccgcggcggcggatgcagaggccaacccagagtgcaaccatggagacgcgacgtgtgtcccatagtaacctgttacaacattatttataagctgccatccctagccttcccccgcttcccctccgctccctcgccagacttgcgggcgacgggcacagccgcgtctggctcttcccggcctctcccttctctcgcgggcgcagccgatcaatagttaacacccggctgcggacggcggctccatccgcggcaatcaccgtagtgcttgtttgtggaagccgagcgtgcgtgcgccgcgcgcgcacccagtccagcgcggagtgggcgtctacccgaggaggggtgtctggggaggggctgccctcgttacccaaacagtttgcgctcgcttaaccttgatgcagctcgaggcttcccagtccagctcagttcagacagaaaacctggcgcgcgcgcgcgcacacacacacgcctcccctggcgtcgccgcccggccgggtccctgcccttagggaccagagcggcgaccgctgcaccccgcaccgcctgctggaggagcccccggagccggggccgagccgccggcgtccccgagtgcgccccctgtgcgtgccgccgcgctgttgctcgcagtgtgctggcgccgagctcggtggacacgcgcgcagtcagagctgcctctcgccctcgctagctgggctcgcagcctcttcctccctccctggctcctggctttttgtttaaagcaacacccaccctccatccaggctttttttctttctttctttattggtagcggccaaaaagagttgattgctattgggatccgctgagtaaagacacgggcaggggtgcgcggaggtg

SEQ ID NO: 39722 - DNA, 2300 bp, Homo sapien
ctttatcccaatagtattctatctatgattaatatgcacacatctatcattgtattttgtataaactatattagtatgacatttagtttgtgtaaaaatatgcatgcatatttcatagatagcgtatgtatattacataagtgggaccctaactgcatctatatttagtgaaatgtcaggatcgcgatgctgcggtgaatagcatgagctttctttcatgtccatgttaggagaggcagcttcctcccatcaaaagcacagctggggcagaggagggggttgagagcaaggttttctatctatctaattgtggtgacttttaaagtttagttttatggctctgttgcctctgtcttcaaagtcaaatggagcagctgaagctctccccaccccagacccacctgcctggcctctcccatgcagcaagtttcgcttagctgttgcaatcctggttttacttggttttgtatttgctattttttaaagtgtttttaaactcatgtttcttcatagtaaagggtaactactgtggagtaaacagaagatgagcgtggtacaaattttggttaaaccaaaaactacacactggattgaaagcttggggaagggaggcaggtggaagggactgaaggaggtctcttcccaggagacttgttcaccggcatccagtattctcccccgcagttagggaaacagagggagcatgcagtttcaggcccaggcaggcctctctctgggcttggggcaatgccagggctgggggcgagcctgcagtcagccttgtgagtggcagccgaggctgttattttgaaaccctaagtggaaacaggcatggaaacccggaaggagcagggagccttaggcagtcctgggagatgaagccaacgccctacctccatgtggaaggaggcggcggaatgggcagggtcgggtctcacaggttcccccctctggagttggggtttcccggcccacgttcactctctggatgtgataggtccttcccggccgggaagggctggaaggggcgcgcaaggaggacgtggggacgagacgagagagacgcgtgcccagcaactccagaaggacggagaggagtgcagaagggagccggggaggacgcgggagggccgggaggggaagagaagccaggccgggcctggagcggaggagcggagcccgctggtgcgggtgtccacacaggggcgctggagcgcgccttcctgcggctgggcaggaggcaagcccgagagcgcgcggcgagtggagccatgtcgccctccctcgctctcggcgggcacagtgaggcgcaggctttggaaaagttgcgggcagccggagagccgagcctccgcctgcgttcatgataatgagaatggagtcgcggtcacagccgggctctctgcggggcgcatcgcccgcgaggggcgcctgggcctctgggcgtcctctgccgccccgcgacctttcctgccctcctccggagagaggcgaagggaaggggcggtttcggagggagctgggctgtggagggagggcggcctcttcaccagcgtcgtccgaccaccccgcgccctcctggtggctctcccacgccccattcgcaccccaggtcctcggggtgtctctggtgttgcttcaagttaggcaagaggagctgggggcgcggggagcccggcgccgcagcgcgtgcgtggctggggcgccccggggccggctgcaccttcagtcgccccctggccggcctgcctgcctcgacctccgcatccccttgcaccgtccgctcgcgtgctgcggggcactcgcagcactaccttcggtggggccgcagcaccctgagctcccgggactcccccaccgcccccgcacccacgacccgcgtggtcccagcccctccaccctcttcacgcaccctcgcacccttttgtgcgaccccgtgccctctccgggctgccaacccctgccacccaggtgccagtcccgggcgcggggaggaggccggtggggaagggggcggaggggccggggtggaggaggagctgcgcgaggggcctgggggcggggagcgaggagagcgctcggaatgtgtgccggtctctaggtggtgccaaattctggggcctaggcatttccctcgctttatgtttttggttttttttcttccttcaatctctttgattaggccgtacgtggctgtggcaaggagttggggaaaaaaattataaaaacaggaaagagagaaagcacagccagagccccggcttcgcgagccgccggggagggggcggaggaggctgagc

SEQ ID NO: 39723 - DNA, 2300 bp, Homo sapien
ggttggctctgagtccccgcctcgcagcgggtgcctcccccccctgtgatgggagtcccaagagccaggggggaagaggggatggatctcagccatcacaaaatggggggcctttatgttcaggttttgcccaagaatcagcttatttgcttcttgtactagcagggcagttgctgccaaggccctctaataggggggccatcctttagcaaccctgtctagttgtttagagatgtaggctaccggcctcagccagggccccacagtttgggttaaaagtccagctgccatcttttctctctctgacgcatacaatggaaaaggctttgtcagatcgggtagccccagggctggggctgccagaagattttcttgtaactcatgaaaaacttgctgttgttgggatccccatttcaaaagttccgggtccccgccccctttgtgacctcatacaaaggcttggctaatactgcagtttgggatccacagtctacaaaaccccacagctcctaagaattctctcacctgccttctgcccttaatttccggtagattgcaaataacctgctttctttctgttcccgagctgcgttcggacccgtcggatcgtaaatcccacataaggtacctgccgtcagaagatttgaactctctacttggacacctaatacccacagtcctccaggtgggtcctaaggatcttaacatcaacgatgggggtcctatgccagtgggggaagagggtctggctctcagtccccgcctcgtggggggtgcctccccactctgtgatgtgggtcctaagagccagtgggggaacaggggctggctctcagtccctgcctcatggggggtgcgtccccctcctgtgatgggcgtcctaagagccagggggggaagagggactggctctcagtccctgcctcgcggggggtgcctccccccctgcgatgggggtactaacagccaggggcggaagaggggatagctctcagtcgccactctcgtggggggtgcctccccctcctgcgatgggggtcctcagagccaggggggggaagagggactggctctcagtaatcccacgtaaggtacctgccgtcggaagatttgaactttctacttggacacctaacacccgcagtcctccaggtgggtcctaaggatcttaggatcaacgatggaggtcctaagccagagggggaagagggtctggctcgcagtccccgcctcgcggggggtgcctcccccctctgcgatgggggtcctaagagccagtgggggaaccaggggctggctctcagtccctgcctcgcggggggtgcctccccctcctgcgatgggggtcctaagagccagggggggaagagggattgcctctcagtccctgcctcgcggggggtgcctccgcccccagcgatggggatcctaagagcaaaggggggaagaggggctcgctctcagtccccgtgtcgtgaggggtgcctccccccctgcgatgggggtgcaaagagccaggggaggaaaggtggaggtttgcagtcccgcctcgggaggattgcctccccccctgcgatggtggtcccaagagccagggggggaagaggggttggctctgagtccccgcctcgcggggggtgcctcccctcccgcgatgcgggtcccaacagccaggggggaagaggggatggatctcagccatcacaaaatgggggccctttatgttcaggttttgcccaagaatgagcttatttgcttcttgtactagcagggcagttgctgccaaggccgtcaaataggggggccatcctttagcaaccctgtctagttgtttagagacgtaggctacgggcctcagccagggccccacagtttgggttaaaagtccagctgccatcttttctctctctgacgcatacaatggaaaaggctttgtcagatcgggtagccccagggctggggctgtcagaagattttcttgtaactcatgaaaaacttgctgttgttgggatccccatttcaaaagttccgggtccccgccccctttgtgacctcatacaaaggctttgctcatactgcagtttgggatccacagtctacaaaaccccacagctcctaagaattctctcacctgccttctgcccttaagctccggtagattgcaaataacctgctttctttctgttcccgagctgcgttcggacccgtcggatcgtaaatcccatgtaaggtacctgccgtcggaagatttgatctttctacttggacacctaatacccacagtcctccaggtgggtcct

SEQ ID NO: 39724 - DNA, 2300 bp, Homo sapien
tgaaactgcgctggtctactttaaggcaggggctgtgattttccctgtgactgaggtcctccaggggtcaactgcatttcaggtgtgtgaggggagagtgactgcccacctggctacccagcccttctttctgagcctgtttactcagctgctggggcctccatgacaggtttgcttggtgaccttacaccgcagtggctcccagggccagagacgtgaccaaggagggaccttgcactgaggaacctgtgaccgtaggaagaccctctaaggccgactcttgcttggcccggcccagtccctcctaccaacactgataagaacttaggttcctagcatcccaggaggcagggtcacaaagacaagctgagaactgataccactgctatacccacccctggacctccctgtcccatgcaggagtctaagccagtgcaaccaaggccaagcacacacccataccacacagcaagggtttcacacggggttttcatttctttacccctggccgaaccatgcaagctaccagccatctacccagacttcttagagtctgccaaatacgtactcagaccagaattaagttcaggccatggtagaggtgaccagccactctgccgtgacctggattcagccatcaattccaaagaagcccacagtgccttgcattttgctggctggtttgtttttgtaaaatgatggggtgggaagcagtgctgggcattggaaaggggctgaacaaggggaaatcttcaacaccttttaaatggaagcatgtctagttggcctcttttctgtaaggaactatactgggcatcacagagatgcaaagactagagtgactgattcaggccctggcctgaaggactttattattgagagttccccgtatatataaatggctgaactctcaggccagtgaatgcctgtgaccaagtgccaatgggtgaaagtagaggttccagaccaggagtgggaaatgcatcaacagagagcttggccacatgctggcctggagtgcagagaaagagtgccaggcctctgggcactgagttctgagctgcttctggagggccaggagatactcccacctgcaaatgactggctgattgcactttccttagagtttgccacctgcatttccgctctacccactaactgactgctccggtgcagggagccaggcaggggcagtggtacctgggtcaggacacgacagcagcctctggcctcaggcagggagtgctggacagtccgtctcctgtcctgctttgtctctttctccttgagctcaggacacagtggggagccctcatgtttctgtaaggtcatcacacaggctggaatgttttttttttcctctctctctctccctgtctttcttttaatggacaaacacccttgaggtcctggttgattttcttagagaaatgtagattctttgattctaacgatggaacataagttttctgaattttgaggaaaacaaagcccaagatttcaacaaccagtgttcctgccaaatccactgggcaaacagaaaagctgcctgcctccggtgctcccagacccccttccttctcaaacacgcatcagacactttgcaccaagaaaaaacaaagggcatccctcctggggccacctctgccccctgtccaggtacgcgctgtctggcgcgccctgcgtgggggccgcaggttcagacacccgggcgcggcgcggggccctgatggatgcggtgaccgaggctgtggctgcgggcgcggcgtctccgcggcagtcgctgcctccgcggccccctccccagccccagccccagccccagccccagccccagccccagccccagccccagccccagccccagcccggctgagcgggcggccggagcatgcgccgtgggcgccgggccgggaggcgggcgaggaggcagcgcgcatcactcgggtccccttcctgcacccagccgccacttgccggttgctaagcagttatcattgtttctgtggcgattgcagaggctgttgctaattggagaagccccactaagcagcggcagcttcctgcttcggatcctctctctgctgcttgcatttaaagagcaaactcgtcttgtctacccaccctccctcccccatcctccccaaaatagccttgtgatttcggaagtatggactaaaatcacactcctccttaccttaccgcttggactctggtggctcccaactcgccgtcagaccccacctgccccggtggtgggaagcgcctggacagaccatgaccacagccaaggagccaag

SEQ ID NO: 39725 - DNA, 2300 bp, Homo sapien
atccgaaggcttgaccggagatggggaacccatttccacatccactcacatggcttctggcaagaggcagtctaacgggtatgagcctcagactctccatggggctgcttgagtgtcctcacaacatggcagccagcttcctcagagcaagtgatatgaaagacagcaagaaggaagccacgatacctcttataagctggctgcagaagcctaacaccctcactgctactgtattctgttcatgagggtcactaagtcagccaacactaaagggtacagaattaggttccatctcttctcttctctctcctcctctcctcttccccctttctctttcctttatcctcttcttctctttctgtgcctcagtttcttacctgaccaaaggtaacttctgccccctagggatgctatgaaaacaaagtgagatcaatcatatgaaaaggcggttttggagggagagttcagaaactctatataatataccatataccataaccatggaaacctgagatcagctctgtctagcttcctgctcttgcatctgaagaagccgttccagctcacacaggcatggcttagtcacagtgcagcatggggtcctttaatgggtcctctctgagcggtgacctgctcaggacacaggagccagcaccaggcccttccttccttctcctgggcaagcagcaccactcatcccggcagaaatagaaaaaggagttaagttcctgtgttccttattagattgctgtagcagctccataaagctctcctagacagtcctgtctgttagtggctgtttctttatgactaaagcagcactttcccatctgctgccctcaaagcaaggggccccgggccgcatatttctggttcaggagtctcaagatctctgaaagcaccagattgttgggatttaagtgctgttgtttatttttatatctgggtcctgttcctccaaataactccaagaccattgtgattttcgagaagttaattcagtggtgcaggctaggtagggaatggtggtattagcaaatcctacctgttttctttgcaagctcatttccatcattggtcctccaaatgcatttccctgttcaaagtactctaccttggatatgtctgcctttgcctccacgtccctcacctattatctttagaaaggtggttttaaatgttggtcactgaacatttagccacatagggcaccagctctcagaggtttcacaagtaaaggaaagggttgggggaaatgaaatatggttcaacgcaacagagtaacccacatattccgtatgttcgacaaggtctctacccaggaggctggcgatgaaggatgctaacatttcttgaaccgccatcttctcccttcttttgggtaaccctcgaattctgcttatggttatctatggattgtggagtcatttcctggctcaggaggttaagaaaggcgtccgagatttgagggttacaggagtttggaagcactgtttttctggttttctgttacctccattttaaagccgtgatacttccaactgcccttttttcagtaagttcttgttgactactctcttgaaaccaaaagatgcatatcccgttgtacagggggtcaaaagtgtgcccaattaagcctgccttgacttcaatattgcaactcactgaagacacacagtggaatttctggtggaccccttcccataacccacagggaactctagccgtacatgggtcttactgacccgttgggtctagctgacggtgcctgatggtctccaatgaccaaggtgtcctcattagttctgtgctatatttagttaagcctgaaatctgtgcccctaatttaatcacacaccaggtagccatggagatgacatcaagcctctggctgccctataaaccattgcaaatgctgaaaataaaataaacaggatatgcaaattgacttcctaagtaaataaaagactttgtctccaggtgttgggattagctgcttttggttcactgatgtttgttaggattcacagtgatttgaaaaatatcatcgtaacagcctttgtctcaatgcctaccttttttcctttttgtctgttgcagatatatcaacactcgtatactggatattacgtcctgagcaaaattcctcatgggtaagagtgttcttttctttcttttaattagaaatatgcagggcaaagtgaagggtagaacatggacgagctgtttaacccttagggcgggaaatggcgttccagttctcacagccaagggtgctggtatcgtggcacctctgggac

SEQ ID NO: 39726 - DNA, 2300 bp, Homo sapien
tgcaccgccacctactatggccctggtacatggcccctcattctccttagcctagacctggggcctcttgatctcaagaaggccagcacacagatgggtcggtatagacccatcttccctctgggagtgaccctcagcacaggccctgcagaggaggccttgctgtgacacccccgcaggtgaaggcttggacaagtaatcagcacagtgcctcttacgtcatcgcctccaaaacctcagagcccagcatgcactggagacccggccctgccctgtgggctgctcccggaagcaggggatgcaggagccctcccacacctcctccttacctgccggaggtgaagtggtcaggaggagggccggcggcttctctccttgttcagagcccgggcacagagccctagaggtgcattccaggtgcctagatgtccactcactgcctgtgaggcccgaagccactgggtcattggtaggtgtaacttgggtgtcaatagccatcacctctccccaccctcatggaagtgacttcccagcagactggcagctgaaaggcagggagcctgggccgtggtcagtcttttccagtcgtcactctgccccaaatgcacatggatgccactcctgagggcttggcctccttcctgtgccttgcatatagtccatccactcagggcctttcatagttcacttctggacacagagaggctttctcaacaggcagttggtccagaagcacaggcagccgaggtgccaaagggaaaggggaccctgtgcacctgtcagagcacaactgatgcacccccacaccctgtacccccgcactcagctccgccgaggacatctgtctgagctccgtgctggggatctttcctttgccattctgcccagtggatcccgggcgtctttccagagcataagcatctctgttttgttttaacaagccttagatagaggtccgtagaccccacaatggtatttctcctctgaagaataaagcgtcaatccttttagtggcttggcatgttgcggcctgtccattctgtttcctcctcgcatgtgccccagtgatctggctgcagcctttgtcaggcatcgcaggacctgggacacagagcccaggggagcagcagccaccctgcacccagaggtgacctggagagcaagggggcacctgtgcgttatgttctgcagtttcccccccgacaccgaaaatcccccctgcagaagattgcctgtctctcatttaaaccagagcaggccgcgtggccctgcaggaaaatgagatttaaagaaaacgaagaatgacaagtaaggacgtgtggagttcactgacaataaatattatttgtcagaaaatgaaaatcttctttcattgtcattagacaaggtgcccctgccctattaaaggaacacaccggaacgatcgtgcaggtcataaatggttgatcttggagtttggcatgacctgcgcttcacggtctcagtcaggtacctgggttctctacactccatgctcccaacacgcatgctcacagactcacatacacatggatgctcacccatacacatgctcacacacacatgctcacacattcacacacatgctcacccatacacctgctcacccatacacatgctctcacatacatgtgctcacacatacacacacatgctcacccatacacatgctcacacattcacacacatacacaaatgctcacatacacgctcacacatacacacacatgctcacccacacaatgctcacacattcacacacgctcacccatacacctgctctcacacacatgctcacacatacacacacatgctcacccatacacctgctcacacatacacatggtgtcacacacacgctcatacacacacatgctcacacacacgattacatacacctgctcacacacacacacatgctcacccatacacatgctcacacacacgctcacattcacacacatgctcacccatacacttgttcacacatacacatgctctcacacatgctcagacacatgctcacccatacacatgctcacacacgctcacacattcacacacacctgctcacacatacacatacatgctcacccatacacctgctcacacacacatgctcacccataaacatgctcacacacacacatgctcatacacgtttacccatacacatgctcacacgattacatacacctgctcacacacacacgtgctcacaaattacatacacatgctcacacatacatgctcacaaacacgactacatacacctactcaca

SEQ ID NO: 39727 - DNA, 2300 bp, Homo sapien
gtggctccagtgtcaataagtgcttgtgttagttctccatttataataatttttatttctcccagtgttagtaaggaggaaatgaaaggcccctttaagttccttggagcacccctgttttcttttctgcctccactggttaacattctttcctttttcatttttggcaactcttttgaaagtaatcatgctttttgcaaaaattgcaaagtggaaggttaggtccattagggagtttctaggggtattgtgaaggccaaaattgtgtgaatagttgttttaattgtaaattcataattgtattagcctcgctcttttgtttggcttccctctctctttcttcttcagttaaggtatcagataaccggtcaatgagactgaccaaatcatgagtatcagaagtggcccaactttgtcttttcattgttagttccaattcatctaactcatttgttaaactggagtcgagtatcatttcgatgattagcacagctttcttcggataaaactaaatattctttaaaattttttccacagccctcaaagtatattactgactcatctgaattttgttgatattgtattttgttccagttgactactctgaaaaactgaggagatagcctgatgcaaagcctttgctgttcttcaagcctgtctatggtcctcttctgaacatttatgaagatccctaacagatttctccagtgagctttgtctagccagcctttagctttaatttttgctactaacatgtgaatctgttgctagaagtcagaataactagggtcataagcttggatatttaattcaaatttcctagcaaaaccaataggaacctggtgaagatcaaggaattcttttaactatgcctgtaagtttgatcatgattgataaagcaggttcccctctaccagatgctggatgaaatggagccaaaccagtgggagcaggaggaggggcaggaggaggaggaggagaaggtcaatcagggctgggtagttctgacaaggaggcttagagagacaggggagcagggagagaagaagacatttcagtgttttttaaaattcagtaatggttttagagtgctttttattttcttcctctaagggaagaattctgtcaaaacctcttttggatgcttctgggtgccattggaagtaactctcttaattattttatttgattccatagctggctttttaaaattgtgcatataaataaactaatctagctatttcaaagataattctctttgatcattgtaatttaggatcttcttaggtcaaataagaccatttctccaactatcgacaggaggtggcgccataagtcttgtacataaaccccgctggagtttccaaaggtgcattgcttaatgagggcttggttatagatggataattgctcataatttggattctcttttaaaatgcccaaaggctaaaagggaaaagtgtttggggtccagtgtgctgcttagtagggattattcctggaggtatcacctacaagtagcttcttccctcttacctacctcagagaaacccagacatttctgggagttcaaggcactgggtgacgaaccccttgtgtgttgtgtgccccgggggttaagcagctctccctgtgagttcttctctggggtttgttgtgagcttccacacccttgtgttacctccattgcctaaggtgcctttcagctgggagaaagagtcctttttgtcttcagcttatcacgtcctcattccaaccttttacaaattttgggtgactcaggaagaaactttaaatctcaatgttaaccaagatccaaagcctggctggtttaaagccacaaatttggcttaagccacaaacattcactttctccttttacaaagaaaactgctttctctttaaccaaatgtcaaatgagagaaaaggttacaaacttgagcaagtaaaaaaatgtccaatgagagaaaaggttacaaacttgagcaagtaaaatgtccaatgagagaaaaggttacaaaagagcaagtaagacgaacgaaaacttaacctaatagaaaagtgaaaccacaaacctgccaatagcagaatctttagagaaatgacgcgaaactcctgccttaaagccctaaatggcggcttcaatatcagtcccactgagcatgaaattcatttacttaaataaaatctgaatctcagcccaaacctgggagattcaaaacctgagagcggtcttaccaaagacgcccgtatgtctggtgaagtcagttggatgcaagcagtttgtgctggtaccaggg

SEQ ID NO: 39728 - DNA, 2300 bp, Homo sapien
atatttggcacctgccaaataagccattaattttaggtcatctctgtcactatcaacaaatccagtcacagaaataatctaagaaaaaaagagaaaataaggtaaacacaaaataagcaaaaaaccaaaaccaagtactatttcttctacttcttagttgatacatattttttcactatttctttggcattatggaacacatttggtaatatcattcctaaaactttcaagaccagaactgtattaatggtcaaaaggttacacacatagccctcacggggaggaagaaaaagaatgaacatgagatgccttgtttatgttactgcaacactgctcagacaatcccaacagttatgttataaagcacgtaaccacgagccagctcctccttctcctcactgatcccaacgctgagatcatttgagtgggaagacccacaactattgattagttaacccaacaggggccgcctttggtgcaagacatctgatttatttttggattttaaatagtgtcaaagactggagaatccattaaatatctactatgtgcagaaaattgtgactgttacacagaactaaaagaaaacacactatttcttatgagcaggcacttatgaactgggcaaaagtacatagagaagctctgactcagaagccaacgcaggagcctcaggtaagcactagcaagtgattattcgccaaagtcgaaggatgatttaacaaatggaacgcgaggactctgtcttacatgctgtgaacatggctttcctcctggtgggaaggccactgggaagtgaagggctcggtgcggcggtaccattttcttcttctttaagactgtgtttaaccagtgtgcagtaacacatctctttctttctcttattgcctgtcaaacataaaattataggtttgttgtttttgtttttctgctgcaggattaaagaaaattctaaggttgtataactacaatgcccttttcattggaagccccataaaagaatttcatgacatctagcacttgattaaagtaacgaattaaaaccgtgtagctggttacttgaaatacaacctaaaaatgttactatccatctgcaaacaagagtctacaaaagcaacaaattctacaacaaccttaaaaataacttcagtgatgactgaaacaacatgtgtgaccaccaaagttaaaagtgccccataaggacagagggccccacataagaaaaaatacaaaaaaccatccacctaagatgaaccacaggaaaacaaaaaaaagtctcagaagtatttccacatttttacaggaaaagcagatcctgtgaatggctatcctctttaagaggggtgtcttggaagtcatttgtcacatatatatataatctgtctacaataagcattattttttgaaaagaaatgaaacttcagagagcacaggaaggtaatattgaggagaaagcctgcaccccggtagttttagaaaagctctgtaagggacctggtctttacacgcttgtgtgcaagtcacacaccagtacagaatcctgcgtcccttcaccgtgcacagagagcagctggaatggtgactgcagggagtgtccgccctttctttcttttatttttttttgagatggagtctcgctgtgtcactcaggctggagtgcagtggtggaatcttggctcactgcaacctctacctcctgggttcaagcaattctcctgcctcagcctcctgagtagctgggattagagctgcgcaccaccacacctggctaatttttgtatttttagtagagacaggatttcaccaggttggtcaggctggtctcaaacgcctgacctcgtgacccgtccacctcggcctcctgtccgccctttcttaacaccacctgggaacatccctttctttctccattgctcaaagacaatggtgcccacaaaagatatcaatcccaccaaagattcgatcacaggaagaaggaattttcctatctttagaggtagaaaaaagttctttccaaaaataataatcactagcatttaagattgcatattaaaaatgccagaccttgctcctggtcgcagctaaggctattttccttacctgtgcatacgcgctgctgacttgactctcacagagaaggtgcgtgcatcgactcgtgaaggtggggtcaacagtgccgccatgtgcctggattatctacacacaaagacccgaccaatgcagtcatcaatcactcagaatagaggagaattccaatttcaaataaggcagctattaaaagactctatcatatatttata

SEQ ID NO: 39729 - DNA, 2300 bp, Homo sapien
ttaaactatatttatgcttagccataggaaaaataaacattcacatcttaaaagtagtaagtgaaagaatcggttttcttagggggcaggtctttttaaagtttatatttcacctaataggccgtcagattctcctttttccatgtacaatattttgagttctgaagaatgtccagggtcgtgcagctgtcacagcccggacacagagcaattccttcccccagaaaaccagatgtgttttgagaagaaactgttgggatttactaatttcattctgatttgctttttatttccctttttaagggaggtggatctgcccaccatagacctttggcagtatctgaagatctttagtagtcgcggctagggggctgctgctggcatagggtgggtagaagttggggacactgccaaacatcctcctctgtacaggacagcccccacttcccagaactccctggtccagagtggcagttacattgagcttgagaagccctggagtgcattccattgttcttctcttgtatcctgggaattcagattaaatttagagtattggagttcattttcattgtatggtgctgggtagaaaagtccgtaaatagaactgttacatgtccttgatactttgaggaaatacatgatataaatatatgatagagtcttttaatagctgccttatttgaaattggaattctcctctattctgagtgattgatgactgcattggtcgggtctttgtgtgtagataatccaggcacatggcggcactgttgaccccaccttcacgagtcgatgcacgcaccttctctgtgagagtcaagtcagcagcgcgtatgcacaggtaaggaaaatagccttagctgcgaccaggagcaaggtctggcatttttaatatgcaatcttaaatgctagtgattattatttttggaaagaacttttttctacctctaaagataggaaaattccttcttcctgtgatcgaatctttggtgggattgatatcttttgtgggcaccattgtctttgagcaatggagaaagaaagggatgttcccaggtggtgttaagaaagggcggacaggaggccgaggtggacgggtcacgaggtcaggcgtttgagaccagcctgaccaacctggtgaaatcctgtctctactaaaaatacaaaaattagccaggtgtggtggtgcgcagctctaatcccagctactcaggaggctgaggcaggagaattgcttgaacccaggaggtagaggttgcagtgagccaagattccaccactgcactccagcctgagtgacacagcgagactccatctcaaaaaaaaataaaagaaagaaagggcggacactccctgcagtcaccattccagctgctctctgtgcacggtgaagggacgcaggattctgtactggtgtgtgacttgcacacaagcgtgtaaagaccaggtcccttacagagcttttctaaaactaccggggtgcaggctttctcctcaatattaccttcctgtgctctctgaagtttcatttcttttcaaaaaataatgcttattgtagacagattatatatatatgtgacaaatgacttccaagacacccctcttaaagaggatagccattcacaggatctgcttttcctgtaaaaatgtggaaatacttctgagacttttttttgttttcctgtggttcatcttaggtggatggttttttgtattttttcttatgtggggccctctgtccttatggggcacttttaactttggtggtcacacatgttgtttcagtcatcactgaagttatttttaaggttgttgtagaatttgttgcttttgtagactcttgtttgcagatggatagtaacatttttaggttgtatttcaagtaaccagctacacggttttaattcgttactttaatcaagtgctagatgtcatgaaattcttttatggggcttccaatgaaaagggcattgtagttatacaaccttagaattttctttaatcctgcagcagaaaaacaaaaacaacaaacctataattttatgtttgacaggcaataagagaaagaaagagatgtgttactgcacactggttaaacacagtcttaaagaagaagaaaatggtaccgccgcaccgagcccttcacttcccagtggccttcccaccaggaggaaagccatgttcacagcatgtaagacagagtcctcgcgttccatttgttaaatcatccttcgactttggcgaataatcacttgctagtgcttacctgaggctcctgcgttggcttctgagtcaga

SEQ ID NO: 39730 - DNA, 2300 bp, Homo sapien
attgtgcctggaggaaggatgactgtgtctgaagatgcttctttcttatgtagatgtaactgtgttcacttagctgcattcactgagctgcacctgcacgtgttctgaatgtgtgacgggcattttgattaacattctgtgtgacctgaggcacagcacttttctgggcatcagttttctcagctgttagatgaagatggtggactttttatttttttcagcttggaaattccagggggcactaattatatgtgtataattggggcaatggaaataagttcagggttttggtgtcctgggagagggactattaatttgtatgcatctcagtcatttctctttctccaaaggtaactgttagaaaatcctggaatctctagaacctcaaattcttccagcccaattgtgaaactggagttaatttaattatgtattatcatgcatggtggcctttaaagaaaagaaatactttttcttgcattccccaaaacaaaactgagtcaaaaaattttttttataaaaaccgagtttaaatatgcctctaatatatcttgaatgtgcttcactataaacatccctagtgcttaaatccctgctatgtgccaagcatgctgcaagacttagggaatatgtgcgaaatcacagagacggagaaaacggaagagcagtgcgagaggcagccacacggctaagcagaggtggggtggcaaatgcaggctgttgtgagagcctgagaaaggaccttcacccatcgtgttgtggggtgatgtgttaagaaaagtctgctgggagaggtgattcctgaactgcttataggatgagtaggagtgagaattaggggggaggattttccaaatagtgcagcacagccaaaggcatgtgattggtgaaactgacaggagggtgcaaaggagggtgcctcagtgggatccacgaggcaggggttggggcaggagccagggctggtgtgtcttccaagaccttgttggtgtgccatgtggtgaagtttagatgcaggtgaagtgatcagctgtgcattttaaatagtaaagggttgaatctgagggtgaccagggagatgactgtgtggctggctgaggaaagaggcggatggcatgtgccagggtgaggaaggaagggagcagttctgagaaggacagcagcagagattttttaaaagtcagaagtgttcgaaggcagcactgagaaactgtcttgagaagtacaacaaaactcaaagatacaaaagttagtggagaaaagtttggggtttttgtcttgttttcaagttaaaagatttatccaagaggtctaacattaaataggatcttgggaacagagaaaatgaaggcaagaacattatgaaagaaaatagctttgcaactgaaggccatgtgccctcaggttgaaaagaaatgtaaggagagccatgataaggcaactgggaacattcacaatgctggtagagaaaactgttttctctcaaagacaagctcactggaggggaaacgtggacagatcaggagtctgggtgatttcgggagcctccagtgcagtgcgcgggggccagcaatggagcagcttcttccatttttgagggaaaataatttccaacctaaaataacctatagagcctatcagtcataagactatggaaggaggatatttgtagactaatggtaaaaaatgtacctcccttatattctttcttaggaagccactatgccagcagagagtgaaacatggtagccaggaaatgaggcatttgactcagagattgaaagagagttcctaggatggaggtaaagggaaacgccaatagatgagaaagtaggtgtcgagagaactagacctgggaccggaagagagacttccaggaggagcaagcaaacgaaaacactggtagattgaggagagacatgtaccgctgacccctgaacagtgtggggcctaggggtgctcacccccatgcaatcagagatctgtacatcacttttgattcccgaaaacccaaattactaatagcctggtgttaaccagaagccttactgataaacaggcaattaacgcatattttgtatatgtattaccatattcttacaataaagtaagctaaagaaaagaaaatgttattaagaaaatcataaggaagagaaaatatatgtactattcattaaggggaagtatatcatcataaaggtcttcatcctcgtcgttttcacgatgagtgggcctaggaggaggagggacaggaggggctggtcttactccctcaggggtggcagaggtggaagaaaatc

SEQ ID NO: 39731 - DNA, 2300 bp, Homo sapien
cctgttcctgagctcccttccacctgggcttggcaggtacagagaggcggggagcagcatttggtaatgactagttcagccctgtccacctgcagacgggcatttatttctttaccatccctcagagttccatgggctgtttacatatgagggtgaaaaagtaatatgtgtacaaaattcaaaaattcaaatgataccaaaggacagagtgaacagttaaactctcagcccccctcccacccctcgctgctgtttaccttctcaagaggcagccgctgtttccagcagtttgccgtgtagggctcatggctggtgcccaccaggcaggcaggtgccccacacgtgcatgcttcttagggggtgtttgcacagcaccaaatgctgctgggctccatggggtggcatgttgtggggtgaattgtcccatcttcttttctggatttttaaaaatacttttaaatatggagatgaaacagttgtcttattattttgtttaaaagacatttttctgcttagagttccactcaggtgtttctgaagtcttgaatccttttatagagatgtctcatacataaggtgattttagagatgggtgtgcccaagctcttgattttgacttatttcaattctaaactcccttatttattactaaatccaaaatctgttacccttgcaggtcatataatctttgcaatttggaatctgtttaagtgaaagatacatgttagaatatgtttgagattttggtatagttctgatatgtgttaaattcctagaattttatttaaattttaaatgcttttaatagggttaaaagttgtatggattgagttaagtaaaatctatttttactgatttccatgaccataagaagttggtttcaaatttttgttgcttgagcatgttgaacaaaattcattgtataatgtgtatctcttgttgtattcagtgccctataggatattaaaaaaataacttactctgcttggtgggcatctgctggtcaccgtccttctcctactcctcagcgtacacagaactctcagcttattccctgtcattgtgaagcagaaagagctagaagacaaatagtctggtttgaattctttttttctagcttgaaatatttttgtgtcccccatgaagactcagtcatttttgaggaagcatcatttcccagctctaatgatgagtccttagttgggaggaacatcaccatttaaacagccccggtggtgtcttagctggcctccttttccatagcatgccagtgcacatagcaagttgacagtggagcgaaaggctcttggactcacagcttgggtcatgctgctttcatctggaaggtgatccactgagaacctttgtttactagactctgggctgtaagacaagaggaaatgggaagtggcagctgtggcgagaaggtttgaggtgaggctgagcccgattaccagatgccttcaccacctgtcattcctcagtgcattcctgggccaggagagggtctgcggagctgatgcaggcgatgggcagtggagtggtgccgcagcacggtgcagggagcaccaaggcttagctaccaggtgtgcacaggactcccatgccctgctctggcaaacacatcagccgtctgagtctttgtcactttaattcgttagtttactccattttactgatgtagtttcaaattttggtggtctcaatatatgaatttactttacgatattggcgttacaaaataaatacaaaagaaaatgcagtattgtttttgcagtttccaatcatttgctgtgtctacttagttgaatattgttaataaataggatatgccattctcttgactaagaaattatcattcatctgtttcaggaactgttgataatgtttcacctaacttttgttttgtagatcttacagactctttcagcacctacgaaaaatttagaacagcaggtgaatcacagccagcagggacatacaaatgccaatgcagtgctgtttagccaagtgaaagtgactccagagacacacatgctacagcagcagcagcaggcccagcagcagcagcagcagcacccggttttacaccttcagccccagcagataatgcagctccagcagcagcagcagcagcagatctctcagcaaccttacccccagcagccgccgcatccattttcacagcaacagcagcagcagcagcaagcccatccgcatcagttttcacagcaacagctacagtttccacagcaacagttgcatcctccacagcagctgcatcgccctcagcagcagct

SEQ ID NO: 39732 - DNA, 2300 bp, Homo sapien
tcattgtgctgctatgataattatggtggtttagaaagtctttatcaatttgagatccgtaaacaaagttcaggagaagcaagatttgtaaaagattgccagttattaaagctgggtgacagatacaagggatttattccactagtctctaatttggtctgcgttcgaaaatgtacattaaaaagtttggtctgcgttcgaaaatgtacattaaaaagtttggtctgtgttcgaaaatgtacattaaaaagttaaaaacaaaagcataaaagtatacatgttttcataggaagaggttgttcacaatatattaagtgaaaaaggaacattataaagtatttgttcactatgactatatgttttttccctttgcccttttaatatatgtacatatatatttataacaaaaataaatttaaactataccctaaaaatgttaatcgtggtcctttctagtcagtgtgattatgattacattcattttcctttgcttagcttcttattcatgggtgtctcccatgactaggtttttcttatattttaaaaaggtttgagaaagaacaaactcacaaacacaagttaagtcactgagctgtgtgcagagctcactatttgcaaggatctcccagatgggcaatgcctggcgttcgctgccaggaccgaatgaccaacagctgtcctctctgtgctgctgccccgcatccctattgcgtgtgactcttattccacccagaaattgcaaatgccaccttggggctctgcaacaggacacggagtttagtttagggccctgattatgtgtttgctagagaattgctgttatgtgttaagcttttaggagcacagccaaatttacaactcatttattttaaggttactttattgtcatattactcttatttaacattttttatttatttcctctttctttgttattccctcccctgtgccttccacattctacaccctttaccacaggagaggtctctgttagcttgccgaacatactactccggacacatcttttccagtgggctgtattttctgctttcattctaactgtgcaaattgtcatcatttgtgccccagccaaagctcacctttcaacggggctttcctcctgccctccagcttatgttgatgagattcccttccagtctgttactgcatcattcagcagtggttttatattgtatttgcattccgtatttaatatctctttagaaccaaattgtgagccttgttaggtcagagacttgttgcatcctttgtgtctccatcccttagtgctgcttggcatatagcatgagctccataaatactggatcttgaatagagctgtcctatgcaagtcagccaagtcagccatgctccatgagtgtacgtgatgcattggcggcactctgccacgctgttactttactaactgtcatggaaaaccaagcttctaaatattatcaatcagtaaaaacttaggtagcaattattcatttcataattttccataggattactagctctacttttgtacttaaaatatcattttaaaaagttaattttcagccaagtcttttaagactcctgctacaggtgtgagaccttcctatgatcactgctgtatggttccttttcacttttgcctcatgtcctctgtctaaaagatcaaacgttgcttctgtataaaattgtaataatagttgctcaacatttcaactgcattccttgactgagttttttctaaaatgcgtaattgtaggaaatgtgataaaatttacagctttgttttgtgtgtgtttctgctttcctcgtaggagaaatacgaatgtgctttaaagcgagcaagtattaaaattgtgactcctgactgggttctggattgcgtatcagagaaaaccaaaaaggacgaagcattttatcatcctcgtctgattatttatgaagaggaagaagaggaagaggaagaggaggaggaagtagaaaatgaggaacaagattctcagaatgagggtagtacagatgagaagtcaagccctgccagctctcaagaagggtctccttcaggtgaccagcagttttcacctaaatccaacactgaaaaatctaaaggggaattaatgtttgatgattcttcagattcatcaccggaaaaacaggagagaaatttaaactggaccccggccgaagtcccacagttagctgcagcaaaacgcaggctgcctcagggaaaggagcctgggttgattaacttgtgtgccaatgtcccacccgtcccaggtaacattttgccccctgaggtccgg

SEQ ID NO: 39733 - DNA, 2300 bp, Homo sapien
ttaggacatcatgtaagactctttaagaaggagtgttagagttcatagtcaagactggacaaggagaaaatcctgtaagctagaatcaaggagtgtcttattgggggtggtgaggcctgaagaaggaaaagggagagtgttcctgattggtttaaaggaaagcttttattcctgggggcacagacttgaaattctagtcctctgctcctggttgctttggagtatagctgggaggacagataagcaagcagatagttgtagagtgtgagaagtatttagatttctgtccagcttgctgtgggagtacagtggtaatgccacctgagctgagtcttagaggaggaggtcggagggtgggcgcagcggggcacaggaaagcagaacgtggtgaggacggcaggtgcacgtgggggcagtgctcatgggcaggaggaggtggttaggagcagccagacaggaagggcctggacactatgggggagcctttggattttagccttgcagcactgaggagacattattagccaacatgataacattggtattttggaaagatggtttttaaaaaagaaaagcacttttccccaattataaaattaatgcttttgaaaatttggaaaatacagaaaagtataaaaatgaaaataaaaatgtccccataatcctatcaccactaagtaactattgttaacattttggtgtggaaagagcattcttaattacgctggtggagattcattaaatgagctggtatggatgttcaaagtcatttaatccaaacgtacatcagtgaagaatctgggtcatggaagttttccaagttgacataagcgagttattggaggcgtcgtattaatgccaggtctcctccattcctccctagctgatgttctttccacagcaatctcctgcaccctgttgaggtctacgcctgtgacacaggccaaatagggtataggactagatttactgcagtcagtaaaataaaataatacttaactgaacagataggcaaatcttggtaataaaggcatatctagattgttttttaatttcatttttaataaagattagataatgactcattggattaatctgtattatcatataattaaatctcaactctccaatgctgcaggatataaatgtttttgtgaaagcctctaataaaaataacctggtccagtcttctgaaatgtgacattgacttactaaattaacaagttataaaataatgatttgaaaagtgttttttagaaagctaacatgttcttgttaatattcatagaatagtgtgtaatacagaataatttctagaaatgtttgtaaaatggatgagagtagatgaacaatgctagattattggcaagctgcatactggcagttaaaaagagattaacatgctattatcaatacttttaaaaaattaacgagacaaagttcaggattcttcaacaactataatcctcaacttacaataaatttatccagaaaaaatttactcggttaaatgattatcttagaattaatgcttatatttttatttttcttaaatgttcttttgcttttcagactctaaaatttcattttttttagaaattatttttgactttcccagcagtaactgcccttagagaagcactgtagaacagtggaaagtccagtttggagttagacctgggtgtagacagacctgggttttaaaagtcagcttttccaattattaggtgtaatttagtgtgtttccttatgtttaaaatggggtggatgattcctgtttcacatggcggttggaagggttagctgtatagataaagcacttggcacagttcctggcacatagtaggcaggcaataaatggtagctgtttctattgttacagtgaaagcctgtttgactgcataagccattgtatctggagtcgttacttcatcactgagcaagcataagaattattccttttatgcttgccttctttctttcctgtgttaagtaatatttacattttcccctgaacttacaagccaccatatttttatctttatttttattttattcatttcataattagtatttgttatccattagcataaaggcattcctaaaatacgattttgatattgctgttgtatttaaacattttcaaaagtgacacaaatggaaactggaatggcatactagttcttcctgctttttttcccctgactatttttgttatagactgaaataatcctccatttcactttttggaatgtggatataaatatttttaaattcatttggtgacaaggcaaaaataa

SEQ ID NO: 39734 - DNA, 2300 bp, Homo sapien
ggatagcaaaaaacaaaaacaaaaaaacaaacaaaaaaaagaggggcgggggaatcatcaatactggaaaaagctaacactgttacaggcactcatcttcatcgctccgtgttcagcaactgttttactctgtaaattcaaagatagaaggctttttttttttttttgagacggagtctagctgttgttgcccaggctggagtgcagtggcgcgatctcggctcactgcaacttccacctcccaggttccagcaattctcctgcctcagcctcccgagtagctgagaccacaggcgcccgccaccacgcccggctaatttttgtatttttagtagagatgaggcttcaccatgttggccaggctggtctcgaactcatgacctcaggtgatccacccgccttggcctcccaaagtgctgggattacaggggtaaacccggccttgaagtctctttaccctaaagttacagggcaaaaagggtccaaaaagttgttacaaggacgaacctcaagaaggccaagatcactcagccttctacaattccttctacaccatccaagttcatctgcgaaatatgagtctccgcccttccaggcctaactctgatcactggggatccccatcctccaaggtgggggccactgatgtcacacccaaggcaacacaactgtacagctaaacttttaagaaggaaatattttgaagattaacctgaagaggatattcaactaagatgcattcctaccacggactgataactgtgtgacatcaaacagatatattattataggaatactaaggaaaacccacaatatcctttggcgtgagcccaaactacacaaaattaaatgtgtaatgtgatggtgttaccagggtaccgtaaaattaatcgtccaagtgggaaaatcaaggaagacgaatgccagcccccacgtgcagggacacaggctggaagggagcgctcctcagccccgcacaggacggcagctgcccgggtggcggaggcggccaagccggtgcacggccacgacccccgccggccgagcgaggctggggtccccgcgcgagctgccccggctggggatcccggcgcccctcgtccgccctcggagctgctctcccgggagccgagacgcccggcgcggggaatggggagacgcgaccccgcgcccgtcccgctcagcaaaggagcagagaacgaggcggcccggtgggtcgggggcggcgaccccagggccgcaggccgggggctcagggcgcgcactaggggccgaggtacagagccccagccgccttccctcccgcactcccccgggcccgggcctcccgcgcccaccccgcggtcgcccctgccctcagcgcagtcaggccagcggcctcggcggacccgacgctctgcgcccggcgcgcgcccgcggcaggagcggggacggggacggggacggggacggacggggacgcggacgggggaggaggccgcggcaggggcgggcgcggtacctgcgggtcgatgtcgcccaccgcgtaatacttgacctccctgaacatctcctcaggaactttgggcgcctggtccgacatgatcgcggcggcccgggaggctccgcggcggcgcccggccccgcccaccccccgcccccggcccccgcggcgcccggcgcccccactcgccccgccaacggccctgcccgcgcagcccgggcccggtcctgcgaatcggggtccgctcccccgccctccgcgcccccgcccgcgcccgcgccgagcgcccgaagcgcgggagccgcgcgcgccctgcgggacgcaccatcccgccccggccaccgagggggagcgccgaggagccgcccggcctccagtgacgccccgcgcctctgccgccagccacggctccggggtagctggcgccggcagcccgctctggcccttgcggttccgtggccgccgctctgcaacgagggggccccgaggacgaggggaaaccagctcccccctcggcggggccggagtgagccggtcccggggaggaggggagctggcaggcccctcccgtcgccacatgcggctgctcgggggcggcgcatgcgcgcggcggaggggggggtggggccttggggccgcgagtgggagcgggagcggttctgcggcctcctcgggcttcttggccctgggcggagtgggattgggtgtcccggctgttcgcagtggccgcgagtgcggccggacctggagtagtacctgagccgctctggccgagcaaggcgcggggccccggtctacaccgcgctggacccggcta

SEQ ID NO: 39735 - DNA, 2300 bp, Homo sapien
tgtctcagattcctttagacaccaatgctccacagttttacgactaggtaatagtccgataatcacccatgagttcctggactccggtttgttgtgggattggaaataaacgagaaaggctgcgttcatcatcatggccttaatttcttctcccaacttccggtcgtgcaggtgtcttgggcaggtgatcccgaggccactctgccgtgttctgtgaatcttggcggaagggaggcgagctgtaaataaaagcgtgaccattagaatcgccgctgtgtagtattaacctgttgagcgcggggcttcccggggctggagctgcaccgcgggctctgctgtctgggactctcctccagcgcggacccgacaggacgccagggaccaggccggtccggccgggacagcggggcctcgggcagcgacggggccgggcctccccccagcacgtccccagctcgggcactgaggccttgcggagaccccaggactcgccgcggaggccaccagtgcgcgtctcgcgtggcgctacggcctcgggaattccgtcacggcatagccgggtccagcgcggtgtagaccggggccccgcgccttgctcggccagagcggctcaggtactactccaggtccggccgcactcgcggccactgcgaacagccgggacacccaatcccactccgcccagggccaagaagcccgaggaggccgcagaaccgctcccgctcccactcgcggccccaaggccccacccccccctccgccgcgcgcatgcgccgcccccgagcagccgcatgtggcgacgggaggggcctgccagctcccctcctccccgggaccggctcactccggccccgccgaggggggagctggtttcccctcgtcctcggggccccctcgttgcagagcggcggccacggaaccgcaagggccagagcgggctgccggcgccagctaccccggagccgtggctggcggcagaggcgcggggcgtcactggaggccgggcggctcctcggcgctccccctcggtggccggggcgggatggtgcgtcccgcagggcgcgcgcggctcccgcgcttcgggcgctcggcgcgggcgcgggcgggggcgcggagggcgggggagcggaccccgattcgcaggaccgggcccgggctgcgcgggcagggccgttggcggggcgagtgggggcgccgggcgccgcgggggccgggggcggggggtgggcggggccgggcgccgccgcggagcctcccgggccgccgcgatcatgtcggaccaggcgcccaaagttcctgaggagatgttcagggaggtcaagtattacgcggtgggcgacatcgacccgcaggtaccgcgcccgcccctgccgcggcctcctcccccgtccgcgtccccgtccgtccccgtccccgtccccgtccccgctcctgccgcgggcgcgcgccgggcgcagagcgtcgggtccgccgaggccgctggcctgactgcgctgagggcaggggcgaccgcggggtgggcgcgggaggcccgggcccgggggagtgcgggagggaaggcggctggggctctgtacctcggcccctagtgcgcgccctgagcccccggcctgcggccctggggtcgccgcccccgacccaccgggccgcctcgttctctgctcctttgctgagcgggacgggcgcggggtcgcgtctccccattccccgcgccgggcgtctcggctcccgggagagcagctccgagggcggacgaggggcgccgggatccccagccggggcagctcgcgcggggaccccagcctcgctcggccggcgggggtcgtggccgtgcaccggcttggccgcctccgccacccgggcagctgccgtcctgtgcggggctgaggagcgctcccttccagcctgtgtccctgcacgtgggggctggcattcgtcttccttgattttcccacttggacgattaattttacggtaccctggtaacaccatcacattacacatttaattttgtgtagtttgggctcacgccaaaggatattgtgggttttccttagtattcctataataatatatctgtttgatgtcacacagttatcagtccgtggtaggaatgcatcttagttgaatatcctcttcaggttaatcttcaaaatatttccttcttaaaagtttagctgtacagttgtgttgccttgggtgtgacatcagtggcccccaccttggaggatggggatccccagtgatcagagttaggcctggaagggcggagactcatatttcgcagatgaacttggatg

SEQ ID NO: 39736 - DNA, 2300 bp, Homo sapien
tgtggaattttccatttgtggggtcacgtcagtactcaaaaaaattcgaattttagagcattttggatttcagattaggaatgtttaacctaagtttgtaaaggaaattttttagccttagaatagggatgtttcagattgttcaagagacaaatgaaagactaaaacaaccagaaaacattggaatgataaatcattaagtatatttaaatgtgcgttgtttacctcctgcccatacaaaaccactcatgacatacatacaaatgtaaggacaaaactgtagtcacctgattaacaagagccagagttcattgcatgctgatcaacgaaccaacacaacttttatcatacactaaaaaaagggtagaacaaaggccaacttaaagcctggaaagtgatctaatctgttaaattagtgtaccgcagagtaattttgaaagccttctcgttttgttttgttttttttcagagacagagtctcgctctgtcgcccaggctggagtgcagcggcgcgatctcggctcattgcaacctcccccacccgagttcaagccattctcctgcctcagcctcctgagtagctgggactacaggcgcgtgccgccacgcccggctaattttttgtattttagtagggacggggtttcaccgtgtcgcccaggctggtctcgaactcctgaactcaggcaatccgcccacctcggcctcctaaaggataggattacaggcgtgagccaccgcgcccggccccttctcttttttaaaaccaatttcactaacatttacttaaaaatgattttctgcttggcagaagtgacttaaggcatgtgggggagacactgcgggtctgtctcagattcctttagacaccaatgctccacagttttacgactaggtaatagtccgataatcacccatgagttcctggactccggtttgttgtgggattggaaataaacgagaaaggctgcgttcatcatcatggccttaatttcttctcccaacttccggtcgtgcaggtgtcttgggcaggtgatcccgaggccactctgccgtgttctgtgaatcttggcggaagggaggcgagctgtaaataaaagcgtgaccattagaatcgccgctgtgtagtattaacctgttgagcgcggggcttcccggggctggagctgcaccgcgggctctgctgtctgggactctcctccagcgcggacccgacaggacgccagggaccaggccggtccggccgggacagcggggcctcgggcagcgacggggccgggcctccccccagcacgtccccagctcgggcactgaggccttgcggagaccccaggactcgccgcggaggccaccagtgcgcgtctcgcgtggcgctacggcctcgggaattccgtcacggcatagccgggtccagcgcggtgtagaccggggccccgcgccttgctcggccagagcggctcaggtactactccaggtccggccgcactcgcggccactgcgaacagccgggacacccaatcccactccgcccagggccaagaagcccgaggaggccgcagaaccgctcccgctcccactcgcggccccaaggccccacccccccctccgccgcgcgcatgcgccgcccccgagcagccgcatgtggcgacgggaggggcctgccagctcccctcctccccgggaccggctcactccggccccgccgaggggggagctggtttcccctcgtcctcggggccccctcgttgcagagcggcggccacggaaccgcaagggccagagcgggctgccggcgccagctaccccggagccgtggctggcggcagaggcgcggggcgtcactggaggccgggcggctcctcggcgctccccctcggtggccggggcgggatggtgcgtcccgcagggcgcgcgcggctcccgcgcttcgggcgctcggcgcgggcgcgggcgggggcgcggagggcgggggagcggaccccgattcgcaggaccgggcccgggctgcgcgggcagggccgttggcggggcgagtgggggcgccgggcgccgcgggggccgggggcggggggtgggcggggccgggcgccgccgcggagcctcccgggccgccgcgatcatgtcggaccaggcgcccaaagttcctgaggagatgttcagggaggtcaagtattacgcggtgggcgacatcgacccgcaggtaccgcgcccgcccctgccgcggcctcctcccccgtccgcgtccccgtccgtccccgtccccgtccccgtccccgctcctgccgcgggcgcgcgccggg

SEQ ID NO: 39737 - DNA, 2300 bp, Homo sapien
cctatgcacacacacatccttggtgtctctttgcatgtctaaatttcctcttttcataaggatgtcagtcagattgaatgaggccctatcctatggcctcattttaacttaatcatccctttaaagatcttatttctaaatatagtcacactatgaggttctaggggttaggacttccatatataaatctggcagggggtaagggaggggggaaggagagacacagtttaacccataagaggtgacaacccaggaaggtatatttcccaatactgccatttcagaggtaccatatggcagacgggagttttataccttttcagattcttttccttttcagtgtttttcaagataaaattggggctatgctttaagatgaagctgaaatattatgattttttatttgtgtatttttaagagataagccagactttctgaacagggtttgtcccttctggaaatgctccattggatctctcctttgtgggaatattctattcagtccctaaatttatgacactctatttttcacaaattatcctcagtcatccttggctttgtccttattaactattctgctgctcacttagctatcaatacagacagctgtggcctggggaatcagtagggaatataatcacaagcccataatgcctttcaagattcatagagatccattgaggcccgcctgtgggcaacacagttcatccattcctccagataacaggccctgagactagatgcagaactttttccaaagaagaggattcatagtttacatctcattcccattagttccatgacctcaagaaggtgatttgccttaaagaagcacaagcttgcttccagattggggccatgcacagttgctctgcatgcaggcagtcaccatcagctgtttttaagtggtgtttgaaacagccctgtgaataatccggtatttaatgatgttgtcccgtcctctaggttccagtggaggactttctcttttctcagtgcattctcctgatacttgttttactctgcaagaaacaaaatcttatatgaaaacatgttgctaatctttaaatagttaaaactttctgactaaatttacttgtaaatgcacaggatttcacgacactcattttatatacttaaaaacaaagcttattaacaccttacttttttcctgccatttctgtccatcatttttaaaatttcaacttcttttatattgctatatcatgtgcctctttatgaggtgctttcaatcataatttctggttagaagcttctgatattttctcagtttctgtggatgtgtttgtggttgttttgtgtgcatgtgtgaggggagagttaaattacctctttcttttgagtgagatggagctcttataataacttgtatcccaatttttccttctcaggaagcaaatttagtagggaccactggagactacccatctgccttatgactctgaggagataaagcattcttcagccattcctgttggagccaggtgaagcattctagctccaacacctcaaccatctctaggaacagcagcaactgctatctcgcctctcctcctttaaggaaaacaacccttaagggaagcaactgagagctgggtaagaagaaagcaatcacgtgctaaaatcttccggagaacaaaagttagtgaaactatcttagacccctaattcagaactcttgcaggaagagtaaatacttatggaaagctgagaaagcagtgtctagggcctccagtccacccctagagggacgtgtgggggtggctaggggaacgttttgaggaaagttcattggtcaacttgttcaacgtggcaaactcatttcaggcaagagaggcagcaccgtggacagcgccaaccctcctgctcccgggcggggcgaggtggcagcaccgcggacagcaccacatgtggtggcgcacactgggagccgccaggcgcggggagcgcagcagcaccgcggacagccccaaagccgcgcgctctgagccaggaggcggggagagatggccttatcagctgatggcttacgtagggctagatctccacttggataaggcaggtctcggtgggcgcgccagcattcgctctccggagctgcagcctccgaaggggtggcgggggcaacagggacagaaggcaggtcccagaaagcaggttcccccaaaactggcttccctagcacggagttaaggctgcagccggctgcctagagagaagggtgggcagggagacaacgcggtgagagcgactgctctgacgcaccagcccctctcctg

SEQ ID NO: 39738 - DNA, 2300 bp, Homo sapien
tgctgctcacttagctatcaatacagacagctgtggcctggggaatcagtagggaatataatcacaagcccataatgcctttcaagattcatagagatccattgaggcccgcctgtgggcaacacagttcatccattcctccagataacaggccctgagactagatgcagaactttttccaaagaagaggattcatagtttacatctcattcccattagttccatgacctcaagaaggtgatttgccttaaagaagcacaagcttgcttccagattggggccatgcacagttgctctgcatgcaggcagtcaccatcagctgtttttaagtggtgtttgaaacagccctgtgaataatccggtatttaatgatgttgtcccgtcctctaggttccagtggaggactttctcttttctcagtgcattctcctgatacttgttttactctgcaagaaacaaaatcttatatgaaaacatgttgctaatctttaaatagttaaaactttctgactaaatttacttgtaaatgcacaggatttcacgacactcattttatatacttaaaaacaaagcttattaacaccttacttttttcctgccatttctgtccatcatttttaaaatttcaacttcttttatattgctatatcatgtgcctctttatgaggtgctttcaatcataatttctggttagaagcttctgatattttctcagtttctgtggatgtgtttgtggttgttttgtgtgcatgtgtgaggggagagttaaattacctctttcttttgagtgagatggagctcttataataacttgtatcccaatttttccttctcaggaagcaaatttagtagggaccactggagactacccatctgccttatgactctgaggagataaagcattcttcagccattcctgttggagccaggtgaagcattctagctccaacacctcaaccatctctaggaacagcagcaactgctatctcgcctctcctcctttaaggaaaacaacccttaagggaagcaactgagagctgggtaagaagaaagcaatcacgtgctaaaatcttccggagaacaaaagttagtgaaactatcttagacccctaattcagaactcttgcaggaagagtaaatacttatggaaagctgagaaagcagtgtctagggcctccagtccacccctagagggacgtgtgggggtggctaggggaacgttttgaggaaagttcattggtcaacttgttcaacgtggcaaactcatttcaggcaagagaggcagcaccgtggacagcgccaaccctcctgctcccgggcggggcgaggtggcagcaccgcggacagcaccacatgtggtggcgcacactgggagccgccaggcgcggggagcgcagcagcaccgcggacagccccaaagccgcgcgctctgagccaggaggcggggagagatggccttatcagctgatggcttacgtagggctagatctccacttggataaggcaggtctcggtgggcgcgccagcattcgctctccggagctgcagcctccgaaggggtggcgggggcaacagggacagaaggcaggtcccagaaagcaggttcccccaaaactggcttccctagcacggagttaaggctgcagccggctgcctagagagaagggtgggcagggagacaacgcggtgagagcgactgctctgacgcaccagcccctctcctgcacccacacgctgctggccgcccagcttctccccgatctgggagatgctcggctctgggcggccaaacagcctttccaccaaggcgaggagccctgggctcctgacagcttaggcgggccctggctgcgacacgcagcccctcgcctctgcttccttagcctctgagggcttcagacctgccgcgcttgcagccacaccatctccaacggatgctcactagcaggaaattggggccaaattcacaggcactttccagaaactcccccactggccagaggttgcaaacatccggattggctctgggcacagtggccgccttaagtcctcctgaacaccccttctgcaagtaccccagggcggtctcctgacccagagatggatttacctgtgaacctaacctccttttccctctccaccccctcccctttggagaccaaccacagcctcggcaaagacgacctgcgccccagctcgcccctgctctcggtcttcggagtgcttattctcaccttgctgggctttctggtggcggcgacgttcgcctggaacctgctggtgctggcgaccatcctccg

SEQ ID NO: 39739 - DNA, 2300 bp, Homo sapien
taaaaggagggcccttggaggtgaccagtcttcttgttcctggtctggaatttgagtggaccctcatacacatggaacctcacttcaggtagtttgatggaagcttcagtgttcttacccatcagcactctttgttcagcttagaaatctaatagatcagagttacccaaattcagtacgattgacattttggtctgaacaattctctgttgaggggctgtcctgtgcattgtgcaatatttagcagcatttctgacctctctatactacatgccattaacaccccatcctcaattcttttttttttttttcttgagacagagtctcactctgtcgcccaggctggagtgcagtggcgcaatctcggctagctgccagctccgcctcccgggttcactccgttctcctgcctcagcctcccgagtagctgggactacaggcgcctgccaccacgcctggctaatttttttgtatatttagtagagacggggtttcaccatgttagccagaatggtctcgatctcctgaccttgtgatctgcccgcctcggcctcccaaagtgctgggattacaggcgtgagccaccgcacctggccctcaattcttaatcatccaaaatgtctccagacagcccaaatgtttcctggagggcagtattacccttcgctgagaaatgctgatataggtaaaagaacaggtagcctctgacccctcgttttcttctttcctctaggatgatgccctctcccctttttccctagctacacctctggtccctctaagtttgactgactggggatggttagagttagctactgactctagaaagcatatacagagctcagggtggatgtctatttccctccctagaccacactcttcatgggcaaagacaacatctctatcattcgcttacctcttgcaccaaacccatagtatgcactccatatgcttccttaaactactttcttgtttcagagccaacaacagaaaatggggactgtgtagacttctggtctaacctaaatgtgtgaattagattcaaggaatcttccttggtaatgaagggggagcagcctgcagaatcatgagtcgtagggtcagattattaagagttaacaaaaaaacaggagtgggagaagatgagaaaagctccctcgctgttgctatagtggttgtcatgcagtaaatacctctcatagagagctagggaattctctttcctggatttttaatttccttccgcagctttactcatgttcaggaaggcagacaagtggtcctcagtcacacctacaacctaatagggctgtgggggatagacccataaagtaacaccctaaggcagtggaagcagataacaaatgcaggctccgggactagtgcagtcaacatcttcagtcttacgtcaggacgggaggatgccacagaatgacagtaacctaggtgataccatatttttaataaaccggctgctgtaatttgcaaagaaaaagaatagactaggatgaaatgctaacctgcatcacctgactcatggcagtcttcttatcaaatcatgctcccatccctgcctcccctcctcctggaacacccccattctaagtgctggaagctgctagttttttccagtgtactgaatcagcgtaccccagataccagcttattcagatgttctaaagggtgttatagatccatagaatttgggggccaaaggggaccctgcagaatgacgcagtctgaactcctcgtgttctgtatatttaacaaacaacccattagagaaggaacatgatatgattagccctgtgagagggaacatgtcagagcaaagtacatctctgatgctttcttccactctcccagtttactccccccactcccaaacacaaaaagttccattttctacaagtgtgggggtggggcaggtggcctggggatatagcctgtacagatgcaagtcgagtatttttaaggattgctgagatacccacctccacagcttcggatatgggtgagacgctattggtcttcctggagcccacgcggaacttggcagccttgtagatcttccagtacacgaagagcaccacacagagcggcaggtagaaggcgcctacggtggagaacacggcgtaggaaggctcgcggcttacctggcactcctcgctgccctcagagtacgtctctccccagccaaaaagcagcggggccagagagatgacagcggagagtgcccaggtgagcgcgatcatgacgttggagacgcacttgcgggtgcggagcgtgtattccatgtg

SEQ ID NO: 39740 - DNA, 2300 bp, Homo sapien
cttttggagcacttccaagaaggtgcccaggccaagtctacttccatcccatgtcctgaacttcgacgtggccacaattcactgcatgaggagctgggaaacagaatcttgattccagatggccacagagagagctcaaactcggtttttccttactgaggaggacaggcagaatggatattggacacggttggctgtgccccaaagagaaactaaagagcggcatcttaggatgataaaaggtgactcaaatgtgctgttgcttcttattcgtttaggaaacagggtaataataaaaaggagagtgtgggactttgacccttaaaagaatcagcctattggagccaactgatgcaggggaaaagcatttgcactcatggggaagaagaacagtagcctgatctctggcctttgagttttaatccacagctgacagtaaaccctcttctgatgtttatgacaggcatgagtgcaatccctgaccagatcagccaacgctgctcctccaatgacacagaggaacgtcttccgaaagcatggccggccctcgcgtgaccttccattgaaacttgcccacgtcagcctcaggctatgctgttgccccagtttaatcattaatcacctcacttttgctctccaaagtttccaggttttgacagtagtctgaaccacctgtgtcagaagtgcctagaagcttgctaaaatatggatttctaggtttcatctcagaaatagtcatcaaaacccttggatggctgggcgcggtggctcacgcctgtaatcccagcacttggggaggccgaggcgggtggatcacgaggtcaggagatcgagaccatcctggctaacacggtgaaaccccgtctccactaaaaaatccaaaaaaaatagccgggcttggtggcgggcgcctgtagtcccaactactcgggaggctgaggcaggagaatggtgtgaacctgggaggtggagcttgcagtgagccgagatcaggccactgcactccagcctgggcgacagagtgagactctgtcaaaaagcaaaacaaaacaaaacaaaacgctggacatagggtctgggatattgccttttaaaaaacatgcaataaaacttgagaagcagtgttctcatgctgtgtctacaccaccgcaggccctccatgtattttacagataagaaaagccaggtctggggatgaagggacagagcagagacttggactgaagtctcccggctgtcatcctcgtgtgttcccccaaggccaccttgctggatggttgaggccctggccctggttccttgtggttcagtgccctccagtggagccctgactgatgcccatgccacagctgcctcttgggattgttctaaacatcaaatggggtaacagccgcaaaagggctctcggtcagaaggccattcggctgagagtgtgtttgccttctgggcgttttggggtgaggccgtggttttgtatacttacatttttgtttaaggatctaatttatgaccaagacgtaccacactaggcatctggtgggcacgtggtcctgctgcccacgtgctgcccactggctgaagctgcgtggtgctgctgcactggctgaagctgcgtgtctctgctgagtgagaagtcgagcgcatgggagggtggaggcctgtcctgggtcaggctgaacggtggctgagaggacgtcgggctcagagaccctggcccaccagaccctcggcattcccagcctccttaatgtgctgtgcattccctcaaattatccacaatccggcaccacccagagtccacgctgacgcagctgcgcgtctctgagggcccaggcagagctgtccttttgaagcttgtctctgggctgtgtctgcaccagaaaccggctcgccttgcctgccccaccgtgtccttgacaacagctcctatttcctttgtttaagacagagcataaatattagtgggcgatttagttacgaacctaacagggatgtcttggagacagctttagtgcagaagccaatgaatttggatctgtctagtgcaaagttcaaagctacttaaagaaagcttttcgtttgtttgttttcctttctctcttcatttggtgaaatgtctgggaagtgtacggctggcaggctgaaaaagtcctgggagaaaataactcgtgctggagagcagcaaagtccttcccactggaacttcctagacgagtcctttgggttacacatctggaattacttttactagacaaatctcttttcactggacgtctctgatttcagaatgtgtgataatt

SEQ ID NO: 39741 - DNA, 2300 bp, Homo sapien
gaggccacgctggaggccctcagcaggaaccccacgggcaaccttcccacattcccacgggacatcttggtcggtgtaagtgcaacagccacagagccacagggtgcctctatgactccaggatcttccatggttcataatgtcccagtacagatgagaggagggacagagtcagagaggctgggttgtatgaacactggtttattaggtagataggaaaagaagaatgaagtcaatagtctttagcaagccaactagctcaaggaatagacagcccctttccattctggagacaacacataaatctattaatattaaatattgtcatgaggtatgcacctgcccacaggggtattatgatggaaatactggggtagtctgcagggccaggtacaaatgacgggaaacaaagccagagaaactgaaatacctcttggaccccagaagacagatgtactgatttctgggatgtcaggagcccagtgcagagcagctggataggtcgctaagagctttcccttctgcttatcgggtctcacacacctggataaaccagttattgaaagctgacctgctaatgagaagcttctggcacttgctggtgtttcctaattgaatgggtgactgccccgcatctcagggccggggctcccgtgcggacgcctctccatgaggttagcagcttgatttagatcagcgtgcgggacggggagctcacagtggggtcgaggagacacagcacaggcttctgaaaggtgccctgtccattagggagcaccccatttacagatgggtcatccttcagctcactagtttcccagcgcatgacagtgggtagcttttttttttcctattataaacaaatcttcgatgtgactgcgatgatctacggatgatctacgtatctggttgtgtgatcctcaagcacttatgcaaggtggagtgtaaacaatggccaagacccaaactgcaatgttccctgaagtccaacctgcttggagtccttgggaacgtgtacaatggttaacaggcttgagaggagtcagctgggagagtgagagcgagactgccctgcagaggggccgctgaggatggacccctgtaggccgtccacacccaccacgcgtgtcatcctcaggaaatgcaaccggatgctcggaatttcgcccctaaagcgactcagggcagtctcagctcaggaagacttctttttttgaccttctggcttaaagccacaaccccaggctgaggatgccacatcaacggcgtttcctcgccacgctgcaggcgtgactcacgtttctaagcctgcagggtccccgggccaagcgcggctactgagagcacagcgtcctccctcagcccctgctcatctgcacggagcaaagccgcagctttctctgctgtcagcgctttatacgactcggatgtaggctctgagcgggcacgggcccgccctcagacggcgacccgaggggcaaacaggatggaggcgcgctcccttggaggctgtggtctcgattttatctgctcctgggtggtgcgggtggtttgctctctaggcgtgagcaaaggccacaaggggcccgaaaaaatcacccaaggatgcaagcccgccattgcgctgagcaggggcctccccgccgccagagcccgcgcccctccagggaggcccgcgcgatcgagacccgccgcctcccggccaggcgcgggacaccaggcgaggggagccaggagccgggaggggcggcgccgggcccgcaaccccaccctgtcctgcctccgcctcctcccggcaggaccgtcccctcccaggccccagctccgcggccgcccactcgcagccggccagtcccgctcgggcccgcgtgccccgcagccgccacgcgccccgcagtccgtgccgaggctcccgcccgagtgcgcgcgggccggcggtggcgtgtgcgcacgtcatatgggccgccggcctcccattggttgcggccgcctcaccagaccgcgtgcggacgggctcgcgggcggggcggggcaagctcaggccacgcccctgggcggtgcgcgcgggcggtgggtaggccgggcaggctcacgtgatgcgggccccgcggcccgccatataaacccgcgcgcccgccaggcgctgcggccgtcccgggccgtgactcctcctttcccccgccccgcctccgttcggagagccggcgggcgggcgcctctcggccaggtacgcggccggctgggataggggtcgcgggcgggctttggtcgcgcagcagccggtcctccccggaggtagg

SEQ ID NO: 39742 - DNA, 2300 bp, Homo sapien
tccaaaagtgagcaccacaagcccctatccttaagcagcttagagtctggtggggaaaacaaaccagtatgtcagtgactccagtgcagtgcagggagcatcctgtttgctttgtggctgacgtttgtcagcttactgctgaccataggcttcagatgctttgctgtgttcattccttacagcaataccatgtgtagcttcatttatagatgtggcaactgaatcacaggtgaagtcacatccaagggtgcgcaggtagaaaggggccaagccatcgttggtaactgctcctgctgccttggtaggtgtgtctcctgcactgtggaaacacattgcctcagttgactcactgaaaacagcaagcagcagagaggtttgtagcagattaacagagggctccgtgttgaagaactaggacaggtgtctgtaattattaagtagtgggtagaatgttttcatatttgttctcggagggacgggatcctctttcgtttttcgaaacactttatgtggctgtactaattgaacattttttgagaactatatctagatttaaaattccatgtttcatatacatttggcagaatagtttctttcctttaaccaaaaacttgatcttagaaatgaaatagtttagccttcagtatttgtaattggatcctcaagggtttctaggaatatctggacaatttctcatactctcatattctacttttttttaaaccatcagccaagagcataagtaaaatttttcatagtatgttttttacctatttatttattaagctatagtgaagtaaagttaatttggggggtccatttttcagaactccaaaattagaacctgatgaagtataataaattgaaaacaacattttttatctgaatgtttgatgcaaactgtgtttcttgtttctcagttgaacctaaaaggtatatttctttcatactagactgaggtgaaacaattgcagggttctcaagagccctgggacacagtgacccttgtgtcccagcatccaaccccacgggccggcaccccactcccccctacagacattcattcctgccttcatctttgccattttacttctcttttggaatgccattccttcccacctgtccaaattccaagttcatgtctataaagaataactattccagaccacagtgatctctttctctgtgtcccagttacataatccttataattttacacatgagaaaacaaacatgcagagccacgtcccatcagagggcaagctgggatttgaggctgagttttctcttcttggtctggtgttctttccgcagcttgaggcttgaccatgcgggaaccagatggagaataagcgaagcctatgtggggctgtctcgccccgtacttgcccatgtgcatgtgtgcacagtaggtgctcagtgcctcgtacagaacatgctagaactcccgaaaatcaactccagggccactctaggagcatgtgacccagactgtcaaagtcacatcagcaaatatgtatctcatcacgtgcccagccccagtactgggtggtggcaggagtgtcagagctgtgatgtgacagggtgtggacagatgctaacctttttattgtaagatagaaatcacaccggatgaaaagacaaggtgaactacatagtcatttaagttctgtgtgctttaggcaaatgtggatattaaatataaggttacatattgctcatattaatatgaataatccctgcttgattccttcctgtgtttactgagatatgttcaactacactaaataatagtgatttttaaaaaacttttctaaacagtacaattttgtgggagtggtactcaaagagaacaagaatataaaatcactctgaagttatagctgataattttttctaggaaaaggactggtttgagtaatgtactgtgttactaatgaccacgttgaaattctggaacttgaatctgctgtattctaacattgtcaacttttttaaaacagctgttgttggcctactgtacccctgtatcgacagtcacctcggagaaccccacaaatttaagagagaatgggccagtgtcatgcgctgcatagcagtttttgttggcattaaccacgccagtgctgtatccttaattttctgtgctacgtccagagtatcttcttaggttatatattgaagcgttttgttttgttatatactcaaatgactccatgtcataatacagacatgatggtggtacctacccatttcagattactaaaaagagaaagaagaatggggctatcgatgacttc

SEQ ID NO: 39743 - DNA, 2300 bp, Homo sapien
gcctgtcatcgatgacccgaataatctctgcaccagatctgtgtttgtctcttccctgctgtaggtcgctgtggccttgcccctcagaacaacagagcaatgggctgcggccaggcagcgctctgcgctttgatgaattttaaagcgttggagtgatcacaggatgtccgtccgagtttcacagttagcgagctgctgagctgagccgagctgagggttggcagggtagagtcctatgggagaaacactgcttggatcacagagatttctgtgtatcaggaaccaacaaatactaagtaagcacttgctgtggctaaatgcttaccacatcggctgagtagggggtgtgcagatgggggagtcccacagcccccaaaaccagctacaacatccacgttttactcagacaaggggccctcaagcaccacctcatgccgaagtgctgcttcacgtgaatagagctaggattctaagccaaaaggcctttctagaactttctgcatgtaccaaagaagctgcttccacctcactgcctcctttccactgttagtgttctgctgaggcttctcttgggctctgcctctccctgcccaacacctgagaaaggcctgatcagtgctggaggcactgggtggcacctctcctgcggacgtgcttcccacgtaaggcaggtatagggagacctgcctgtctagaaagacatatgtttacatgtcagagagaaacacaacacctgcactctctaaccatttcctgaaagacccctcttgacacaccttaggggcttcagggccacactgcctggcacagctggttcccagtgtggacctgtctccactgccagcccctgccccaccctctccacctgagtcctgatccctggtgaccaagagaggctgtgctgcttctggccttcacagtaagccagatggcctgggaagcgagactctctctgcctcccagcactccaggctgcagttgctgtttcatcatccatgggtgtaaaacaccaagcaagtgacatgatacagaatgacctccctgtgctggcagtggcaccacagaaacaggaagactcagagccagaagctgcctgcgcagattgccattatggagcctgggaaatcaagtcctagaaagattatctgtttttttttttttttttgagataggagcttgctctgtcgcccaggctggagtgcagtggtgtgatcactgctcactgcagcctctgccttctgggctcaagcaatcctctagcttcatcctcccaagtagctgggactacaggcatgcgccgccatgcttggctaattttttaaacttcttgtagagacaaggtctcactatgttgccctggttggtcttgaactccttggctccagtgatccgcctgcctccagtgatcctcccacctcggcctcccaaagtgctgggattacaggcatgagccactgtacctgtcctagaaagattaaaggatacctctacgtctacctctacctctacctctacctctacctctacctctacctctacctctaacctctaacctctaacctctaacctctacctctacctctacctctacctctccccacggtctccttccacggtctccctctgatgccgagccgaagctggactgtactgctgcgatctcggctcactgcaacctccctgcctgattctcctgcctcagcctgccgagtgcctgtgattgcaggcacgcgccgccacgcctgactggttttcgtttttttttggtggagacggggtttcgctgtgttggccgggctggtctccagctcctaaccgcgagtgatccgccagcctcggccttccgaggtgctgggattgcagacggagtctcgttcactcagtgctcaatggtgcccaggctggagtgcagcggcgtgatctcggctcactacaacctacacctcccagccgcctgccttggcctcccaaagagccgagattgcagcctctgcccggccgccaccccgtctggaaagtgaggagcgtctctgcctggccgcccatcgtctgagaggtggggagcacctctgcctggcaaccaccccgtctgagaagtgaggagcccctccgtccagcagccaccccgtctgggaagtgaggagcgtctccgcccggcagccaccccgtccgggggggaggtggggggggtcagccccccgcccggccagccgccccgtccgggaggtgaggggctcctctgcccggccgcccctactgggaagtgaggagcccctctgcccggccagtcgccccgtcca

SEQ ID NO: 39744 - DNA, 2300 bp, Homo sapien
tctcttgacttgccccgaagaaatcatgttaatttatgacacactcacatgatcctgattaacaaacctagactaaatttgcatgtggcaaaatgcaatacagatatatattttaaaaaataatataagcaggtttttgccaactcttttctcccacggtttaatgacctaccatcctggttcatacgttttttaacacctgactttggatatttttttaaaatgaatcgatttgtagtcattgcctggctgcctgtggggaaggagctcctgccgttggcagacacctctgcagccaggcgtggggtgtccttccatcaaagcaacgccagggggcaagaagcgttaacaaagcccgggacgctccgcactctccctttatctacccgtgtgtgcgtgtcacactttccagggcgaaatgtcattttgcaaggttatacatttccaattcctcatagagccttatcgctcatcatttacctcttgggcacaaacaaacagcctctttaaataaagccagggaagggaagcatatacctttgtacaattaaaaatagcacaagaatgccaaaatgtattggaccttgctgttaatccgacttacctggctgacactctggcctaatcctattttctcctcgcattagaatgactctacaaggctacgttttgttcttcgggagcacagtttacctggccagtgggctgaggatcagagaagcctcaccacctaaggtggggagaggggctgcagactgcccagcctggccccagcctgctggaggtcccagtgcagagcctgcttggcgagacagaaagcaaacgaaatcactcaagggaaacttcgctggagacaaaacacattcaatttcctgaggattctgctttctctcaggaattatttgcttttgccgaggcacattaaacaaattaaacactaaaaatggaagctcctttgcttcctggctcagaaaatagttttttttttaaaggatatagtacgaacagtaatacaaatgaaagaaaacagtaacactctagctctttaaaataaactcatgtgggcacctaaagtcctttttggcaaattcttatcttgtggggcagtgcagacaatgggagcttgtgctaaacggctgctgtcactctgctgacattccaggaagcttccacgcagctacttgggcatcttttcacaccttcaccttccaaaccgcagtccctggtgatcctgacttttgcagcctggctctgggtccacacggggctggagaaggggattcggtctgaatgggttcgtggagggtggggcagggggctgagctgaggaacgcgctggcgagggagtcagatactgttacttcgtattttaggaatgtatttctcctgcacacccctccctcccctgcccacccccctctcccagtatcattgctctttgaaatgtcatgaacttggcgctttcagaccaaaccgccgggctcaggcccgagacaatgggattgtcagagggccagcgcggagctttttctgcgtgttcacggagcgttaagcctttatcccacagaacggctctgtctgaccgggtcagacaaaagccaacttgcatcttccgctccgaggggatctgggcagagcccgggtacagccctgcgcggccccagggagaggggggagagggcgcgtgtccccagccctgccaagtggcgtggggagcgcgaggccctcctcggtcagagccaccaactctggtctccgtggacatcccccttcccccgcccgctcccgaggctctagggcggcctcctggccgctgccttctcgcacccagggtcttcggcctgggctccacacctcaggcccctcaagtaatcggcctcttggtggccgggcactgcctttccggctgctctctgcacccgtctgcccctccggcctcccctggcggctacaggcgtccggggccctcgctccccagctccaggcgtcccgggagccaggcgcgcagcggggcgagttctcgtgtccgtgtgagcgcgggcgtgtgtatgcgtgcgcgtgcacgagcgtgagtgtgcgtgagcgtgagtttgagtgtgcatgcgggtgtgaatgtgtacatgtacacgaatgtgagtgtgagtgtgcatgagcgtgagcgtgcgtgtgcgtgcgagtgtgcacgagcgtgactgtgagtgtgcgtgcgtggaagcgcggcggggagcctggctgaaggcctgctgcctgcatggctgtcagagaaaaacagaagtgggagcctgctgcgggctccgaga

SEQ ID NO: 39745 - DNA, 2300 bp, Homo sapien
gaggcccctctttgtgcagcgagcctgagaaatatggaggaccgtcctccgcaagcgggtggtcgcgggcgctctccgattcctgggtgaagctagagggaaaacggggttcccgggtcagtgccccactttccatcccgggagaaactaatgtccggagagggctcgtctgatccgcacagaaaggccgaccttgagggcggcggtcgttcgggggagaaagcggaggctctgggctcgcgggagcgcggcagccggggctggcatcgcagaggagagacacgccactgccccgcatccccagaaagcgcgaggcgccgtcccagctggggcaggcggccgaggccggtcctcatgcgcgcttctcgaagcttcctgaaacaccttgcggagttccgtgtgtatagaactcagcaccgcccagcccctgggcagctcaactttctgcagccccatcccagcttccccggccctttgaacggtgacccctcttaccgctttcccagagttgtttcgtgtttgggtccactctggggggcccggtaccctctagttatctctctcttcatttatttctctttctcctattcctccctccacctctcaccttcctcctttccaggagagcgacccacgaattcctcttcctccagccaaccccagggcccagcccgcagaccctgcgagggcaggtctctgcccaccggcccgccaggcgccctggaggtgacgctctgcttcccagagtctctgttgcagccacgaattggggtctgggtcgcaggaaagcacagggctgaagcccagcgtcttggggccatttatactgaggcagtcagaggcaaagagtcccaagaattcagaaaatacttctcaggaagccgcctaattggctttcatgggacaggtggagccattaacctgggatggttttgcaggaaccaaagagctcagggcccctcctccccccaatatcatgttcaggagacccagagtcgttggaccctccctttcctgactggtgatcatcagagtttccagagttgcagaaaattctccccccaaaaaaccaagtaagcgtcaataagacttcccacaaactctcaccagccctattttcccggggggcaggtagactgtggggtttgattttttgagactcggggaggacccctggcagatgtgtgcctagccagaacatttggtaaggactcctccaatgaagaaaaagtggaggaatccagccccagcgagaagaggcttccccaccctgccctagacacaccggacagagggcacactctgaccagagccacgtccagtggccaggaggccagcccagcacctcctcccccaccattcccgtcctgggtgggggggtaattttcctgggagcagctgtgggaactgtcgtttctcatcccagcccagccagcactctgaagcctgcaggggaaggacagcacgtgggatggacactggggaaggagcttcgcaaggccagggtgcaaccttcaggccccaggtggcctggcaggccacgctgcctcggagatgcttgccagactccccaagttcactcagggcctggcagcaacctgctggctgcctctgcgggggtctgggttgctgagcacggtgcagctgcccagggccaatcagccctagggtgtccgtgccaggctgcggcctccccgcctcccccgcactgagggtactcatggcgtgcaaatgctcccgcacccccagagctgccctatcggatgtttccaggaattcacacatttccataaaaatgcattttaaatgatggacaggcgagcctggggtaacaacgggtgtttggtgggtagacaagagcaaatgggaaggagcccgagggaggagggggaagagaagaggaaacagaacttccagttggacattctgacaacagctggaaggaaagtctagaaaagatgaagagagaggaggggagaaaccaactggggctcccacccttgccgttggattcctaattctcgtttcaaatgggccctgctctccggcaaaattagtttaaaggattttaaaacaaagaaaacgagatgaccggtctgggagctcctcaatcagagtagagaagttagaggggggcgggcgacttggttttgaagtcttagctgaacagtcacccctcctctccttggcaaaaaggattcctttagaacctccgaggctcctggatttctcccttcgcaaatggagccgcatactgcattcccccgctctttcggatcgctaagcatgtttcatgaggg

SEQ ID NO: 39746 - DNA, 2300 bp, Homo sapien
ctgcctcttcataccacaataccctccccatacctgattcccatgagaagatgttgtagtcttctccagaaaatcctgatgatagcagacgatgcttaccagagaacagcagaatcggtgagaagtctggctctccgtccaccgccttccaaatcacagatgaatgcatccaatgacacgaccctgatcccatagaaccctccagctgcaaatgagtcttggaagtgtagggctttgctttccagcctctgcagccccgtggaaggtaggatgggccctgagtgtcacctccctatttgaagccttctaggattaaatcaggcctcgtgtgtaggcaaggaagggagaaggggttttggggaggcagttggttggacctgtctcatgatatgtgctctgttcattcccggcttccttcatgtcctttggtaaagcttttctgtcttactcctgtggattctgtacatttcttgagtgtatccttatgccttgtgtgtgttcggctgccattgtgcctgagtgtgtgcacctgtaagctcttggcttctcccatctctggatcatgattcatctgcagttgaaatgctcccttcctcctctcccaagtgttcaaactgagaaggctctcccctgaagcttctgctgttggtccggcacagctcaccttcctggaggcagggcacataggaacagctggcattaatactccatgatgattgaagccctggcaccaatgctgggtccatcccacaagtgcttgcatactgaccaggcaaaggcaggagccccacaaatgttggatttggcattagggaattggggatgcaggagtgttttgccacttgtttgtttttgagcggagccttctccgtgccctttgcaatgtgctgtgcatccagctgccttttctgctgaacacagccctgctctcacatcagccaggtcaccgctgggctgtctcaacctccctttccccaagctggggtcctgtgcccaccagagccagagaaccgccgacctcctcagtcacatcctcccaggaagataggtgatgccctccagcatctcttgtccacagacaccgagcagaggctgagctctgactccccagcctggtctttcctgctcaggagccgcccagcgcccgctccctcagtgcccagaaagccctgtgctttgcatgttagttgtggcctgactgtggccttcaccggaggccggagtcccattacgttccagtctccacgccagccccttgctgctgtgggggcagtaggggaggttcaggacccaattctatgaattgcccggacctgccaccagggctgcctcgctcagtgcagtgggccatcccgcgacgctgtgagtggagcaggctgagacctcagcccctgcagctgatccgccttcccggtcagtcccacatgctaaggcctgacgtcatcaggccagggtggaaactcacacctgggggaagaggagcaagtgttcgcatcgagtgtgtgtgtgtctgtgtgtgcacatgcaagtgcacatgtgcatttgtctgtgcacgtgtgtacacgtgcatgtgtgtctatgcatgcgtgtgtgtgcctgtgtgcacgtgtgtgcatgtgtgcctctgtgcacgtgtgtgtgcatgtgtgtgtgtgcatgcacgtgtgagtgtgtgtgtgtgagctcaaagtcacctatctcagagcagagacagggaaggcgtggagcagctgcgtgggctggcagcctatctgggcaccagaggaggcatctgaggccatcaggagactgtgcctgggtcaggggaaaggaaaggcggcttttcctgcttacctgttttggggcccctaacccgctgcagtgcacatacagggcaggcatgtcagtgtcctagggggacgcagtgctcttcccggcggggccagcagggggacctttccccccgggcttccagtcctccggccgccacctcaacaaggggttaacaccccctccccctcccaaacctcagggattaaaaatttatgctgtccccaggggatgtggggaggaggaggggatgtgggggacacaaaattaaaagggaaagagattatttttaatcctcttggtgggtgctgaaacaatgccgggagagcaaagccgctgagagtttgtcccgttagatccaggcgtgaaggacggactgtactacagggagcaggtaattacaaactgcacatctttctcctctccgtaagaaattcgccttaatcccatagctattgcttctccggtcaaaggtgctcagattttcataa

SEQ ID NO: 39747 - DNA, 2300 bp, Homo sapien
gcaatgttttatttatttatttggagatggagtttcactcttgtcacctaggctggagtgtagtggtgtgatctcggctcactgcaacctccacctcctgagttcaagtgattcttgtgcctcagcctcccaggtagctgggattacatgcatgtgccaccacacccagctaatttttgtatttttagtagggatggggttttgccatgtgggccaggctggtcttgaactcctgacctcaggtgatccacctgtcttggcctcccaaagtgttgggattacaggcgtgagccaccgcgcctggcctacaaccaatgttgttttataccacaatgaacactctgccttcataaggtttctatgacaagttaaagttaacacaaagtgaagtttgttcatagataaggacaaggggttggttaaatctttactcacagtaatttaccaagaacttcaaatactgggtgtccacgctaaaaaatttttccagtgggtgtttgatcaaaaaattttatagactcttgttctagagaaattcagtttcaagtggcttatgagattgtttcatctgttaatttggttttttgtggaattcttctgaagatcaccactgaattatcctgaaaaatattttctgagttaggcatgccatcctccacagttcaaaaaataatgaaaggtgataaagagttcaagccatttaaatatggatgtattaacgtgctttttaatagagaccatttttcaatgagttgcttgcaaaacattttttttggggagtgagttctcacagttgaataatttttttgtttttttttgagacagaatctcgctctgtcacccaggctggattgccgtggcgcaatctcggctcactgcaacctccgcctcctcgattcaagcaattctcctgcctcagcctcctgagtagctgggattacaggcgcgtgccaccacgcccaactaatttttgtatttttagtagagacggggtttcaccatgttggtcaggctggtctcaaactcctgacctcgtgatccacccacctcagcctcccaaagtggtgggattacaggcgtgagccaccgcgcccggccagcattttattatacgtaccgttttatcatctcttcacccatccaccaatgcatctcctgtatggacgtcttgattgttaactcacggcactggacctccagtttcatgcctctccacattgcagggtcctctacgttgttgtatcagtcacctttctaaaatacaaatcttaccatgtaaattgtttctaaaatctttcaatagaccccatagactcagaaaaacgtcccaaagtccggaatcctggcccctgcctacctttccagtttcattgctgggtcagaacgcctcacctaagccccacattgaccgatatggaatcaatgtttacagccggtgtgtacttaatcaacccccttccccgactgcgaccactcagatgcgccttcccgggccccacaccccaaaacccctgagccctttcgtccacagctgtctgaccacccagcaccctttcctttatgtcaagtatgaggatttcgtttcttaacctttctcactgctcaaaatgcaaactcagacatgagtgccgggcgctatccgtcctgctcacgtcttgttctcagggccgcaaggcgcaggggcagtaagggccgagagcccatcagggtccggcgctgcccgctgcccagccgggcgcggagaaggggacgggggtccggggtcgcgggtccggagggtctcgggttgtaggaagtgagggctcgcgggcgccgcacgagtgcgcgtgcacgttagcccggcgcgcgcggcactcatctcacctcgcggaagcacctgccggagctgtgtgcaccctttcctgccctcaacacaagccgtcggcgttcactactgtagctcattcagaccccactctccaacctactgtccaggcacagaaacgacagttaaggttcccccggaccgtacgctggaccttgcctccccggctcctaacgggagacgggctgccgtaaagcttcgctttgccgactgctgcaaagcgccttacgactgaacccggaatcgacctatggccagcagtcgtccccgccctgcttcaaacatttgggtttcaggagccgggcggaggtgactgccgcgtgtttgcgttgcacgcccaccgcccgaaacacggcggcggcctcagggctgctgcggcctcggcgggggcaggccccggcgcccgcccgcctcccggcctccatcatcccagggt

SEQ ID NO: 39748 - DNA, 2300 bp, Homo sapien
ggcagggaccaagtcatacagaactcacaaatcttggcaaggagtttggtatgaagagcaaaggaaactttggcacttgtgacaaaatggaaggaaaaactccaaagcatcatgaataaagcctacttattcttctaaaatagcaattctcaaaacttctgacctcaaaattattgaagacccaaaaatgcctgtttatctggattacattcagtgatattactattttagaaatttaaaatgagaaacgtaaaagaatacacaagcatatattccattagccatcagcataacgtcttcacatgttattcagcctctagaaaactccactgtacactactgaaagaaaagagaaaaaatacaaataacaccttagtctttctaatgaaaagagtgttcacccaagagttcccaggttacactgggaatgctataaaacaagtaattctgacccccagaaagataggtgaactatacattttaaaattttaattagtctcagatgtaacacgcaaacatcatgtatttaaactgaaagaaaagtggcatatagcaaaccaaattgccagaagcgacattcctacacttagtcttttttgtttttccattttgtcaggcaaacgttttgacagttgggccaaaattcctaaacaggatgataacaacgtaaccatctgctagcatttactaaaaaatacttctcgagtatacactagactggcttttcaacgtttcaatggtaagaactaatcccaaatgcttttgttatccatattttaccatcttttcaaagttttcaaaataatcacttaaaaagtcactttcaagtatctctccacgtttttaaaacccccagtgatatgtaattttacctgaaagtaatttacctacaattttttagagataggtgtttcatcaatactgtttatgcttgcaaacaagaaaaactatccaaaggaactgactcagtatctaaaccttttgtgtcacgttttcacttttggaagacgcacataaaacactaacaggttattagacaacaaataagttaatttaaaacagggatttattgagactttctcaagaaatctcactttccaaactggcctactgtcgcacattccttcacacaggtgaatcttttcgttatgtttttgtaatgggcttcaaatcaatctaaatctgtcaggatggccccacaatcttaaacacccaccctacagcgacctgccccgctctccctaagtgacactgtctcggggggtggggggggcgctctcctacccataggacaccaggccggcttcggcacttaatgcccgccaacgccagagatgggcctgacacttaggcagccttgcaaagtagaggacacacagaagttcacaggtaagtacgatctgcacagcggagaggaggagcgagaaagggagaatgacaatagcgagggaaggcgagggagaaaacggaataggccgaacacaaagagagtcggagccggggagagcctcgtcctctcctaagcggggaggccccccggcctacacccccgcccaccgcggcgcggtcctggcccccagagtccggctgcctcacgtacctccggcgcctgctcctccgctcgctcccagggcggccgccatggcactcgcggggcccggccttcagcctcccccaccaagccagctggtgggccgacgtgcctggtccgggcccgggtacgggtgacggaggacagagaagggagggggctgcaggaggcagaggcgaagccgggcgcttcgcggtccacagctggcccttcgcctccgcaggaagaaaacaacaaactaccgcaacatggccgcgcgcccgcgcccgccgcggtgcaccctgggatgatggaggccgggaggcgggcgggcgccggggcctgcccccgccgaggccgcagcagccctgaggccgccgccgtgtttcgggcggtgggcgtgcaacgcaaacacgcggcagtcacctccgcccggctcctgaaacccaaatgtttgaagcagggcggggacgactgctggccataggtcgattccgggttcagtcgtaaggcgctttgcagcagtcggcaaagcgaagctttacggcagcccgtctcccgttaggagccggggaggcaaggtccagcgtacggtccgggggaaccttaactgtcgtttctgtgcctggacagtaggttggagagtggggtctgaatgagctacagtagtgaacgccgacggcttgtgttgagggcaggaaagggtgcacacagctccggcaggtgcttc

SEQ ID NO: 39749 - DNA, 2300 bp, Homo sapien
cccactgtcccccatcctgtttctcattagtcatgaaacaagtactagtcttcattttctctactcattttatagttgatacacttacttatctttttaaaaatgttttcgttgagaaaaaataagtagttattaaaggttgatttatttccatgtacttgtcagcaagaggcacagatactttctagatttttgcttgtataattactaatgcctgtttttatgactttgtcagtttgccctgggaaactggcatcacattccatttttagttacttaaggtgatggtatagacgagtgcctgtctttaaaagaggtgcttgtgtgtttttggttatctggaatcaaattttcaaatggggttattgtaaatattgttgactagacagcattgttttctccctgcctctggagggtagttggaacactgaagatacaaaaattgtatttgatagatgatagtggttttaaaatgttggaagaagctatatgttattctcttataactatcctataggagtttgtgaaagattgtttttcaagggctgttaagttcttgtcctgcatctgtcactgctgtgtgactttaggcaagttatttcatgtcctatccttgttttctttatctgtaaaatgtaatataggacttactggaggataacttaaaataacgaataaagtctttagtgcatgaattaaatgatttgtcaggttgtttttagttctaaaaggcgttatatagaaacatgcatttcattataactccatatatgcattcccggagattatagtattctgcaaagtggcatgctaaaaataaacatgattttttggtaaaataatggttttgctgatttctcaatacctatagaattttgtaaccagagcacctattaaaaataaagcagcaattctaataacaatatcgatgcagttaaatctccatgagtattggcacctagagttacagtccatctaattgtatttcctctttgtatatttctgtatgttgacttttaatgatatttgcttccaagagattgatttccccagaattaaaaacatgatctagtggtagccatttttatcaactaaaaaaatcttgtttctaataaatgcagtggaaaatgtcttcagcttttttatttgctaagggtttctgttttagttgtaaaaatagggagaaagccggcttctaatcatttaaaacagaaatatgctagaaaaaattgcaaatcactgatacgacatccatgttatacaaagctaatttcccttagttactgtgatttgattttatgttctcgttcgtttttaaaatttattttttttttcagtttcttttggtttgatgaatgtcaaacggtctctagtggttttggtttttatcttcctaatcaattatattgtgcatcttttccttcttcattaaggtttttaaagataggagaaagcttagatatgacttactatattacagtttctgcttttactgattattcaacagacccaaagagattaagatcccatattaaggtacaaaactaagattagaagtatagtgaggcactacctatagcaaagcctccccatacttaaaaagataaaatgttctctgtgcatttgaaaatacatttttattattaataaagaaagaggaaagcatagcaaacttaatgtaaaagtatccaagctggccgggcatggtggctcatgcctgtaatcccaacactttgggaggccaaggcaggcggatcatgaggtcaggagttcgagaccagcctggccaacatggtgaaatcccgtctctactaaagatacacaaaattagccgggcataatgtaatcccagctacttgggaggctgaggcaggagaattgcttgagcctgggaggcagaggttgcagtcagctgagattgcaccattgtactccatcctgggcaacacggtgaggctttgtctcaaaaaaaaaaaaaaaaaaaaaggtacctgagctgtagagttcttggtaaatttccaagtgatctacaaacttgcaagtcttatgggaataatcattgacatgtctcttttttttctcccaagtgaacttgaagatgatttacttggagaagatttgctatctggcaaaaaggtaagaagtttatgtccttctgagatgaaatactagtcatttaattatacttaacatacagcagtaatcacttatacatgggtttcattactggaaagttgggtatagattaaaattttgtaaactgaattattttttaagtgcgcagggaattgactgtttat

SEQ ID NO: 39750 - DNA, 2300 bp, Homo sapien
attctgtgacaaatgagtttgagatcaggctgaaaattctgcacgaaaaatcaatagttctaatcagagcctttcaggtcatttacaccccaccttttgttggtttgtcagagaagagccagataaaacctgtgtgacagcaggcctccctactgctgccattcctgtttgaaacatattttgatatcttaaatgaatagtttaattggtttcaaacttgtaaatgagtggaaatttacattatttcatttttaatattctgataagattttccaaattagctttagctgtgtggtttttttccccctccccagaggaaggagttatacttaaagtcttcaaacagattttgagtgacttctttcagatactgaattaaaggacttgtggtaaatgtgttcttgtaatttgttgaaatagactatgggcaccttgcctgtatagcaaagtaaaccgtgtatgttttccattttagtttcctgatgaagatgaggaaacaaggttatatcgcttaaagatagaagaacagaaacgcctaagagaagaaatcctgaaacagaaggagttacggcggcagcagcaggctggtgccaggaagaaggagctgctggagagactcgcgcagcaacagcagcagctgtacgctcccccacccccagcagagcaggaagagcaggcactgtcaccatcacccaccaacggtaacccactgttgccctttccaggtgcacaggtcagacaaaatgtgaagaacagacttcttgttaaaaaccaggatgtcagtatttcaaacgttcagcccaaaacatccaattttgtaccatccagtgccaacatgcagtatcaaggacaacagatgaaagcactgaaacatttgagacagaccagaacagttcctcaaagtcagactcagccgctgcataaagtgctcccgatcaaacctgcagatgtggaggagccagctgtcccccagactcctcgagtggcgtccatccagggccggccccaggacacaaagcctggcgtgaaaaggactgtcacgcacaggacaaacagtggtggtggagacgggccccacatcagctccaaggtcagggtgattaagctgtcaggtggggtaagttgacaagttttatgagagcctctttgagtctgtgtatcacatagaatgtcctcatttgcagagaatgtttttgaagaaagaattaaaagttacctctgttatagtcttgtaaccaatctctacctacttgaagttggtataagaattgccgcttgacgacaggcatacattctcagaaatgtgttgttaggcgattttgtcattgtctgaacgtgctagaatgtacttccatacacagacggtacagcctgctgcacacctaggctatatggtacagcctgttgctccctggccacaagcctgtgcagcatgttactgtgctgaatactataggcagttgtcacacaatgatgagtagttgtgtgtcgaaatgtatcttagtgaaggtacagtaaaaatacagtgtcataacctcatgggaccgcctttgcaggtgtcgcccatctgagcagaatgttgttatgcggcacatgcttcagttttctcttttgagtcttaatgaaaggccagtgtgacaatccctaaattagatatcactcagttttagcttcttattgtagataatttgtgataaaatcattacgtttgttttggaaataaattttcctttacacaaatcatttgtggtgtatagctttagactcagtgagcagctgtgggacagtgggagtggtgggcagtgcaggtgtgtgtctaatttgaatcagctttgtcccagactactggactactgcttgttttctgttttcagtttgccccatttaaaaaaaaaaaagcgtcatagaattgagaattgaagtcctgtatgctcttcccacatgctttcagaagtggagcatgcctcatttctttctcttgcttttcatcattgtccatatcaggtcattttcagtcaggcacaggaagtgcagttttccactgtagtttggataggttcagtactctaaaataaaaccagtcactgcagatagatttccattgcagaagattcttccataaagaagtgatctgtagaacacttgcttctttatcccaccatatagtcttattagttgtggtaagtagctctcatctgttgttttcatgaaaatgaattctataacaaatactatggtctctgtaattgctctgccctataacagtgctattcattgtatgcaatttatattataaactg

SEQ ID NO: 39751 - DNA, 2300 bp, Homo sapien
agaaactcaaatgactgattttagatgtttttcctttttgatgtcattgcttaagttgcagcccctgaattttgatgtgttgtatttttgtttccattcagtttaaatattttttgttcagtgtttgtattatttttatttctcagcctagcttcctaggggttgacccgactgctgcgtagcttagtggccagccagcgcctgggatgagcttgtgctcaggtctctggaccctgcatggccccccatggccagttatctgtgtgtgggttggggcttcccaggcagccatgtggggagagcccatctaggccttctctagcactttccgttctggaatttcctcattaggtttctcagatttctggctggtgtgctgcctgttccaaactgaaccatgaccagaggcccacagacccatgggcttccctgtgcctttccctctgagggtgctgtatggccagtgctgctggggaacttcaggccttactgagtttcggctctgtgctgatggagctgccacacactgcactgtcctcacagctcaggaataagtgcttctccattcttttcattttctttgatttccagagtcctcaaatgttgttttggaaaattttgtccagcttacacttgttttggagagagaagatttgcagacattttcatgccacgtattcctgtgtgacatttttcatctcatcttttcttgagtccctgtttctttgtacagtcttagcagaaacaagctacatccatcttgccccaatcccatgttccttctttttgcagagccctttgttccgtttggtctccacaagataacgtttggtaggaagagcgggacacaaggatatgtgggctgcttctgagctggttgaccaggttgcccctggagacactggcacagctaagcaccctgtggggagggtttactatcccgtgactgacactccctccctgtcgatgttgagagtgggcctcgtgctaataaaagcctccgtcttccttttcaagtccaagcatccatcctgacataattcatcagggcggtgtctgccgtccttgctgttctttcccagccttcagctgttctttgggaaaaagactactcagtactgaaagcagctgataggcaccaccctaagacatgtttatgctgcctggacgtatgaacaacattggtggtgcagttccaaggtgtacgtgcctcctgatcgatgaacagactgttaataaaacacaaaagataagattcctgatatttctaaggttcttcgtagagtaaatgcgcttcttggaaatccacgtactctgtagttgctaatggcacttgtaactcagcagaaggaagggaagtttctagccagtattttgtgatgctcttcggcgcttcagagcactgcattggagaggtcagagtatttgaagttcacgtatccacagggggtggaaggcgccgtgatgggtttggaagacttacagtcgcaaccagcaggagttgggctcattgccttcttagggtaggttggaataggagttaagagtttaaaaccactgctcatgcaaactttacattttaacaagaatgctcttgaaagtgaataatgcatgctgaaagtgaaaatgcgtgttggatatgaagtattttgaaaataaccagtatttcacggaattcgacaacatttattttaatcgcagatctcttatatgaatatagtaattaaagggcatcttagtgtttgaaatttcaaacatattgttagaacctgaccactctccaatgagaaatgtccttactggctctagtgaaatgacaagtttcgagtcacacttgtttgaaatggttttgctttgtgggtgaacactggctgaggtgggcttcctaatgctggggaggagcttttggtggagcagacactgaacaacgtgctgccttcttggtttcagcagggaggagagagcgatggcttttttcacccagaaggccagccccagcggcttccccagcctccggaagtgggaccacagcctgcccgcaaggtgacgctgaccagggggggcctccagcagcccccacatctgccagcggggccccacgcacactcgcctgtccctccagggatcaaaagcatccaaggaattcacccggcgaagaaggtactgcttgttgcctcgcacgcagccctggaaacgcgaaggccggtgtgaggcagtgttcagacgtgctctaatttgtagcgcatggcacacagtagtactcacattcataagtgaaccatcatttcctttgttctggc

SEQ ID NO: 39752 - DNA, 2300 bp, Homo sapien
ggccccagttgagacaggggaaactgaggtctttagaaatgaagtaacttgctctaggccacagttcccagctgcttaatccttcccttaaccctggggattggaaggagcttctctgagctcaggctgtgaggcaggaagcaagggtgctccccatccccctttctgttggagtggccgtctgtgcactgggagcacatcctgtcacgtacgcaagtgacagagcgcccttcccctcagcttctagtgaggcatctttctggctccccagagtcttgagagtgaagtgccctcttggtgcagaagccagtagcacctgttgggtggagctatgcagagggagacctgggcgcagccctgctttgcgctctggagaacggcaagtctgcccgctcattctccctcgtcatctcgtcactttagaagtagtgtcactattaagactattctggctccttttgaagtacttaagttacttcgtcttatctcataaacacttcatgatatgagagcaaacaaaattccattttgtactagaaaacagatgtgtagacagattcagtgataacgccagtgttaaagtgatggatttctttaaagatcgctgtggtctgaattttcttccttcaggtgccatccctgaatatatgatgagaaaggccttagaaacaccctccataacgcgcacacgcacagcacacttgagtttcttcaacttaaatgtaaatgctcctgtgactgagggtcatgatgtttcctatcttacttaagcaattctgagcatcttataagaagatgcatttaaaaaaacctggtgcctggtgtatataagtaggcatttgttagagatattattgttaatatcataacttactctagttagaacagaagactagttagttactactgatttccagccagggtaactgtaacttgcaacttctcatgtgcattttccagtgtggtttctcttgaaataaccccttgcaactgttttaaaacttaattcacaggcatagttttgctgccttcttcagagtactaagaaatgtggaggttttctcttcgtttccttttgtgtgcgtgcacactcaagtcctgaggttctattccagtttccacctaactttctgcctttctctgtgatggactgggaggccacttttgcattctgcccgaactccccaacaggattcgggtaggccatctggaaacctagtgccgtccatcaccaccctgccttctgcgcttcaccgctgtcctaggctacattgggcacatatgttctctctgactttctaatctggagaaagtgtgggaaagttcagcagtttcctcttctttaaaagttccttgagcagtagttttgaacccttggcagcttttaaaaataataatgcttaggcccgccttagaccagcagaatcatacttggggagtgcctgggtcctcagtcacaattgtgttttgtttcttttgaaaagcttgcagacgatggaaatgtgcagccacggctgaatttctggttgcagaatctgcctgggagggtttcagggtagcaaatgtagtctctgccagcggagtcaggtacatgatgctgtggcttgttgtgactgtaaggtggacttagcactgtgcacagcaggtcctgcttaaaccagcctatactacactaggagaaatgggggctctgggactctcaggacaggatccaaattctgaactgtcatttgcagcaagtttctcagccctgacgggtgcctgatctacacagaatgatgatgacacagagtgcccaccgagcacaagcgtgtggcccctggagaggtgcaggcttcgtcagctccctcctcttcctccgcctacacttaaacttgctggatatagttgtctcatttagctattaaaacattctctgatagtggatagaaaactacagaaaatcctgtagctcatggtatattttaatggattctaagttatttgttcacttttatatcttagtgactatcgaagaagctcaggcttgaaactctgaatgtatttcctttgttgtcaccaggccatcatgcacggacgaggcagaggagtggccggtcccatgggccgggggcgcctgatgccaaacaagcagaacctgcgggtggtggagtgcaagccccagccctgcgtggtgtctgtggaggggctgtcctcgtccaccacggatgcccagctgaagagcctgctgatgtcagtgggacccattcaggtagccgcctgggggtggcatctgtgccacgggtagttgtgtcccaaga

SEQ ID NO: 39753 - DNA, 2300 bp, Homo sapien
agggatggggaaggcggaggctcgggtgctgagggcaggggcggggtgcaggaggcggcaggggagccccaggccggcgggaggtttggggagcctgctcggccgccctcattttaaataaccacctaggctctgccccaggtgcgtgaccctcttcttctgtctccctccctgtctctgggtctctaatgtgactgccgcccaagtccctcaaccatggcgagatcgtccccagtggaactttcggagcagttccggaacgcaggagctgccggttaatattaacccgggagaggaaagcgcagacagacacgctctccccgcgcgggcctaggtgccaggcgagggtgctggcggccagggggctcctaaggggcaggaggccagagggccggatctgaagcctggagtggggtcccgagccgctacactaaatagatttaatgtgcgctctggggccgccaggaaagacgctcaggtatggggttggggaggggctgttccaccaagcttgggggaaaggacagtggagagaggtgcgtttaggggctggggctgtcttgaagctgggacgcccccgcccccgcgctgggggaagcccaccggctgctggcggtgacactcgccggcgcggctcgcagatcagggaggtaggcgggagctcaggcgtggggaacaacttggcctccgccgacacaaagcccggccccggcggccctgctgggcttcacggtggctgcacagagtcgggcttgattcgcggcacacgacccaatgaattaataaccggcctgggcttcccggctttgcctgcgacaatcccgcccagcgcgggcggaggagaggccgccagccgaggccgcgcggagcccgggccggaggagggcgcaaggggcgggggcgccaactccagcaaccctcggcctccgcccctcactcgcgcagccacctcccgtcgcggcccggctggacccgggtctccctgcccggggtcctccatgcctgcccaagtggcgcagctcacagagctgggggccaggtcatcctcaccctgccgccctctccctggctgccctcctgggaagctgtttaaagcttcttcggcacagccccaggggagggagctgcggtggggtggggggcttgcatgggggtccctgtgcgtgttggtggtgtgcgcctgcgcgcaacgggcctcacatcatagctctacactgaccctggtttactgattgattttcatgtaaaacgcgttcaatcctcaagatgacctcactcaaactctgcccttccgacttttttttttaactgctggcaggcccacaaacatgcaggcactgacctgttaccagggcggcccccagccctaccccacccccagttgttgcatgttgaactctacaaccatattactgggttttattgctgccagatacacaggacttttcctgttgcgcaatttgtcacgtccccttaaagcgccgcagcagtggggccagcgtcctcgccccaccctctcgaaagagtccccccaacccacgctacagttagggccctggatagaagctgtccctccatggcgacaaccagactccaagcagagcatccttccagactggaggaggttagaggtcagccccgccctctgcagaagtcaccttgaaattgcccctcggcctccacttggcgcagcttcttgggggatgccaccatcgtcatctgtgccagttccccctctttaaatcccatgtcccaccagcagcagcagggtaaacatccaggaagcaagtcagtgcccccacaaacacacacagtggattcaactgctttctgtcgcatccttatctgagggtgaccccagaattccaggggaacccccacaatctgaatcccaggtaaccccgtctgcatctgcctagtcagtgtttcctgcctcctcccaggcaacttcctgggaaactccccaggcggaggactccgagacctcaggccttcctgtctcccctccccctcctctcaaacccctccccctccctccacctcttcagtttgctcttcaaacttgctggacgccattctatgctggggccaagaacacaagagcggaggaagggaacaggttaaagaaaacaagaaacacaatcagaccacagaaaagccaggcagaaaagggttcgacgggcaaaaagaatgtggctgtccagataaagaatgtctgtcccggccccggcctgtgctgcaagtggcaactcacctagccgcctgccacccaggctcccgcccaccgcgcagccccgcca

SEQ ID NO: 39754 - DNA, 2300 bp, Homo sapien
gtccgcaattgtgcccatcagagtgtgaatgtattgatatttctttaaggatgctctttcgttcttccaagcccgaggtaccttaggggagggacttagaacttattggcattgcatcactttagttttcaacctgcttgcataagaattaagagcgaataaatattagtgtggggggaggggaagctaagcaaaatatgaattcctctctctctccccacctcctttgagatttctgagctgccaatctcccagccaattctagactttctgaaactccatgcacgtataactgaagccagaaatgggtttccttgcaaatataggtcaacatcctttttattgccctattaaaatattcaagtcctacctttagggctaggtgcgtacagcggctgatggagtggcgctggtggggcgcaagtgcagggggagggtactgacggcagagagagaggagctacctccgtgccgccctgcttcccgacccgattcccaggcttgcttgaggccgagaaaggcgaggggcaggcaaggtagcctgctccagctgtcggaagggagaggaatgggaaatggtcctgatttccttgctctccctcatctgctcccgaccaccttaaatctggaccgcgagtgtggacgcgcgcgccagtgccagacagcagcgcgatccacaattaactctgcacgggccatggggtgcccgttgcgtgcagctggctggagggagttctccggctagcccgaggcgcccatcctctcgtcaccctcactccccgcggaggaggggccttgccagggtccctcggaacccgagaggagggaggcactgcggagagagcggcgggggcgtggatacccgaggtcccagagccagagtgggtcagcttctgccctgctctgcgggaggccaataccgcagaaggggtcctgggctcgcacaccttcccagggcttgggccttgcagccctgctgcaaagctgcaagcgcacagagccgcgcagcgaggcagacgcctgcagccccacttactcccgggttatcgatcccccgcggctagggtttcagtgcgcgaggggctgggctggagccgccgggctctgctgctccacgcgcgggagcgcaggcaccgcaggagctaacagcagcgccgggctcgctgtagtgtccccggcggcgggggcgcggagatgggggcgcccgcgcaggggccggggcgcatcgcgggctccgccggcctgccctgggacgcgcccccatccccagtccgccgcctgcctggcctctaggcctccgcgtcccagccggagcccccagcccgggggcctccccccgacccccgtccgccctgccgggggacgcagggcccagcggccccgcgcccggccactctcgccgccgcgcgcacaggcagcatttgaacttctgaccttctgtcaacttccctcagacgaacgaaacgaaaacaaatacttttttccttgggcagtggctattcccgttcccaacacaaaaggagggggaaggacggcccaagtgggggttgggtgaggagagccaggccgggattatcaggcagaccccacaaaggtcccctaaaaccgaggggggtaggggctggcagtctgtgaggtatccccggttgatccctcccctaccttccttctcccgattccaggagttaagggtgggggaggaagggatggggaaggcggaggctcgggtgctgagggcaggggcggggtgcaggaggcggcaggggagccccaggccggcgggaggtttggggagcctgctcggccgccctcattttaaataaccacctaggctctgccccaggtgcgtgaccctcttcttctgtctccctccctgtctctgggtctctaatgtgactgccgcccaagtccctcaaccatggcgagatcgtccccagtggaactttcggagcagttccggaacgcaggagctgccggttaatattaacccgggagaggaaagcgcagacagacacgctctccccgcgcgggcctaggtgccaggcgagggtgctggcggccagggggctcctaaggggcaggaggccagagggccggatctgaagcctggagtggggtcccgagccgctacactaaatagatttaatgtgcgctctggggccgccaggaaagacgctcaggtatggggttggggaggggctgttccaccaagcttgggggaaaggacagtggagagaggtgcgtttaggggctggggctgtcttgaagctgggacgcccccgcccccgcgctgggggaag

SEQ ID NO: 39755 - DNA, 2300 bp, Homo sapien
tttgcaaatgtcccactgggccaggtcgctggtccagcccaggcaccacccagtgatgtgacatccacatgctgtgcaggtagacacatcaaacaggccggcctcctctggagagaacacgggtcctgttttgtgtctgtttttactgggaacgggacaggcagcgcagacacaccgcctggagaatccctgggctcagctgagctccagctccgctcagtggaggctgccggggcctggtcaagtggacgctgctcccccacggtgctctcctccagggatcacgattcgtcacaaaccatggaaaggaacaagaaagagaggcgggaaggggagcccgggtcaacctccccaaaggcacccaggccaccgagtcttgttaacgctcagcctctcatgcccaagacagatgtgtcctaagatgctcctctccttctctcccccaccacacacacaaaaagttgatctgcaaagggaacttctggaaacttccatcgtttgagggctgagcttcacaggggtcctctccccctccactccaagggcccggggtcaagggagagtgtttaacttcacagggccacatttgcagcatctgatgactcctcagggtcaggatttcccctccacgtaaataaccctcactctctaatcctatgctagaggaatcattgcacatgagtgggatggcgattgagaaggggaagggcatgatctgtttttttttttttaaaaaaaaaaagaaaagcagggttgagagggagcttcaaattttattttcctggtttacttaggacttttgagtttttttcctttttctgcaaaaagtgaggtgattatagactcaaagattgccacctcctgggcactgtgccctctttctaggaagcccctcgttaaccagaacactgttcccccagggcccctgaccccttgggctgcagcccctaggactggtggctcctgtgcctgaagactgctggcctgctgagcccccacacaaggccagctttgcaaggagcctgaattccacattcagctcacccctggctctgcactttgctctgatcgatcgtgggggttgtgtgagcacagcttcgcccactcgcctgccccccccccaacaccctgcaatggcctccacacacccagcgcacacactggcccccactctctcccctgtgctggggtgcagcccccagacctgctttgcccatccaccctgacgcccgcagttcactctgtaactgcccttgagcacgcctccatcccatttgcagagctctacaaaaaaaaaaatgtattaattgaagcacaataaaagagcagtatttttacatttttctaaggcacttaaagcatttcaaataccagtgctttaagttatggtcactcataattatcctcggtccacagaggctgagtcttcaggaggggctcagtcctctttcttcaaaatgcagggagagccagcctgcactataaagtccctggggaagaaaaattaaataacagctgggcagctgtgcccctcaaatgtgtgagcgactctgtgcttgatgactgaagcttgcgggggtttaaactgtcctttaaaaacttaagttggttttaactgaagcacctaccattccagggaaagtcagggggaaacgcaaggatgtacacaaagccgggagtaactgctgttaccacaagacatgcgctcctccctcccgcccacctttatcttaggaaagatttttttttttttaactcgaatccttcaggtgaaaataaagcaacagcagcaacagaaaaaaaaaacgtagtcttcttcagggttaacatcagaagacaagcttgtgcggctttggccaatcagatgcgcccctggcagctataatatagtgctaaaggcagcctctctcacaagctctccaggcttgctaccatttaaaatcagactctttttgtcttttgattgctgtctcgcgacccaactccgatgtgttccgttatcagcggccggcagcctgccattccagcccctgtctgggtggggagcggtggagagtcccccgcagccgcggcgggcaaggttatataggaagagaaagagcgaggcagccagcgagggagagagcgagcgggcgagccggagcgaggaagggaaagcgcaagagagagcgcacacgcacacacccgccgcgcgcactcgcgcacggacccgcacggggacagctcggaagtcatcagttccatgggcgagatgctgctgctggcgagatgtctgctgctagtcctcgtctcctcgctgc

SEQ ID NO: 39756 - DNA, 2300 bp, Homo sapien
agcatttaaaccagcaaggcgatgctctggagacaattgctgactgtccttgttccttcccgttccccggaagaagcccatgtgaaatgttatgataacctacagatgaccatttccagtagagaaagagcctaccttgttagataagtgaactaattggcagaaattctattatctgccatgtgaattctaatttctggggataagtatgcaggaattcatagttggggagagggtgaaaagtgcaaagtagcgttttcatgtcagaaaggagtcatcgagcagcaatgtgaagccactgtgtgcttatgtgcatgcatgtgcacacgtgtgcatgcgtgtgtacatgtgcatgaatgcctgagcgtgtgtgtgtgtgtgtgtgtgtgtgtgtgtgttagaatcctgccctgagctggccttcaggaaggtgaattccggtttctgcgcactctgcactctggccattgtaccgtcattttacccctttatatttctacatcgccctccttcttccccttatgggagctttcaacgtcttgactgatttgatcaaattgaatactatgcaacatcaaaatctgttgtaagtctgatttgttataagtgattttcagtagaatgatagtcggtggctttaatgaattttaatgagcttgactgtatgaacagaggtaaacagcatctgtgttttgggtgccatgttgtcatggaattctaactcatagagggaaaatccagcttccgagagcaaagtccttaaagcaaagtcctcacggccatttatggaattgtccaggctctagaacgtctcacttctctgcaaggatctgtccgtgtgtcatggagcacctggagtgttctgtctggaatgctggctgggagccttctcctggcatttgaacgaggggcagctgtgtcctctgtttgccgtgtaaagaaaagaggacagagctcagaggagatgaaccccagcagaaaggggtgcttgaccagcaggagagaagataaccaagagggtgagtgtccaggcgggacccagtgtgcatgccaggagcaaggggaggaaggacaggggcagctttggagcagctgtgccctgagaggaggtgggtgggagctgaggggggcagccagcagctcggcacaaggggcaagacccagggacagaaagcaaggaaagccacagtgacagggacctactgtctactcctcgggggccagagccagcccagggctgggaggggagacagggcaggacacggccatggaggcagctgcccatggtctctggagtgcatgagggctgtgcctcttcggtggctgctgctccttctgaagagtggcctgcggtcggcagcggggcctctggggagagctcctgatttcactttcatgctctgccgccactgagaggagttaggaaaataccacgggctgcgtgatttaatcgccctgctatttgttaattagtctgtgtgaagtgccaatccgcagtgtgcgtgggcgtgggggcaggactgcggtttgcagggaagccagccgcttggagcagaggcagttggagttcacctgctcagctgcttcctgcttggatgctccgatttccagagctgcccacgtttcccagtccctttgagaagttttccatttagcaactgccttaagggcctctcagttgttcaaataggaaccccgattccctccacccaagccatttaggaggcgtgcagaaccgagcccaccttcataaccagggttgaagctgggcctcccaactccctggacctgtccctctccaggtggggctgcttccctggcttcacttgcccggggctctgggatttccccttcctctcctccatcaagggttgttttcaggaaaggatgtatattagtcatttacatgctagtgtgaatgagctccagccaccacttcctgtgattcattcagtacatgttaaccaagggctgctgttccccgtgctgggtatatgaaaaccttgtccccgccctgtgagttctacactagagcaggaagtggaaggaaaaacatcactgaagccaatgtgatcagtgcaatattaatcccagggaagctttaggagcacgggtactacttactgtggacgacggttggtcaaggaaggctttctggaggaggtgacagctaggctgggtcttaaggatgaatgggaagagagaggagaacatgtggataaggccaggcaaaagggctgcacagccaagtcacagccaagacgaaatgcagggagagttctggaagctgcgtgtttcat

SEQ ID NO: 39757 - DNA, 2300 bp, Homo sapien
tttcaccatgttggccaggctggtctcaaactcctgacctcaagtgatctgaccacctcggcctcccaaagtgctgggattacaggcatgagccactgtacgtgactggatttaccaaggtttttttttttaatcttcctccccctttctttctccattctttctgttcttctttctttctttcattattccattctaatctttctttccttccttccttccttcttccttctattctttcttccttatcttttctgttcttaaactctttatttcattacgattttctttcttttttccttctctccccacaagtgtcccttatttttttctttaaagaaccaactcatgtttttttaaccaatgttattgtatctcttttcttactcagcaatttccaattttattttgaaatttaattatttaattttgaagctgaatagagacttcaccactggtggcagtgatatccccggcatggttttggggtgaaattattaaaactttcactggtaatgaactgggatgagattccagtaaagggcagtgcactgggggtgtggcctctttcgggcttcacggaggaaggggtaagtgtgaattatgactgtggtagcagacggctgttgctttggagaaagacaaagcagggatggggtgatgaatcaccgccttcaggggaagcatgggattcaagggactcctgagcatgtataatgaacacttcatctcctacatttggaagagagaaaaagccgtgataaaagctgaggagttaaaaataagtgcagccgagctctgagaagttcagatactctgctaggaccagtgtcataggctagtggcatgccctgattggaaaggagagagcccataagacttagaaggaaggcgctggtccatgcactgtaatttcaagtcctcctgagccttctgggcctgcagatgtggtccaatgctccctgacaagacagggagcttcaagacaaggaagaaaactttgctttgcaagacacgactcccttcctttctcatccctcaggatttactccagtctcctctgctggacatcaaggagtatatcccaaaggaactgcaggatgtagcaaggagagtattatgggattagattcaggggtgctagttcaaaggaaactaactataaagtgagtaagagagggcttactgatatggggacattaatgggacacgggatggccctggcaataacccaaggggatgatattaagctcttggtaactttataagggtgatggttcatacaaaaagaatcagtaacaggtgtacacagaagctcagggaagtgtacacactagcgtgtattcacaggcacatctgctttcattgcactttgctttattgtgctttgcagatactgcatttttttttttcagatgaaaggtttgcggcaacctgagttgagcaagtccatcggtggaatgttaccaacagcatgtgcccacttcacgtctctgtttcacattttggtaattttcacaatattttaactttttcattattattgtctctgttatgatgatccatcagtgctctttgatgtgactgctgtgattgtttgggagcaccacaaaccatacgcatagaagatggtgaactttgttcatgaatgttgtgtgttctgactgctttactgactggccgttcccctgtctctccccctcttttcagggcttcctatttcctgggatgcagcaaaatttaaactaggccaattaataactctacaatagcctgtgagtgaaaggaagagtcacaagtctctcactttcaatcaaaagctagaaatgattgtgcttccagataggctgaaagctctgcctcttgtgccaaataattagtcaagttgtgaatgcaaagaaaaagttcttggaaaaaattaaaagtgctactccagtgaacacatggataataagaaagagaaacaaccttattgttgatatggagaaagattaaatggtcccgatagaatatcaaactagccacaacattcccttatgccatcaggctttgaattagagcaaggccctaactctcttcaattccttggaggctaagattggtgaggaagctgcagaagaaaagtttaaagtaagcagaggttggttcatgaggtttaacataacataacatatataacataacataacataacatatataacataacataacagtacaaggtgaagtagcaagtgctgatggagaagctgcagcaagttatccaggtactctagctaagatcactgatgaaggaggctt

SEQ ID NO: 39758 - DNA, 2300 bp, Homo sapien
cttcataaaacagagaggcaacatctgatgtcccattttataggtgttgcaacctgaggctcagaaagacgggaagtcaactgctcaggccactgtgcgtaacttgagcttcttcccatttcataaatctgttcttatgctcccttcgtaaatgaaaccttaaaataattcctgtaatacccgggtagacacatttccagtttggcaaccttttatcatctcttatttgccctcttgttgcgggatttctgcacagctataatagacatgacttatttatatgttataaatgctaggataagttaccaagcaagcttttaggacagtctgtcagctttattctgataagttctaatgcatggctggtgatagtttcaagtcccaaaatatgtaactgcaaaaccctgctttttatatgaagaactgttaggggtggtgccacagtttgaaagtcccctccaaaacttttgttgaaattgaatcccccatgtggcagtattgacaggtggggccttgaagaggtgattgcatcatgagggttctgcccttgggaatggattaatctattcataggttcatgggtgaatgggttaacctgggagtgggtattggtggctttgtaagaagaggaagagagacctgagccagcacactcagcctccaagttgtgtgatgccctgggccacctctggattctgcagagacctcccaccagcaagaaggccctcatcagatgtggccccttgacctgggacttctcagcctccataactgtaagaaataaactccttttctttacaagtgactcagtttcagatattctgttataagcgacagaaaatggaccaagacaggtgggaagaaagagtgaagagcagggcagccccatctggctgaactgttgaacactgcataagcctgggagcatcattctcacagactccgatgtgaacggccacccctgcagttctgtagtgcacctctacgtcagagacaccggcaggggtgagggtgtactgtgcagcctgcacatccacgtcagggaccccggcaggggcaagagtgctctgtacagcctgcacctccatgtcagagaccatggcaggggtgagggtactctgtgcagcctgcacctccacatcagaggccccagcaggggcaagggtgttctgtgcggccttcacctccatgtcagagaccctggtgggggcgagggtgttgccaactgcagaagcggggagctgttgtgcccagtggcttcatcacaccccatgcctacagggaggggttcaaggtagcctttgagataattcccaaaccagcttccattcacactttaagccttgccttcctccatttcccaccccaaacctgtagaattcccaaatctcctcctttggctctgaacttccttctctccccacccagtgcaggcccgttcctgagacatctccccgactccggagcgagctgcttcctcccctgtgcccttacctgtgtgcaagtgcatgattgcctgaccacatggatcagtagtgaattcccaaatgggctgtgagttctgaggggaccgggctctcggttcagctgcttctttccagccctttacacaggttgcgtgcatggctggcaatcagtttgttgaatgaatgtttgaaaagacaacattctctattcttctttcttttctcttatccgtgatccagattcacaaaatgcattcttggggaaataatgcaacgaccacaggctatcacaagaaaagtttactcaaaaatgatccgttcaattaaacatgaagtgtctaatatatgccaattctatgtaaattttttaaaaaaacttttgttcttgctttccaggagtttggaaaggcaaggtcagcatgctctacaggaaaactgggttggcgataaccttgttggtcaatggcactgcctggagacttcccaagggctgccattttgttaggctcattgagagatatagaaaaacaggagtaaaaggtttcgcaattttaagcatcctgaggaagaatgctgtgcaaggggttggatgatgcctccccaaccccccaaaattagtccacttggagcccatgaatgggacctcattcggacaaaagggtctttgcagatgtaattaaggacctcaagatgaaatcctcctggactaatcaggtaggcccgagaccccatgacacagacagagacacagggagagttccatgtgacagtggaggcagggactggagtgatgtatctgtgcccaaggaacaccaaggattgccagcagctccc

SEQ ID NO: 39759 - DNA, 2300 bp, Homo sapien
catgcatagatatcattccaatttttcctgttgcaagtaacagaaaaccagaccccatctggctgaagccagtaagagaaaagactaacaggagggccagcctcaggactcaaatacgtcaccaggacatgggttgcgtcccagtctcagctctgccagttcctgtagaaccctccttccaaggttcacagggtggctaccatagcttcaggccctcacctcatgataagacagcaatacaactgccatttcatgtctgttgctgtttctacattcagttagaattaaataaattttccagtagcacccacaaaaatactgagtccacctggttggcctacctagatatatcgccagccctgatcaagtcactggtcacgggcctggattttctggttcgcttaggctaatcatacgtcccatcccaggactgaagaagtaccagggctgttgctggagagtggctaatgtcccctttacaaataaggagctcatggtttaggaagatgagcttgccaaaaatcacacacttgtaaaataagtcaaaatttgaacttaagtctacttatctgagcccaaagtcttacaaccatttatggctgttatcctaacacctacgtcgcggaacggaagagtcctaagactgcaaagacccttccttttcttctagatccagtctaagttggttggtaatttctttagaccctgctttcagggaagtttaaaaaaaattacttgcatttgtatattttccttgtattttcggccaaatttcttctaattaaagtacaacataagttgaaccaacacaataattgtcatattaagaaaagataaaacaaactttactcatttctgcttctgggcatggagtgtgagggaccagacttaagttctcaaacaactacaaaatcagaccaaaaaatacaatggtttccaggcaccggacgacaggcagtgcagggctgtgatccttaagagaagggaagcagcgagccagagtatccaggccacaacccaaatggaggccaagagaggaacagcagaggatacagagggagggttccaggggccaagacgcaatccgaggggaagcccttccggggagagctggagtcctggggtggccttctcgagtcttcccgagcaggtctgtgcagcgaggaaacatccgaggctggagtgagccacgcggaggaggaagaacagcccgagctcacaggggcggggaagagttctagctcgcgacagcccctgggaggaaccctgcactatttgtggcgtcgagtaaagcaccggaaggctctgctcaggagcgtgaacgacaccgcccgctgcaagcctggaaaggaacgcgttgcctcaattcactccgatgtgtcacacacgcggctcagtcacctagggagcaggaaaaggccagcgggccacgcagggctcacccgggcctgcatccaaacgcaaacggccaggcccacgaagcaggaaacacaacccgcaacgagaagcaaagggatccacagagaagggccaggagtcacggacgacgccaggcagtcggcgcctgcgcttccgcgagccaagacgcctgagcggcgcggggggatcgggggatcccccagaaaactgccctcgactaacagcgcagcgaaggggcggtgcgctcgagaccctggaacgggaacgaccacagccaccgcagggaaacaaccggggcccaggcccaggtgggcgggcggctgaggagcgtggctgcgcccacaaagccgccgggggctgcggactacagcgaagccggcgcggggctcggccctcactacacgaggcctgggcgcctgcacgcccccgtgcttcagcccgcggctcccgaacacccccgccaggcgatccccaaaaacgcccgctgcgcgagcctcgacgggaacgcacctgcgtctagacgctgacgccgtgcgcggggcgggggccggcgagcatgcgcagtgtggtgtggacagggcgtggttggcaagcatgcgcaatgtgggccgggcggggctggcgagcatgcgcagtatggggcggggcggggcagggctggtgagcaagcccgcggggagcgagcgcggaggcgggcgttgctacggcaacggtgggcggccagggagttgcctgagggaaaaggggcagacgtccctgggttccggtgttcgcggaggagtcgaggcacggagaggcttcgggggagggacggaaagaagggtggcccgccaggcgggcggggtccatggattcggggtgagggccgtccgcggcctcgc

SEQ ID NO: 39760 - DNA, 2300 bp, Homo sapien
tgaggctcactggggcgtccccgtctgagtgagtgtgagtgtgccctgccatgggatgccgtcctctccaggactgttgcccgccttggtcctgagctgcctggatgggctcagccccctgccaccctgaactggaataagcaggttggaaaatgaaaggatacaaattattgtcaaataaaaactcgtaaagcatacggtattcacacagagatgcaggacaatacccgatgcagtaagaaaggcccagcgggctgagaagtggctcctgtttgttttgaaactgcatggtagggggaggtgcttcagagctttggcttggccaacattatctttaacacagcccctccacaacccggtcactcatggattcaccagaaattgggtaatgatatttcttaaatgtagagctcatatgtacttcagtgtttcatattagaagtgctttggtctttatttagaagtttggcgatgtttttgtgaccaggaatgtgctgtgggaactttcctcttatttatatcaattaacctatggtgaaactggtttccttgtacactgcatggcttaaagctccagtttctaagaacctatggatgatgttaagtgaagacttactgtgttgagggcctaactctaaaaatagaaagaaattaatccaaaatgtatttctaaggactaacacttgtattaaattactccaaccgaaagaacaaactcactaaggcgtgagtggagagatagaaaagcacagtggaaccaaatctctgagatatccagggttagaagtaaaaacgtcagtcgctgctcaagtcctggaggctttgatgatggttcttactacagcccttttctgttcccgttcaattctggcatcaagagatgtttgaaataagttccaccctgtatctcatcaagacaactgaacttggagaaatggtggaatttaaaatactgaaagatcactgccagaattttctcagttcctgcttccaaaatgcctataacctgcagaagatacagtttgcatcacactaaaaatggtccggtcatagctgcagtctgcaatttaatctcaagtttctacacagtagaccactgtcattaatatcaaggtaagagcttttaaaacctatactctcttaaagtcctacggtatcattaagttttagagtttaaaattcagaatttaaaggtattgaaaacccttcaagtacctactccaactccactttataaatgagaaaaccaaataccaggtgagtccttcaatatataatgagcctgcggcactggtagggttagaaacgtaacccttgcccagtattgaaagctaagattaacaggaacccgttgctttgtaaatcccagtattaaacgctcaagaggcagagcttggtggcaaaaacgatcactggggtgccaaagcgagtaacctcagctaattaaacacgctcaataaaaatacacgagaccaagcctacgacgtaaagatgcaatcctacgtagggtcttggtgttatctcctgccttctgaaccccgctgaccgttttctgaggttccactcatgcaggaagcgcgcggtgacgaggctccaattcctctcaaagctgacaccaccctgcacctggggcccctgatggcagccggtcctaccgggttctaaaattaccgacgtgggatcactgttctaaggctttaggcagccgtaaattcgtacccctcagatagaaggagctgtggaaactaaccaggaccccgagtcccccaaggaggctgcgcgccgctacgggacccgacctcgcctcacagctgcggccatcgccggcccggctcggaggaggcgaaagcgaggccgcggacggccctcaccccgaatccatggaccccgcccgcctggcgggccacccttctttccgtccctcccccgaagcctctccgtgcctcgactcctccgcgaacaccggaacccagggacgtctgccccttttccctcaggcaactccctggccgcccaccgttgccgtagcaacgcccgcctccgcgctcgctccccgcgggcttgctcaccagccctgccccgccccgccccatactgcgcatgctcgccagccccgcccggcccacattgcgcatgcttgccaaccacgccctgtccacaccacactgcgcatgctcgccggcccccgccccgcgcacggcgtcagcgtctagacgcaggtgcgttcccgtcgaggctcgcgcagcgggcgtttttggggatcgcctggcgggggtgttcgggagccgcgggctgaagca

SEQ ID NO: 39761 - DNA, 2300 bp, Homo sapien
gccggcgatggccgcagctgtgaggcgaggtcgggtcccgtagcggcgcgcagcctccttgggggactcggggtcctggttagtttccacagctccttctatctgaggggtacgaatttacggctgcctaaagccttagaacagtgatcccacgtcggtaattttagaacccggtaggaccggctgccatcaggggccccaggtgcagggtggtgtcagctttgagaggaattggagcctcgtcaccgcgcgcttcctgcatgagtggaacctcagaaaacggtcagcggggttcagaaggcaggagataacaccaagaccctacgtaggattgcatctttacgtcgtaggcttggtctcgtgtatttttattgagcgtgtttaattagctgaggttactcgctttggcaccccagtgatcgtttttgccaccaagctctgcctcttgagcgtttaatactgggatttacaaagcaacgggttcctgttaatcttagctttcaatactgggcaagggttacgtttctaaccctaccagtgccgcaggctcattatatattgaaggactcacctggtatttggttttctcatttataaagtggagttggagtaggtacttgaagggttttcaatacctttaaattctgaattttaaactctaaaacttaatgataccgtaggactttaagagagtataggttttaaaagctcttaccttgatattaatgacagtggtctactgtgtagaaacttgagattaaattgcagactgcagctatgaccggaccatttttagtgtgatgcaaactgtatcttctgcaggttataggcattttggaagcaggaactgagaaaattctggcagtgatctttcagtattttaaattccaccatttctccaagttcagttgtcttgatgagatacagggtggaacttatttcaaacatctcttgatgccagaattgaacgggaacagaaaagggctgtagtaagaaccatcatcaaagcctccaggacttgagcagcgactgacgtttttacttctaaccctggatatctcagagatttggttccactgtgcttttctatctctccactcacgccttagtgagtttgttctttcggttggagtaatttaatacaagtgttagtccttagaaatacattttggattaatttctttctatttttagagttaggccctcaacacagtaagtcttcacttaacatcatccataggttcttagaaactggagctttaagccatgcagtgtacaaggaaaccagtttcaccataggttaattgatataaataagaggaaagttcccacagcacattcctggtcacaaaaacatcgccaaacttctaaataaagaccaaagcacttctaatatgaaacactgaagtacatatgagctctacatttaagaaatatcattacccaatttctggtgaatccatgagtgaccgggttgtggaggggctgtgttaaagataatgttggccaagccaaagctctgaagcacctccccctaccatgcagtttcaaaacaaacaggagccacttctcagcccgctgggcctttcttactgcatcgggtattgtcctgcatctctgtgtgaataccgtatgctttacgagtttttatttgacaataatttgtatcctttcattttccaacctgcttattccagttcagggtggcagggggctgagcccatccaggcagctcaggaccaaggcgggcaacagtcctggagaggacggcatcccatggcagggcacactcacactcactcagacggggacgccccagtgagcctcacgtgcacagctttgggatgtgggaggaacccggggtacctggaggaaacccacagcacatggggaggacgtgcaaactccaaacagacagtggcccctgctggggatcaattttttttctcatcagcgttatagggaaacaacattagaagaaatatgttcaagggccttctgtgccagttcctagattacttgaataactttctatttctcctcatcacagtatattttgaatacatctgtcttcataaaatacaccatgtccaaaatctaaaagggccaattccaaattattccaccagctttgaagggaattgaagcaagaataacaagagtaagttctgtgtgaaaagacctactttagatacttcaaaggttgtctcattaatccttgcggcaaccctgcaaagccagcgttattatacctgctttatagatgaggagcctggggctcagctgtgtccagtatcttg

SEQ ID NO: 39762 - DNA, 2300 bp, Homo sapien
tgcagactgcagctatgaccggaccatttttagtgtgatgcaaactgtatcttctgcaggttataggcattttggaagcaggaactgagaaaattctggcagtgatctttcagtattttaaattccaccatttctccaagttcagttgtcttgatgagatacagggtggaacttatttcaaacatctcttgatgccagaattgaacgggaacagaaaagggctgtagtaagaaccatcatcaaagcctccaggacttgagcagcgactgacgtttttacttctaaccctggatatctcagagatttggttccactgtgcttttctatctctccactcacgccttagtgagtttgttctttcggttggagtaatttaatacaagtgttagtccttagaaatacattttggattaatttctttctatttttagagttaggccctcaacacagtaagtcttcacttaacatcatccataggttcttagaaactggagctttaagccatgcagtgtacaaggaaaccagtttcaccataggttaattgatataaataagaggaaagttcccacagcacattcctggtcacaaaaacatcgccaaacttctaaataaagaccaaagcacttctaatatgaaacactgaagtacatatgagctctacatttaagaaatatcattacccaatttctggtgaatccatgagtgaccgggttgtggaggggctgtgttaaagataatgttggccaagccaaagctctgaagcacctccccctaccatgcagtttcaaaacaaacaggagccacttctcagcccgctgggcctttcttactgcatcgggtattgtcctgcatctctgtgtgaataccgtatgctttacgagtttttatttgacaataatttgtatcctttcattttccaacctgcttattccagttcagggtggcagggggctgagcccatccaggcagctcaggaccaaggcgggcaacagtcctggagaggacggcatcccatggcagggcacactcacactcactcagacggggacgccccagtgagcctcacgtgcacagctttgggatgtgggaggaacccggggtacctggaggaaacccacagcacatggggaggacgtgcaaactccaaacagacagtggcccctgctggggatcaattttttttctcatcagcgttatagggaaacaacattagaagaaatatgttcaagggccttctgtgccagttcctagattacttgaataactttctatttctcctcatcacagtatattttgaatacatctgtcttcataaaatacaccatgtccaaaatctaaaagggccaattccaaattattccaccagctttgaagggaattgaagcaagaataacaagagtaagttctgtgtgaaaagacctactttagatacttcaaaggttgtctcattaatccttgcggcaaccctgcaaagccagcgttattatacctgctttatagatgaggagcctggggctcagctgtgtccagtatcttgcgcagcaaagcggtagagttcaattggaactcaagttggtctgtccccatattctgtacttctgtgttctggacagactgaagttagccagtgttcctcttgcgttccagtttcttcattgttccctttctccccaaaataagcatatcatgctgatttccagcctgccagttctttcctcctacctgtaatgtgccatcttcatttccctctgtgtatctttcaaatgccagtttaactggtttttccaagtctccagtgttagcctgaagttttgtagtacttatgtatcatgttatatttagcaatggattaattcatagtaattaaccatttgtattaatgtgtcctcaggagctcaggggtgaactatttgaggacagggatgagtcgaagcataactgacttgagttcacccccttcctccagaaccagaatgtgtagcttagtgccaccctgtagcaggcattcctgctgcttcaggatctgttagactcttacagagcatcctcacaaacttcatggtttttctgtgcactgtaactttgactttctgttgaccacgtctttgcagcagaagaatagaaggaaggtgataggatgtgatgatagaatttgtgatagccaagcaacaacttttcctaattcggcatgttaaaaaataaggtacgctattcttttcttaaacatacacgttatttgactcatgaaatgtattttaattcagccatttgagagtataaaaactagtttgcaaaccctg

SEQ ID NO: 39763 - DNA, 2300 bp, Homo sapien
attcagatccccccacctgagtctttccaggaccttgtgccatctgttattgccattgttgtattcacttacagcctcttctccatgagtacaagcccaccatcatgctccaggtgcctcatcctacagacagacaagaaactaccctttgccatgtacagtcttatctttttctttagttttatacccaaacccactgatagaacaggaagtcgcttactatactgacttcctagtcacttttaacccattttactataccaacaaaacaagtcccaagccctatagtatatttttgtacccatcccccttagtgcttagtggagaatgacttgtacgtcataggagatccctgtataattgtgtaaaaaaattagatactcttaatccttcctacatggcttctcttgagatagcataattccaaagtattatctctgttgatcaataagcttctgtaggggagaagaagtaatacctttttctaacctattggaaggttcatggctgagatgcctataacaaaagattaataagagaaaagctgacaaacttatttaagataagttttacatatcacaggggtcttcagaaataaagaagaccaaagaaacagaaaaagctgtgtacttttatgctctggtttgttgaagagtggacagtagtgggaagtatgattggaagacaggggtgtgatctaatgattataaaccggggggatttagcaaggcctgttcatattcttctcggtgtcctcgtgtctccggagataaacatgtgcttctcctctgggtgggttgcggggggcacccttggatgggggtcttatggcctgcttcgcaggagaaggagacagatcagtgtgtgaccttcctaggttttctcaaataccaggtcccaaattttggagtagtgtgtcttgaaccccatcactttctaccagcatcatttatttcttcttcaaaagattgtcaaaaagttattttttattgggctgactgtagattcttaattatccctggtgtttctattagatgtaatctgtgctgactagtaaaacattcagatagtttcttttattagtaatctttgaaaatacttcagtagggaatgattttttcagatctaattataaaaatagtaacttttttgtgttttttttttaagttctaggtaaagatagtttttgagatagggataattgtttaggaaaaaatttatagcattacttttttaaaaatctatgttaacagttacatcctttgtaactctgaattcccaaggaaaatttgggcaaaggaaactttcaggtatgggaacaggatatgcacatttactctctttctactcttagcttaattttgacatacttgaattgtgtaatctttgtatattgtgtaagcattcagatagctatgtatcctattcttatttttctattgtgtttttaaaaactctttcccaaaactattcaggatttttttcctcaagtggcaagttgccccattttataacagtaagcataatcatgtcatcttgacaagtaacttaaattacatttgagataagtaatttttcttgagcttattaaaattgttaacatggtgcctgaatttgttgatgaaatcagtctaatgtcatgtcttgttggcctttgaaagtctagatgttatttcaaagtagtaaacattcataatttcaactgtcttattttatgaaacagctgttttagggaaaccaatataatggtgtcatcaaattctgaaaagtgtctttctcccaccccaggggcctggaataggaaatgcctctctttctacgtttggttttgtgggagctgcgcttgaaatcattttgattttgtatcctttctttaactgaacgttcagcctatccacaaattttataccaagttttctggggcagtagttatttactaagacacttgtctagaagagaaaacaacaggttagtcttcctcaagcacttaaagcggctttttgttttgcttttcctatgggccttaagactttttggagactgccgagaacttaggaaacttgcattctgttggagagtttttttccttgattctcacagctatcttatggtgtcctctgttgtcggcttctatagccttcgattttttggaaactttactcccaagaaagatgacacaactatgacaaaggtaaggtagaatcttaggtgactgtggcctctcgtttgccttccctgacagactgctttatttaatagtcattctgaatggttcatttgcagtgataggtatttgtttg

SEQ ID NO: 39764 - DNA, 2300 bp, Homo sapien
ttagggatgtgggaaagagggtgttggctggggtgatggaggtgaccaggtcacctatcttcagctgggctggggcttatgatgcagtggccagtggccattgagggtccctagggtccgtaagaaagggcaagtcctaatgtacaagcactttcctatagttttgtatttttcaatgtcccactggctagagcaggtcacccagccaggctgattccagggctggaaagtagagtccatttcttgctgggaggaaggacaaagccagatggcagagggtgagcgtatagggagtggtgagtacgtggccattgttgaagttgactaccctgggttaagtgttacaagtaccagtggtgggtaaacctctagggatgattgcataaaagaaaatcaaaaggtctagatggttggagtattgcattaaaaagatgaggaatactacatgcattcactttctggaatctgtgtttaaatgccatacactttaaaatctaatctgcttgccctctgatttggagagaattaacccagaaattatccaggttctttagggctccaagacattctaaaaaataaaggtgaacgttgaatttaaccagttgacagttgttcttggattatgatcaatcagcctgtggcagcagggcacatgctgagaacaagcctcaggttctctaagttctcccaccaccacaatgttcagctatagtgaactcatagaaaccgtgtgtcggggcctccaacttcgccaagcaccataagaagtttgagttgtgaaaaaattttctctactcaaaattgtgaagagaaacggcaaggtttaaattaccacatatttgtctttgaagaactttacaacaacttcattgactgttaaatttagattcataaaaatctaaacaacggccgggcgcggtggctcaggcctgtaatcccagcactttgggaggacgaggtgggcggatcacctgaggtcaggagttcaagaacagcttggccaacgtggtgaaaccccgtctctactaaaaatacaaaaattagctgggcgtggtggcgggcgcctgtaatcccagctactcgggaggctgaggcaggagaatcacttgaacccaagaggcagaggttgttgtgagcagagatcgccattgcactccagcctgggcgacaagagtgaaactctgtctcaaaaaaaaaaaaaacaaaaacaaaaactaaatgacatttgaaagcaatttgtagattttcacacttcctaagaattctcaaagatgccaaaaacaaaaatcgcagccactagcaatttaaatgacttcctcgtagccaaataaatcctaaggtaaaattataaacattcccttaaattcaaattttataacaaaaagaaagataatagggaacggagggtgaattattgtgtttgatatatttggcggtgaaaaatacatatattacgtgctgtttagggtccactgagagtcataaaactgaccctagtgaccgagctaccggaaggacttggcaagggtctagcgagctcggttatctgcgttttccaggtggggcagcccaagacccttctcagacccagagaagctgggtttccgcccaaagcccggccccaaaccaccgatttccgacctttcaacctactttggcagagcaagagtttccgcgggagactccctgcttccctctgcccaggtcccctgaggccgagtgcggtactgagtgctgagtaaggggtgccgagtgccaagcactgagtaactgggggaggggaaccatgcagctgtcataaataattagctcctgtgaggaacaggaactccgagactgcggccgggccaggtgggcagaggtcgcagcgccctcgccgcgttccccgtccccatccgacgccaggacagcgcctccttaactggggtagcccctgagagcgtgggcggagccccgccccgcgacctcaaggccccgccccctcagcgcctcccggcccagcagctcggaagaccgcgaggcgcgcttttctgacgcatcggcgcctttcgtctgacgtatgcctgcaccgccccctcccctccctgccccgcccccgccccgcccccgactgcgcggcgcccgccctcccttagtcagagctgctcgtctgaggctgctgaggcgacggccggtgtcgtggtcgcggtacctgttccaacacggctcgcgggcccgtgccggctccggtccccggcgcggctgtccgagcccctgcggcgggcggacgatggtgtggcggagcacgcggacgcgggcgg

SEQ ID NO: 39765 - DNA, 2300 bp, Homo sapien
gagggcagatccagcaggacctccagcgttcctggagagtgagctggcacgcagccacgtggtcctattttcatattttaaaagcatgcctttggctgctatgtggagagcagactgaagggttgaggggatgaaagtggagagaccagacagaggcctttgcaataatccaggcagctatgatggtggcagggaaggtccattggtccctccctctgctgcaggatggtctacaagatacattgttaaatgaaaaaagcaagatgtggaacagtgttttgtaaactagcactcatgagacacagcacacacacctatttatgcttcattgagtatagaatctattgggaagatcacttcagaatgatatattgctgcttcatggaaggagaactgggtggcttgtggacaggcacagcacagaaattgaccttttcatttatatctttttgtaccttttgaattttggaccctgtacatagagtatattgcttattaaaaattaaattacttatttttttaaagtaccttaaatatttgagagaggaaaatatttgcacataggagatacagaggattattcaaaattttttatttgtaaagaattccttgccgggtgtggtggctcacacctgtaatcccaatactttaggatttgagcttaggagtttgagacctgcctggacaacacagggagaccctgtctctactttaaatttatattaaataaattttatatttaaaaaaattcgtaaaacctataaggaaaatggacaaaggccataaacagaggaggaaatacaaatggccagtgaacaaagacacccactctcatcaggaactaaatgacaagatgccattttgagctgacaagttgacaaaaattaaatcattttaaagtcaaggacgggccgggcgcggtggcttgcctgtaatcccagcactttggtccgccattgcactccggcctgggcaacagagtgagactcggtctcaagaaaaaaaaaagaaaaaaaattaaattaaattaaattaagtcaagggtgggaactctgtggaaatgaagcttctgaagctgtccgggaagagaagcggcccctggtcaggccgagaaccccacagcagcagccccgtcttcccccagctcactgctaggcgaggctgctcctgcgcctccgggcttcccaaaaatccagacgcaaactgcgcggcctctgcgttcgcttcccggttcaagttacccagtaaagaggaacctcaaacgctctgccctcggggcccagcgtccaaacccagcctgggcagggccggctcctcaggggtcctcggccgcctgggggccacaggcgtctccctggtccgtatccagagcctgcttctcaggagaacgctggctctggggccagtcctaacccacgagggctcctctcgaccacatctgcaaaggccctatttccaaataaggtcgcattcctgggtcctgggcggacacgaacctggggcccgcgcatcccagcgtcgtcgccgccgccaacctccggcaccgcgccgacccgcgcggagtctcccctccatcatacgcgaggatttccctttggagtctcgctctgtcgcccaggctggagtgcaatggcgccatttcggctcactgcaacctccgcctccgtggttcaagcgattctcctgcctcagcctccgagtagctgggattacaggcgcgtgcccccacgctcagctaatttttgtaggggggtgggtgggtttcaccaggttggccaggctggtctcgaactcctgacttcaggtgatccacccgtctcggcctcccaaagtgctgggattacaggcgtgagccaccgcgcccggccggatttcccttttaaatgtgaaggcacctccatgctcatcgcgagcctgacgtccacgcggcgcccacccgcgggcgcgcctgccccgggcgccacctgcccggctgcccccgcacccggctccgcgcagctctgcacgctgtcgccctccggccagcagggggcgccgcccgcccgccccgcgcagccgcctcttccccggaagtcccgcctcggccggaagtcgtgcgtccacgcgtttcgaaagatggcggcgtccaggagcgcgggagaggccggcccgggcggctcccagggacgcgtggtccgcatgaagcgcagaggcgggcgcgggccgcgccgcggtcctgctggcggtggggagaaggccctgaagaggctgaagctagcggtggaggagttcgtgcacgcgacttcggaaggcgaggctcc

SEQ ID NO: 39766 - DNA, 2300 bp, Homo sapien
gaatggaaactacaggttggcttggttaagtctcaggtctttacaaactgaagtgtatatccagtccatcagagctggcctccaggaagtcactgtggcctcccgccagtctgttgcctttctctggattcttctagcgttgatttctttgcagtccagcaatgatgtctgtgtacttccccatacactcaagactgtctggtggatctcagccttgcctgcgattttcactgacacccttagatctccatccagtcctgtctggatggcccctgttgaagcttaataacccctgagctggtcttgtccagccccactagcttgctgcccctcacgtagttcctggttacccagaccagaaacctgggagtcacagatccttcagcttttacagccggtgtcacacactgccatgcgttgctgtgttacccaggcccttcatccctggtccagcgcagctgcgttatttaggccatcgtctcctggctgggctgtgggggtcactctttgtcaccaccatgtccctgcttccgccttctccctccagtcccagcttaagttgagatttgacggaaaatgatgacacggtagtgttgccagcaagactgaaaacgactgttttctgccttcaagttttattatctctcttttacacagtgaaaaaacagggttccaggaacttgctgaagaccacacagacccacatgcaggtcttctcatccttcagtccacagttacggaattcgggataaaatgtaccagaacagcacaaggagaacacttaggccttgcttagctccaccaggcccggcagttcctggccccacttccgcccctcagggcagtgtctggtttacctgctggtccccatcagggcccagtgcccctcaaaccactggctgagccaagtgagtgtattcacaagctaccttagtgccagagactcagccctgggaaagtagggcgtctcctccgtgccacctggagcccttccagagattattaagtacctgtctatttggcaacctctgatattcagaatgtgttgcgtttatctgttttagaaatcactcgtattgcttccttgtaagaaatgaatttggggtaaaaatctgcaaaaaaatcttttaagaaatgaatattgttaggtagtggaactttttttttttttttacacagagtcttgctctgtcgcccaggctggagtacagtggcgcaatctcagctcactgcaacctccatctcctgggttcaagcgattctcttgcctcagcctcccaagcagctgggattacaggcatatgccaccacgcccggctaattttttgtatttttagtagacacggggtttcaccacgttagccaggatggtctcgatctcctgatcttgtgatccacccacctcagcctcccaaaagtgctgggtttacaggcgcacaccaccacacctggctaatttttttttgtatttttagtagaaacggggtttcaccgtgttagccaggatggtcttgatatctcctgaccttgtgatccacccacctccgcctcctaaattgctgggattgcaggtgtgagccaccgcacctggccagtagtggaatattttgagagacataggtgtgtttttaacatcatttttaacagttttatttttccaaggagtcagaatggctgctggccaaacagtgccccttggttgttgattttaacaagaggaaggtgcccttgcgtccaggctggggcactctggccggctgctctgggttgccgagggatgccttgttggaatgccctgccttgtggcactttgttaatttagaaagtgccagttctgtgtgttgaaggagaaaggaaggtttctaggaataacataatcttttttctgtgtggttctttcaggtcggtgcccactttctggaggcagtggtgaggaagttcgatgccatctataaatacggaagcgaagggaaagagtgtgacaacctgttcaccgtcattgcccatttatacaacttccacgtggtacagtctctcctcatcttcgacattttgaaaaaactgattggaactttcaccgaaaaagatattgaactgatcttgttaatgctgaaaaacgtgggtttttcattgaggaaagatgatgctttatcacttaaggaattgatcactgaagcccagaccaaagccagcggggcaggcagcgagtttcaggaccagaccagggtacgcgtgcgacgcttgatctgcttcctaagtccctaaagctcacaaactggccagaacctaaaaatcagtat

SEQ ID NO: 39767 - DNA, 2300 bp, Homo sapien
tgatcactgaagcccagaccaaagccagcggggcaggcagcgagtttcaggaccagaccagggtacgcgtgcgacgcttgatctgcttcctaagtccctaaagctcacaaactggccagaacctaaaaatcagtatctggggtaaatattacacttgctttcctagtgatttctgttttttctgtctcatcctgttttctggctttaatatgtgaatggaccttattcctttaccagaaaaatattttgtgaatttaaaaactgatttatttaacattcatccgttaaaaaatgcttaccgaggaggccacaggacatggggctctagggtcagcctgggttggactttgggctctgccacttgacagcagcataacctgggtcttctgagcctcagtttccccctctgtaaaacagggactgatcacagctcccacattgtgtgccgttcagatgatgagatgtgtggaaccgcgtgttcctgggaagccgtttggggaagaacccgaaaagggttagtttgagagcctggagggggcatcacaagagaaaaaggcagagttcaggtctctggtcccttgttaattactgcagggaattgagggttttatcctagaggcatctgaagggttccagcaggtgaatgacaggttggagttttccttctgatggtcactttgactccaaggcagaaagaggcatgaggtggtcgaagtcaggaggagttttgcaggagctggggagtaggtggtggcaaatgttgggatcgtggcagtgggtgtggacatgggcgtcagaagtgaccagacctcatgtggattgggatgaagggaaggagggctcagggtcacccatcaggggcacaggggaccgtgcaggaggagatgaggatttaggacaggcacctccatttttgaaagactgggttagctgtgaacagagtgggctgaagggatatggggctgctctcgtagagggggtcctgggagccatggaaatgggtggacttgcctggcagcaggtgggctgtgaagaggaccttcaggttaaggagcactgacgtctagctgcaggcaggagggagagctggcaggtgagaaggaaatgaggatggtcccaggagccagggaacactagtgtccccaggaagaattcacgcccgtgtgggatgctgaggaccagcaagaggaggaagggatttgcattttgggctgaattgtgacggcggtcctgactggcttatcctggtccccggagaagccagtctgaagaggagggggctggagaagggaatgggagcagcgggctcaatggtggtttcaaatggagaagagacagaaagtacattagtgggctggggagctggctggggagttggggaaatggggaatggttgttaatgggcttggagtttctcttctggggtgatgagaaagttctgaaattgattgtggtgatagttgcacaactctgaatgtattaaaagccacataattatataccttacatgagtgagttttatgctatgtgaattctgtatcagtaagaagttgacatttggggacatctcagagggtatgtgggaattctttgtgctgttcttgcaacttttctgtatgacattacttccagttttaaagttaaaaaaattacaaggccagtggtaggagagaggatgtccagagcaggtcgcggggggccagggtgggagcaggagcgtagtagaggccggggtggccgagtaggtgtggacggtgcggaagggtgaggcgtgtggcgagcagaagggaaaagagatctctggggagtttgggttcccacttgacgttgggggacacatttccattttgaagtattatgtagccctgagtaagcggctgagactagtttagactgtctctacctaaaggctgtcctgactttgtatcgtggcggtggcggccatgtgcatcaggtgtggtagatttcttgccaacttgaatgggccgtttagactgtttgaaatgatggactttccattttttcatttttcttgaagattcggtttatgctagagacgatgttggccctgaagaacaatgacatgcgcaaaattccaggctatgaccccgagcccgtggagaagctgaggaaactgcagagagctttggtgagtcaaggaactttcaattctgttttgctcagagcttccgtgtcggcatgagcctgtcatgaaaatcaagaaatagtcagacctgcacgtcagggtggtgtctggtgagtgagagtgctcagaggcagagtgaacgcggctcggtttt

SEQ ID NO: 39768 - DNA, 2300 bp, Homo sapien
cagcagctgcttctgcccggactcccagcagccgcgccccggccttggatgaggttgattttatggaaggggcccggggtgataatgagttgccagagaggatattaatctccccgcgccctgaggcagaggagtggctgcgctcgccccgcggtaatcacccaaatgaaacgccaggcccttctgaactcattttatccgctgggaggaggggaggggaggagggaggagaagggcacacgcaggtgctgctgagaaagtgacaaacagaaggaaggaggaaggcccgggagaagggataggagcggcgtccccgtcgcccgtctcctccggggccaggagaggccactgggtcatcgatgggggaagggggccgggagtcgcgccgggctgggtgggccgcgggcctgcgctcctgggcggacgagagcgcgggctgagcccgcatgtgtgcagcacatggcgctgggcctggctgcggtgattgatggcgcgcgctgcagaggctgattaacccggagccgctgcagccgcggtgtggagcgctgctgcagtccgccgctgtcctcgcggacttgtttgcacagagccaagaagaccgatcctggccagccaaggaaggttctgctaacagagagggccggggtcgaggagagagagaagcaccgcgcaattcggtgcgttccgggaaatgtgcctcagtagcgcctgaggtcacagggaccccacatgctactaacgcctagtcgttttaagcttattttctgaaacgtccaaatagcgtatttccacttctggagtgccaacgaagcaacagctagcaaggaaataggaaaataaatagagtccacagctccgcttccgagggacacgtgtcccgggacaggtgtgcaccaggcagccgggcatgcgctgacacctggccacaggtatttttgccaacacttcacattgcgactccccagtagcaggcgcggaggtggtcctgacacccacttgagactccgattttcaccctcagctgccaaccgccgagtagacaccctccccatcatttctacaagcaaattgtaatgccgcgggcataatcccccaaaactcgtgcacgctgatccagtacaaaaccaatttattttacattccatcgtgggcgatgggagaagctaaataataatttagcatgcatacgtagacgtttctttttatatataaatacaatatacaaaaataaagacagtacagttttgagatttccagcagtttgaacgctcgtgacataatccccccgaccccagagacgtaagcataaacccttttttctttttccaaatactctgcagaatggcggctccagaggcggtttcaagtttcataagtcaggtaacactgtgggtttccgccttctcggacgcggggaaaggggagacaggaggcttccccttgcgcggggtgggtcggttcttctcacacgcactcgcgcctcccccaacaccaaccaaaattaattttaaaagaaccagagttcaagtttcagccccctgggtctccctctcgctgtttcttgaagagcaggtgaggcgcccttgcttaaaagggaagcgcccaggaccggagccgcggccgaatccctccagccccggcctgggcgaggggtccatggggcggcggtcgagcctgctctcggggccgggccgggtgggtgcgggcgccggggcctccgggagaagccgccggccggggcgctccgtgcgcgccgcacctgctgggccgcggggctcctactggggcgcgggctggtggctgggccgcgggggcggcgagtcgtcctccgaggagcagtcggaggaggcggcgtggacgctggcgccgttgctgtaggggaaatggtcctcgtcgtcctcgtcctcgtcctcctcggggtcactgtccctcaagtcccgcaggcggcgtccgctgcccttgtctccgggcgctggcggccccagcagctcctcggctcccggctcctccgcgccgcccttccccgcgcccccgccgccgcccttctgtttctccgcttcctgcgccgcctgctctttggcctttttgctgcgtttccatttcatccgccggttctggaaccaaatcttcacctgcgggcacaagcgggcgtgagaaaccggccaccgccaccccagggcttcctgtccccggagtcccccggccgcgtgcgcctgggccccattgggtcggccctggaatggcctcagggtgagacgacttagaagcagaatggggagggggctcgtagcttcctcctc

SEQ ID NO: 39769 - DNA, 2300 bp, Homo sapien
gccagagccccagagagccagagccccggagccccagcccggagagtccgcgtgtgccaggaaagcctgaggggcccaggcctctggcgaggtgtcccgcccggatggagaggaagctgcccgaagcccagcggctctggggtggggagaacaggggctccctcggccccaccttggaggggcattcgttaccttgttgggcgcccaggattccagggcaggcacctactgttgagagtccccccatagctggttcaagccaggccacctgcctcggccatcgcaccccggatccaacgcccttccagaggagggcagcgccctggtaagagccgggggttccctgggccttggccttgcctccccgggcctccgaagcccatttctcttgtttgctgctcctgaagcactccctctccctggaggggccgcgggtctctctaacgccccagtgggggacctggcccaagttcctttccccggtgataagccctgacccccattcccgggcctgcctaattcagggcgctctcggctcgccttcccccggcgacttccttctcctgcagccttcgggttaatcattagatctcagtctcacacctccaactgccccttcccgttaagagaggaagagaaggcaaggcctgcgcatggccattttaataattcgctgcccgtctcatgcctgggggtccgggcgagtcctcgcaggccccgggcagagccgaggcggcttcgcagctcttcccccgctcgctgggagccaagcgcagagaggggcaggcggtgccggtggaggatgcgcgaggccctcccgccacgcgcatccacgggggccgcagggtactcacagttgaagtcgggcatcttaggcaggatcatgcccgcggtggacgcgcgcagccactggtccagctggaaggtgccggcgcccagcttgatggggtcggcggggtgcgcggggtgcgcgccttgcacctgcgggtacgagtaggagagcgccgggtgctggcccgccagcgcagccgccgccgccgccgcggagtagccgtagaccgggtggccgtagagcgccgcctgcgccgggaggcccgcgccgccctgcgcgcccccagggtgcagccccagcgccaggcccccagcggcggcggcggcggcggcggcggcggcagcggccgctgcgcccggatgcgcgtggtggtggggccccccgtgcccgccgcccgtgccgccgccgccgccgcccgcgcccaggaagcccggcttgggcagcagcgcgcagtgcgcggccagcaggcgcggcggcgacgggctctcggcgcgcaggcggtcggcgggcgcagccggcggctccgaggacgcggggctgcagctgccgctagtcccgccgctcgccccgccgccgccgccgccacctccggtgccagatgcggcggcggcgagcgacgtgaccaaggccagcggcgcgctctgcgcagaggcggctcgtggggggtccaccgccagcagggcgtcgatgcggaaatttttggatttttccatcggctcgtttggggctggcgctcagggcccggtggcgggcgacgcggccgtgtgcgggctcgcggagtcagtgcgtgcggtgcaagcccgggggctcggtattgttatggtggttatttgccaataatcaaagtcgccgccggaaactcagccgagggtgaccatggtcccggcgcctcctccgtgcgggccccgccccgggccgcgctcgcacaaactcccacgcgagtgcttccccgcgtccgggcccgggagcccggttctttgcgctgcagccctcaggcgaccgcgcggaggccgctgccgccgtggtggggacccgcgcccctccgcgcacttgaagctcagcgcggcttccgattggcgcgcgcagcgggggcccggggagggccgcgggctccgccattggccgaggggcgcacctgtcaccgtcccggccgcccgccgccccgcccccgcgccgcgaggtcctaagcagcccgggctgttgcgcggcgctggcgggcggggacaccaacggggagtggatactccgaggctcaacctggggcctctgcccgccctcccctgggtgcggagccggacggcgggcactggcaacccccgggcccctggagagccccgcggcggcccaagacccgctcccgagacacgtgggcccctccggacttggttggtccctggagccagctgcgcgcgtcctctccggcctccttgtcggcgctggagtgggtccacgtctgccttgcggagcg

SEQ ID NO: 39770 - DNA, 2300 bp, Homo sapien
caagcccatgggcatccctcggcagcgaggaagagccttgtcaccgaggacccgctccactgagcaggcacgtgggcgacgtctgcaagccgacttgggttctgcaggccagagcgcccagatctaccgtctccgccttgactggggcaggggctcccagagaggattcgtggaggccaaactcacactcacatgcgcgtttacacccccacacccccgcacacacacctgaaaatgcggggccttcccatagcagataaggttcgacctgcagagctttggccacggggacaaaaccctcccctgctgcgccctggaggcccgagagcagggagggcttgggaaacaccacggtcttcagtgcgctgccgtcgcctcgcagagcggccaggtctgcgcagcgtgggcgctcaggagcgtggaaccaccgcgctccgcaaggcagacgtggacccactccagcgccgacaaggaggccggagaggacgcgcgcagctggctccagggaccaaccaagtccggaggggcccacgtgtctcgggagcgggtcttgggccgccgcggggctctccaggggcccgggggttgccagtgcccgccgtccggctccgcacccaggggagggcgggcagaggccccaggttgagcctcggagtatccactccccgttggtgtccccgcccgccagcgccgcgcaacagcccgggctgcttaggacctcgcggcgcgggggcggggcggcgggcggccgggacggtgacaggtgcgcccctcggccaatggcggagcccgcggccctccccgggcccccgctgcgcgcgccaatcggaagccgcgctgagcttcaagtgcgcggaggggcgcgggtccccaccacggcggcagcggcctccgcgcggtcgcctgagggctgcagcgcaaagaaccgggctcccgggcccggacgcggggaagcactcgcgtgggagtttgtgcgagcgcggcccggggcggggcccgcacggaggaggcgccgggaccatggtcaccctcggctgagtttccggcggcgactttgattattggcaaataaccaccataacaataccgagcccccgggcttgcaccgcacgcactgactccgcgagcccgcacacggccgcgtcgcccgccaccgggccctgagcgccagccccaaacgagccgatggaaaaatccaaaaatttccgcatcgacgccctgctggcggtggaccccccacgagccgcctctgcgcagagcgcgccgctggccttggtcacgtcgctcgccgccgccgcatctggcaccggaggtggcggcggcggcggcggggcgagcggcgggactagcggcagctgcagccccgcgtcctcggagccgccggctgcgcccgccgaccgcctgcgcgccgagagcccgtcgccgccgcgcctgctggccgcgcactgcgcgctgctgcccaagccgggcttcctgggcgcgggcggcggcggcggcggcacgggcggcgggcacggggggccccaccaccacgcgcatccgggcgcagcggccgctgccgccgccgccgccgccgccgccgccgctgggggcctggcgctggggctgcaccctgggggcgcgcagggcggcgcgggcctcccggcgcaggcggcgctctacggccacccggtctacggctactccgcggcggcggcggcggctgcgctggcgggccagcacccggcgctctcctactcgtacccgcaggtgcaaggcgcgcaccccgcgcaccccgccgaccccatcaagctgggcgccggcaccttccagctggaccagtggctgcgcgcgtccaccgcgggcatgatcctgcctaagatgcccgacttcaactgtgagtaccctgcggcccccgtggatgcgcgtggcgggagggcctcgcgcatcctccaccggcaccgcctgcccctctctgcgcttggctcccagcgagcgggggaagagctgcgaagccgcctcggctctgcccggggcctgcgaggactcgcccggacccccaggcatgagacgggcagcgaattattaaaatggccatgcgcaggccttgccttctcttcctctcttaacgggaaggggcagttggaggtgtgagactgagatctaatgattaacccgaaggctgcaggagaaggaagtcgccgggggaaggcgagccgagagcgccctgaattaggcaggcccgggaatgggggtcagggcttatcaccggggaaaggaacttgggccaggtcccccactggggcgttagagagacccgc

SEQ ID NO: 39771 - DNA, 2300 bp, Homo sapien
ggggaggctgaggcagaagaatcgcttgaacctgggagatggaggttgcagtgagccatgatcatggcattgcactccagcccgggcaacaagaacaaaactccatctcaaaaaaaaaaaaaaaaagtggggggcgcctggcgcggtggctgactcctgtaatcccagcactttgggaggccgaggcgcgcggatcaggaggtcaggcgatcaagaccatcctcgctaacacggtgaaaccccgtctctaccaaaaatacaaaaaaaaaaaagaaagaaaagaaaatggagatacggagatgataaaaatcttccttctagtgtcatagtgaagattacggatgagaattgcagaaagctcatagcacatagtaggtgttcaagaaatgcgcgtgtttccctctctccagtgagaggtagaactgcatttgtgtcaccacaaagacatctaaaggcacgacaaactccatgtgaatgcctgggatttctttttaccagtggtcggctctgcaaagccagatcacatttactccaagttgcagttactcatccattgccatcctcctaaccttccaaccagtcctgtgcatctgggaactaccctgtgttataatgaaaacgataccactcatggcaacagagtcactgtcatcaactctcgcctaggtcaaaagccttttgaggagaagtggcaaggtctctatatttgcctttttaaaaatccctcttgtagcaacctggcgtgctaattttgaagtttacctggcactgagtttctctttggctctctcccctctccacagccccttccggtcctttattcacctctcacctgcatagcaagccctggaacctggaactccctcccagttctcacgcttgctggggaagataactgggtctaatggcgctattgacaaagcctggtgttgatgccgcttgacttcccgacccctgtgtggattctttcagcttcaaaaacgcccttggaagtggttttactgtaaatatttgaagtgtgcgtgtgggggaggggtgagacctggatgctcactccgtgcctcgctcactcacgggaagccctttcctctccacttcccaggaggccccggcagcacgagagacatagcctttccccgctcctgcccggggactggccgggggtcgcagcggcagggcttccgaaggatgccgggccccacgggtttttcagggccgaggtgtgtgggccttgactcccgcaagcccatgggcatccctcggcagcgaggaagagccttgtcaccgaggacccgctccactgagcaggcacgtgggcgacgtctgcaagccgacttgggttctgcaggccagagcgcccagatctaccgtctccgccttgactggggcaggggctcccagagaggattcgtggaggccaaactcacactcacatgcgcgtttacacccccacacccccgcacacacacctgaaaatgcggggccttcccatagcagataaggttcgacctgcagagctttggccacggggacaaaaccctcccctgctgcgccctggaggcccgagagcagggagggcttgggaaacaccacggtcttcagtgcgctgccgtcgcctcgcagagcggccaggtctgcgcagcgtgggcgctcaggagcgtggaaccaccgcgctccgcaaggcagacgtggacccactccagcgccgacaaggaggccggagaggacgcgcgcagctggctccagggaccaaccaagtccggaggggcccacgtgtctcgggagcgggtcttgggccgccgcggggctctccaggggcccgggggttgccagtgcccgccgtccggctccgcacccaggggagggcgggcagaggccccaggttgagcctcggagtatccactccccgttggtgtccccgcccgccagcgccgcgcaacagcccgggctgcttaggacctcgcggcgcgggggcggggcggcgggcggccgggacggtgacaggtgcgcccctcggccaatggcggagcccgcggccctccccgggcccccgctgcgcgcgccaatcggaagccgcgctgagcttcaagtgcgcggaggggcgcgggtccccaccacggcggcagcggcctccgcgcggtcgcctgagggctgcagcgcaaagaaccgggctcccgggcccggacgcggggaagcactcgcgtgggagtttgtgcgagcgcggcccggggcggggcccgcacggaggaggcgccgggaccatggtcaccctcggctgagtttccggcggcgactttgat

SEQ ID NO: 39772 - DNA, 2300 bp, Homo sapien
ctagcccaatttgtcaagttgatttgtattttagttaattgtgaaagtaattaccacatggtcaaattaacagctttctggaaatgaccaagcctgaggttttatttccttcctgggtgaagaaaattcatttttccaagctcttgatgtgatgaataaaagtcataaatctgggtgattggtgcaggcagagtctaaatggcttcatatttcattttaggtttaatagaaatattcatgctctgttttaatgaaattaaattgaagggggatggggccgggaggtggcagtggccgggggcttaaagggacaacgcacattttccttccccgcccctgagccagggcgttggggtcacctccgccggcggcggccgatgggctcactcctgccagcgggagccgagggatacctgggagggcccttcctgcagccgctcacctgaagcgcaggtagagccagctactggaacctcagcccaggtgccctcgggcgcgcccagctccctcccacgagcttgcgaagtcactgagcaagtaggagtctgcgctgggtgcgggtttgatccccttctgcctgtcccccaagctcaggcccgcgctgcccggggtgggggggtcctagggtcctgcactcttccccttaggtcgcctcatggggacgcgtaggagagattcgtggccgcggacactgcgcggttcccagctccctccctcatgccctcgctctccaccgccctgtgacctccagctaggctccgcctcgcgtggaaactgtccccgaccgagcccagacgccagggccggagccttggagccatagcgcggagccgcacaggcgctgctccacctgcagagaaagagaagtttccggacacagttatgtgcatccgggtcgtggtgctcggagttaaggggggccacgctgtcagcccctctgcgaacctcgggggaggcccgaggtccgtcggggcgtccctcggctccaggactgtccttgccgggccgggccccttaatggagctgatctgtgacttgttgatttcccctgagcaaataaggctttgatgcagttccagcaagagtggttagctgatgaattgacaaaaactaatcagctttattgggaaacaggttaagggcacgggcgtgtcaataactctcagcctgaccccctcgtccattagctcaggcaggctgattagagtaagaagaccctctcgcagtttgcgctgaaatcgcttccataaactcaccattattagcagtcgatgcgagcagctcatttagagaagacatcgcaggcacgccacatctatcatccgggtttatggatcattatctcatttacagaatgtcgcagggtaatatgtttttggcaataggcttggccccgcgcctgggctggccgctctcttttcagcagcgtccccgggacctccttccccagcgcccggcctggaactccgcgtggacgcttctcaggcgggaagggaggactggaagccaccctacacgtgcgctctcgcacgcgcgcacccagggcgcacgctcctgacacgctcgcccacgcgctcgccgcagtccggcgtgcccggctgtgagccccgagggccggcgcggcaagcgcccctccagcaagcccctagctccgagcccagtgttaggagttgctccaacctcggagcccggtgcgagttcggggttctgctcgggcacccgcataccccaagcttgggtggcagcgcaggtggccaggtgcgtcccaagcggtgcgcgggctgcgcttacctgtgcctgaaggcgacggcctccctgcttaggcctcagcccgctcggccgcggaggcctgggtgccccgggaccgtctgtccctaggaaagcccctctctaccctcccggctcccggctcagcgggcctgaccttccctcccctgggcgtgccgctcccctcctcccgggctgcggctccgggggcccagatgcacccaggcgccgggagtgggccacctgttccgccgggtaattattttaatgtaaggggcccagagtcaccgggttcgcgcctctagcagcgacagaaggcggcggggctgaggaaccttctccagcctttcaatggaatttcccagatgggccgaggggaagccggggcgggtcaccaggggccctttaacgagttcattagccaaattatcttgcctgcagcacagggccccggagactgcggggagggtgggagcagagggctggagggtctttctccctcccacctcggtctctgcagaaacagcggagag

SEQ ID NO: 39773 - DNA, 2300 bp, Homo sapien
ctcttcttgttgaattgatccctttaccattatgtaatggccttctttgtctcttttgatctttgttggtttaaagtctgttttatcagagactaggattgcaacccctgctttttttttgttttccatttgcttggtagatctttctccatccctttattttgagcctatgtgtgtctctgcaggtgagatgggtctcctgaatacagcacactgatgagtcttgactctttatccaattagccagtctgtgtcttttaattggagaatttagcccatttacatttaaggttaatattgttatgtgtgaatttgatcctgtcattatgatgttagctggttattttgcttgttagttgatgcagtttcttcctagcctcgatggtctttagaatttggcatgtttttgcagtggctggtaccggttgttcctttccatgtttagtgcttccttcaggagctcttgtagggcaggcctggtggtgacaaaatctctcagcatttgtttgtctgtaaaggattttatttctccttcacttgtgaagcttagtttggctggatatgaaattctgggttgaaaattcttttctttaagaatgttgaatattggccctcactctcttctggcttgtagagtttctgctgagagatcagctgttagtctgatgggcttccctttgtgggtaagccgacctttctctctggctgcccttaacattttttccttcatttcaactttggtgaatctgacaattatgtctcttggagttgctcttctcgaggagtatctttgtggtgttctctgtatttcctgaatgtgaatgttggcctgccttgctagattggggaagttctcctggataatatcctgaagagtgttttccaacttggttccattctctccgtgactttaaggtacaccaatcagacatagttttggttttttcacatggtcccatatttcttggaggctttgttcatttctttgttcatttctggagactgagtcttgctctgtcattcaggctggagtgcaatggccaactacaaccttggcctcctgggttcaagtgattctcctacctcagcctcccaagtagctgggattacaggcatctgccaccacgcctggctgatttctgtatttttagtagagacgaggtttcaccatgttggccaggctggtcttgaactcctgatctcaggtgatccacccacctcagcctcccaaagtgctgggattacaggcatgagccactgtgaccggcctcataatttgtttgcttgctcttgattggcaggagaaaggtgaagctcttcacagactgtgagtcaaatcttgccccatgctgcttcaatccccctgtggcttccctttggaggtggggcaggccgaagccccagccctgtcttcctggcctttctctctccagacagccccaggcaggtgctgggatcctcgctcttcactgccttgaatgcgctgaggctgctttgctgcaggccatccctccctgctgttcctaggccctaagtaccttcttcaaactctgtcttttgggtcttgttggagaaaagagtcaaactctgtaaaacagttgaaatttattctgagacaaatgagtgaccatggactggggcaggatctcaagaggtcctgatgcgtaaggtggttgggctacagcttggttttatatgttttagggggacataggccatcaatcagcacatgtgagatgtacattggttcagtctggaaaggcgggacagctggcagcggtggggtggggactccaggtcacagatggattcaaagatgctctgattggtaattggtcgaaagagttaagtcatatctagagacctggatgactagaaaggaatgtcctggtgaagataaagggttgataaggtttggctgcatccccattcaaatctcaacttcaactgtatctcccagaactcccacatgttgtgggagggacccagggggaggtaactgaatcatgggggccagtctttcctgtgctattctcgtgatagtgaataagtttcacaagatctgatgggtttatcaggggtttctgcttttgcttcttcctcattctcccttgctgctgccacataagaagtgcctttcaccctctgccatgaatatgagacctccccaaccatgtggaactgtaagtccaattaaacctccttgttgttgttgttgttgttgttgttcttgttgttgttgttgttgagatggagtcttgcactgtcgcctgggctggagtacagtggcgatctcagct

SEQ ID NO: 39774 - DNA, 2300 bp, Homo sapien
aaatggggagagatatgtaaaaggaaacacactcgcagttatgtagcataaatatgcccacagatctaatgttcacaggaggactgtttattattattgttattaatttttatttttatttatttattttgagacggagtctccctctgttccccaggctggagtgcagtggcgcgagtggcgcgatctcggctcactgcaagctccgcctcccgggttcacgccattctcctgcctcagcctcccaagtagctgggactacaggcgcctgccactatgcctggctaatttttttggtatttttagtagagacggggtttcactgtgttagccaggatggtctcgatctcctgacctcgtgatctgcccgcctcggcctcccaaagtgctgggattacaggcgtgagccaccgcgcccggcctgtttatttttattttttgagacagagtctcactctgtcacccaggctggagtacagtggcacgatctcagctcattgcaacctccgcctcgcagacacaagcgagtctcttgtctcagcctcccaagcagctagaagtttaagaactttaagtgggggaccacctatacataaacatgccaccatgctcagctaatttttgtacttttagtagagacggggtttccccatgttggcgaggctggtctcaaactcctgacctgaggtgatccacccaccttagcctcccaaagtgctgggattacaggcggcgccaggactgtatttctttttttttttttttttttgagacggagtctctgtgtcgcccaggccggagtgcaataacacgatctcagctcactgcaacctctgcctcctgggttcaagcaattctcctgccttagcctccagagtagcttggactacaggcgtgcaccaccacaccggcctaagttttgtattttattagagatggggtttcaccatgttggccaggctggtctcgaacttttcacttcaggtgatccgcccgccttggcctcccagagtgctgggattaccggcgtgagcgaccgtgctcggccgcaggacgactgtagatgatatcgtattgtgtgttgaaattttgctaagagagtagattttatgtactcttaccacacacacacaaagagggtagtcatttcacaatgtctctatgaaatcatcatgttgcacaccttgtatacaaccaaaaatcaatttttagaaattggtttcaatcgtgtatgatatatatgtatatgcacatgtatatgagatattatgtatacgtatgtgtggatataagacacatgtttatgtataggtggtccccaacttaaaatggctcaacttacaattttttgactttgtgatgggtttattgtagcattaaatacattttcaacttacaatattttcatcttacgatgggtttatcaggacaaagccccatggtaagtccaggagcaaatatttttgcatacacaggtatgtgtacatgatacatatttatatgtattgatgctgtatctatagatgcatatgtgtgctatgtatgaggcaaatctgcgcatgtctgtgtacatggtaaatatttacgtccgtctgtgcgtgtcatagacatagaacaggtgggatgtaaacagacgggctgggcctagctgctcctttcccgcctcactcgagtctggcaccagattggccgctcccagcccgctccgggtgccggcccctgcaccccaccctgcaccccgcaccctgccctgcaccccatcccggcccgtgcctcgcactccacctttcccgcaccctgccccgcacccaacacctcccgcgcccctcgccgcgctcccccagcacgcaccaggccccgcccactccgccgcgtgcccagcccgcgtcaccgccgtcctccccaggctccagcgcgccttgcggggccgcgcacgctagcggaaccgccgggaagagcgccgtgccgtcaatggcggaggcgcgcacgtctgcagggccgcgcacgtctgcagggccgcgcacgtctgcagggccgcgcacgtctgcagggccgcgcacgtctgcagggccgcgcacgtctgcagggccgcgcacgtctgcagggccgcgcacgcactgacggctgaccgccatcttccctcccgaggcggcagttccaggtgcaagcgccgggtttgctgcccgctgggcgcccctgcagcggcccgagctgtggccggcgtggatgaggggcaggcgaggcagggccgcccctccagtattgccgcccctcccgccccagggcagggctgggagggt

SEQ ID NO: 39775 - DNA, 2300 bp, Homo sapien
tgcatctaactctgcccactgacaaggtagagcaatggtggcagatcccccagcagtgaacagttctggggcccaggctggggttgcttcacagcaaaagaagcagtcctggcagggtgcttggctccaggtctggggaagaccctgcaagatgggtgtggagtgctctgtcatgctggagagcgaggaagctattgcagggtggctggggctgggagacagggttaggagcctgtctctagctggtcatgggcagaaacttgaagcattcatgaaaacagctaactctgagttcgcaagggtgctaacaaaacccttcgtcatcatatttgtaggatgcaaaggaaccatctcattattttgaatgctgttttgaaaaaaagaagtactcaagcatttaacccacctttcatttataaactgtacctcaggcaaaacagatagtgtgtgatcttttgcatagaagtattccagccaatactacatgaaaaggatttttgcaaactagaatcagcctgttgcaggctctggtgaaggagatgaccagggcggtgccactccaggtgcagcgcatgtctagggtctgctggtctgagatggtgtgttggcctcccaggagaggagggtctggtcccagaatgcaaatagctgcacctcttccttactccagaaagttgtgcgatgggaaaatgtcagctgaacccagcagtgtgcttagtgatttaattgatttatattttggcacaagtcccttatctcatcaccagctggtagtacggtgcacacacccacacttgaagtaggtttcacttctgcagtgaaaagcagagatggggcctctcagtgatcgagcatcccacaccacctaggaaacgttctcgccagaaagttaaatctaaatgtggtggaacctctacatctaactacaaaattacaggaaacataggggttagaagtacatctttaacaacaccatgagggtgcaattagcaaaatctagattatgggaaattttacaggatgaaagtttcttcattaaaaattgcaagggtggctgggcacggaggctcacatctgtaatcccagcactttgggagaccgaagtatgtggatcacctgaggtcagttcgagaccaccctggccaacatggtgaaaccccatctctgctaaaaatacaaaagttagccaggcatagtggcatgtgcctgtaatcccagctacttgggagcctgaggcaggagaatcccttgaacctgggaggcagaggttgcagtgagccaagatcaggccactgcactttatcctgggtaacagagtgaatgagactccatctaaaaaaaaaaaaaaaattgcaagggccagccgggtgtggtggctcacgcctgtgacccgggcactttgggatgctgaggcaggtggcttgcttaagctcaggagttcaagaccagtctgggcaagatagcaaaaccccatctctacaaaaagtacaaaaattaaccaggcgtgatggtatacacctgtagtcccagctactcaggaggctgaggtgggaggatcgcttgaaaccagaaggtggaggtcgcagtgggctgaggtcgcaccactgcattccagcctgggtgacagagtgagaccgtgtatcaaaaaataaaaaattgtaaggaccaaaaataagggatgagaggaactgacagatgaaaaataacttgagaaaatatactgtgtctgttttatttgaatactgcctcaaccaaattgaaaaaaaaactagaaagtgaatttttgataataataacttaatttttaaagtgatctattttgcttcataaagcaattatattattttactatgtttagatattatgcaccatcaaataaaacaattagagatttctttggggcatattagaaaacatagttaactgtaaaagtatgaaaggacagctagcatgagagaggacctgaaaaggtaaagcaaaaggggacatgaaggtatgaggtcagagagagggcccagcccacggtagagaaatgtccagcaccaattctgttcaagtgtgatcaggtcaaagtgtgtgctagagcacaggggagttctgaaccaggattgcccccgacaggtcactcagctctatgtgccagcatccagacatgtgtggaggttccggcggatggggaggataggcccgctgcagtccaccctggacggtgagttctctaggacacagggttactgaggtatgaattacatgctgtcaaattcactcctttaatctacagatctgttatttttcataaa

SEQ ID NO: 39776 - DNA, 2300 bp, Homo sapien
cttccagctataagaaatggatttcagtttttattaattactcagtttcaggtcttctgttataagcagtcaaaacggactaagacagtaagttactgcctagtgactattagtttaataggactgccgcaacaaattaccacactctttggggggggagggaggcttagaaaaactgaaatttattatttgacagttctggaggctggaagtccaaactcagggtgtcagcagcagcatagattcctttttagaggctctagaagaatccattcttctggttttgccagtagcccttgaccttttttggcttgtagattcatcattttgatctctgcctctgtggacttctccctgagtgtctctgtccaacattgccttattttttttaataaggacacctgtcattgtattggggtcttccctgatccagtgtaacttcatcttaatttggttatctgcaaatacctcatttccaaagaaggttatattcacagattaggatttgaatttgtcttttggggggacacagctctacctgttagggtgacatttataaagttgagtattcaggaattgttattagtttgtttgtttgtttgtttgagacggagtctctccttgctctgttgcccaggctggagtgctgtggcgccatctctgctcactgcaaactccacctctcaggttcaagggattgtcctgcatcagcctcctgaacaacaggtgtgcaccaccacgcccagctaatttttctatttttagaagagatgggggtttccaccatgttgtccagaatggtctttaactcctgacctcaagtggtccacctgccttgtcctaccaaagtgctgggattacaagcgtgagccactgcacctggcctgttattcgcattcttaaataaattagaaattaatgttgctattgtgattaatttctgtaagaatcagagctataatcattttcaactttgtaataaaatttctttgtctcattggtggttctgttttccgagaagcatagtgcatggagtcgcctgttttgagaagcagcttaattgaaaaatcagtgcctgcaaaacaggtggtgcttttaggacttcttttacataacagttttattaaaatataactcacattatggaaaattgaaccttttaaagtgtacagttcagtggtttttaatatattcactgtgttatgtgaccatcaccaatatcaaacttggaagcaatgtcatcatcccaaaaaggaaacgctaggtagtcactccctatcctgcccttcctcccccagccctggccaaccactagtctactttcagtctgtatggatttttttttttctagacatttcatataagtggaatcatttgttatatcaactataaatttgtgaccttttgtgattggcttctttgatttagcatgttttcaggtttcattcatgtcgtagtatgtcagagcttcactcatttgaagggccaaatcttatttcattgtatggatataccacactttggggtttgtttttttcattttgaaacaggtctttctctgccacctaggctggagtgcactgctacaaacacggctcagtcctgcgcttaaggaggcctcctgctttcagcctcccgagtagctgggaccaccgttgcttgctaccacacctggctaattatttcattttatcgtagaggcagggtcttgccatgttgcccaggctggtcttgaactcctggcgtcaagcaatcctcctgcctcaacctctcaaaaggctagaattacaggtgtgagccaccacacccagtcaccgcattttgtttacttactcatcccaggctggagtgcagtggtgcatttgcattgggaatttgcattgtttccaccttttagctattgtgaataatgttactgcaaacatttgtatacaagctgttatttggacataggttttttgtttttcttgggcatatacctagacatggaagtgttaggtcatacagtactccacgtcaaagtgtctgcaaccttttacaatcccaccaacaatttgtgaaggtttcagtgactccacatcgttgtcagcacttacttagtgttgtctttttcattacagccattctagtgggtgggaattggtatctcattgtggttttaatttccctggtgactaataatgttgaccatcttttcatgtgcttcatgacttctgttgagaaatgtctattcaagtccattgcctatttttttattggattgtcttttattattaagtccctgcaatgcaatgaattat

SEQ ID NO: 39777 - DNA, 2300 bp, Homo sapien
ttccagttgtctaaaatgaggcaggtgtagacggaaaattttccctgtactctctgaaggtttcacaactgagtctctgaactaagctgacaatagacagattcgtaagagaaaaagtatacaaatctataacatgtactagggcatcccagaatccagtgagatctggaagcttatacagccccttcatagaagagaggggaggcagatgcaggcagctcaggggagagaaaatgattttttgccttcagaataggtggtggcctgtggcaaaatctgtctgggtgtgcagctgacgtcccttgaagctcttctcccgtgatcctggctcattcttccctggatgagacttccagggagggggtcaagacaattgagtccctttgggatgatctgtctttatgtaaataatgggggattcacagaatgcccctccctgcattggcaggtccccatgtgccctcagtttgagggcatactaatgtggtaatcagtgaactagttagtaatcagtatcctaatatggcataattcagggtggcatttctccaactctttcattactaacgagctattttaaaccaaaagtgattcaagtgttaaagtgccttttacttgaatatctcccaggcttaaacgatcacgaattcataagcgttgttagttcagaaggtggctgagcaggcccccggaattcagtgtcagcatgccacaggatctgaagttcaggaaaggtgtaacaaaaagggatttttcttttttcttgagacagagtttcgctcttgttgcccaggctggagtgcaatggtgtgatctccgctcactgcaacctcctcctcctgggttcaagcgattattctgcctcagcctctgcagtagatgggattacaggcatgcaccaccacacctggctaattttttttgcatttttagtagagacggggtttctccatgtgtcaggctggtctcgaactcccaacctcaggtgatccgcccgccttggcctcccaaagtgttgggattacaggcgtgagccaccgcacccagttgagatttttatttcttaaaggaaaggataaggtgggccaggactaagacaacacagtagcaaacatctggctgaatgctggagaggaagacagtgggagatccaggccaggctccatggacgaactgcttgttggctccttaggctttgggtctgcgggaccctttcgctactgggaatgggagcctgtctgactgcactgggtctgagactccctgctcctgctggtcaccatctacacgcatgtggtgttggtctccagggttagaaccagaacccctgaggacgcgggaaaggctaggaagcctggggatgacctaaagtccagctatcaaaatgcgccgcgttttcagaaaaactactgccacgatttaacctaaaaagcttcatctgtattttctgccacagtttgcttccgtttccttcagtcactattccctggcgaagtctccacgcgctcccgttcgccggggaacttagggtatccgggcttccctaaattgacaagcgggggccggcgccttcgcccgccttcgctggccgccgcttggtttgttcttcttctccttcggggacttctccgcccgcgcccgcgcccgcgccccagctttcgtcccgctgtgcggagatgccacccagctccaccgcaggaccgcggagcgagaggcggcagacgcgctccgggggccgccggtcaagaggaagatgaagggcgcgacgacttcgcggtttccagaatgggctccttctggcccaacaataagtgccatttggaatcttctcggccttctctgtgccttccgcgcgtctgggctccccggtaccgtagacccggccccgagctccgccccctcgccctgggcttccccgccccctcgcccccagtctcctgggctcttcggggcggcggaagagccgagaaccttcgcgaaggtggggcgggcgcccccgaggttgggcccgcggtatgggcagtggaaactgcgcatgcgcggcgtcagggtcgggcggaagttgacgccgccgtgccgccgccgcgtgacgcatttcctgtttgttgttggagaaaggagagaaaggaaagcgcgaggagccgccgccaccaccagcgcagcagtcctggagctgtgaggagattcgggccgtcaccctgcctcccctgcgtcccgccaccggccgcttctgtcctcggtgagggtctgttccgagggtcgggggaggtcgcctagggccccgcgcgcgcccggcagac

SEQ ID NO: 39778 - DNA, 2300 bp, Homo sapien
actagccccttgcccagcgcaggtcacgttctcctgtgatgtttacggttctccttgatacggggtaacttaataggcaatatgtgtgtattacataagaggataagagagggaagaaaactgctatgtgcctaaatataacatgcatagattatatatgacaagtattggtcacaaaataaggaggaaatactccaggcattgatggtcctcgttcctgtaactggtcctgtggacacagccactttcttccactgcccattctgtggtcttgtggccttcagcaggcacctcactggttgtggttctttctggtgaggtaaagtaaaaaagaagttggtagcacatttgattaacacgtgtcttaagatttatttctaaggtataaaagtatgatcagttgtttataaatccaaaagtaataatacatgctgggtttaagatttgaaaatgggaatgaggtgagaggaggaggaggtcttgcccctccaccccagttggagccccacaggaacgttgtagcacgtgctgtatagttgtgatgcccgcggtcggagccccacgggagcattgtagcacgcgctgtatggttgtgcgttgtagcgtgcgctgtatagttgtgatgcccacaggcttccttgcatttctctccagctctgctagccacgaacacttcaagtctgcacttcacatgcttgcttgcctgtgcatggttacgcacgctcagcaacttagttccacgttttgggatgagttgagttccctgacgtagaattgctgggttgagggttttttataataaaaatattggttttattttgggggctgaaggttttaaaagcttaatacatacttctagattgcttttcaaaacgacagaaaccagcacatgataagtagctcttacttgaaataaggacttgtctgatctcaagtggcaacttttaactggtctttaaatattataaattttgaaattattttaatgtttcttagcactgtttctgttacaaatgagacttcatttttagggtaatttgtgattttaatatttgaaattatacgagttaaaattcagtgaatacctgaattgtgaaaaattatatttaagctacaaaatgtcagtagagaaataaacaagataaagatttttttcatacaagaaaatggaacggaaaagcattggccttctcataacatagtactcagccagcttttgaggtagcttctgtagatgatgatataattatgaatgtcattgtcttaatttagcttagaatgcaaaccagttaaaatcacttggttagtactgttaccactgagacacgggttcaagatgcatgtaaaagctcagtgccttgtggacaacttctaagggtttagttgccatggatttaaagaaattgtgactaaaccaatgttttagcattgataaatgggaaattgcggaaggatgtaaacgtagagtttaactctacaacttggcttagggactcaggtatggacagtgagaataacttggtttagggactcagatatggacagtgagactggccacatgagtgcctttctcactgtcacactcttacccaggttggagtgcagtggctgtcgacaggtgtgatcatagctccctgcagccttgaattcctgggctcaagcagtcctgcctcagcctcccaaggaggtgggactaaagatggtgtgccaccacacctggctaatttttaaatttattgtagagaaggggtcttgctatgttgcccaggttggtcttgaacccctgacctccagggatctctcctgccttggcctcctcaggagctggaactacagatatatgctaatgtcttcaatttatggaaatgcagaaatgccttttttttttttttttttttttttgagatggactcatgttctgctgcccaggctggagtgctgtggtgtgatcttagctcactgtatcctccacctccggggttcaagcaattttcgtgcctcagcctcctgggtggctgagactacagatgcccaccaccactcctggctaacttttttgtatttttagtagagacagggttttaccatgttggccaggctggtctcaaactcctgacctcaagtgatctgcccgcctcggcctcccaaagtactgggattatagctgtgagccactgcaccctcccggaaatgctttttaacggtcacctcctaggggagatgaagagagttaccgcataatcagttttaactgtatttgtaatgtttgtttctttacctgggaggatatgttgtagata

SEQ ID NO: 39779 - DNA, 2300 bp, Homo sapien
tgcctgtgcatggttacgcacgctcagcaacttagttccacgttttgggatgagttgagttccctgacgtagaattgctgggttgagggttttttataataaaaatattggttttattttgggggctgaaggttttaaaagcttaatacatacttctagattgcttttcaaaacgacagaaaccagcacatgataagtagctcttacttgaaataaggacttgtctgatctcaagtggcaacttttaactggtctttaaatattataaattttgaaattattttaatgtttcttagcactgtttctgttacaaatgagacttcatttttagggtaatttgtgattttaatatttgaaattatacgagttaaaattcagtgaatacctgaattgtgaaaaattatatttaagctacaaaatgtcagtagagaaataaacaagataaagatttttttcatacaagaaaatggaacggaaaagcattggccttctcataacatagtactcagccagcttttgaggtagcttctgtagatgatgatataattatgaatgtcattgtcttaatttagcttagaatgcaaaccagttaaaatcacttggttagtactgttaccactgagacacgggttcaagatgcatgtaaaagctcagtgccttgtggacaacttctaagggtttagttgccatggatttaaagaaattgtgactaaaccaatgttttagcattgataaatgggaaattgcggaaggatgtaaacgtagagtttaactctacaacttggcttagggactcaggtatggacagtgagaataacttggtttagggactcagatatggacagtgagactggccacatgagtgcctttctcactgtcacactcttacccaggttggagtgcagtggctgtcgacaggtgtgatcatagctccctgcagccttgaattcctgggctcaagcagtcctgcctcagcctcccaaggaggtgggactaaagatggtgtgccaccacacctggctaatttttaaatttattgtagagaaggggtcttgctatgttgcccaggttggtcttgaacccctgacctccagggatctctcctgccttggcctcctcaggagctggaactacagatatatgctaatgtcttcaatttatggaaatgcagaaatgccttttttttttttttttttttttttgagatggactcatgttctgctgcccaggctggagtgctgtggtgtgatcttagctcactgtatcctccacctccggggttcaagcaattttcgtgcctcagcctcctgggtggctgagactacagatgcccaccaccactcctggctaacttttttgtatttttagtagagacagggttttaccatgttggccaggctggtctcaaactcctgacctcaagtgatctgcccgcctcggcctcccaaagtactgggattatagctgtgagccactgcaccctcccggaaatgctttttaacggtcacctcctaggggagatgaagagagttaccgcataatcagttttaactgtatttgtaatgtttgtttctttacctgggaggatatgttgtagatacgtgagatagaatacctaagtgacacaatggtgtgcaggctatggctgcaaagtagaaagtttctaaatagcatgcttggatttttatttgaattggatgaagtttttgtgtcctagagaaattcacaaaatgttcctagtttcagataaaaggttatgatttaacatctttgcttttgttctttcttgtctttgaatagaacagtgggggacggtaaggtctgtttgcaaagtacctatgaccatcttacattatttttatgggtggggggcattgactgtggaatgtgggcagtaacttgcacagtcagtaaccgtttgagtaacttcttgttggcatccccattctggcactcctcctctaggtctccacctcacacgctggtttgtgggcggaggggcaggttggtgcgtggggtgtccgggcactggctgtgcatgccttcttcctcttctgtctcttggccaccttttccaaaaagtcaccagtgaccaattctcccagtgtttctttgggactcaatgccttgggcttggcattgggtaaagccaactggccagtttcattctgacgagctctatagtagtccggtgtggacctctgccctccctgctctgcggaagcttcctcagcctttgcttctcactatttactatttgcgggtcctgggggtacccagcgtctcagggttttggctgc

SEQ ID NO: 39780 - DNA, 2300 bp, Homo sapien
gtgtggttattcacgtcatggtcccacttttccaggcctatgaacaaaagagcagagagctctccctggtgacggcgccacgtcctggttctgtctccagctgtgcaacccacatgagggaaggcacgtgggacccccaggttagggttagggtgtgaacgtttcaggatgtttaaatgtatttacttacagaaagtgggttctgcagccctttatgcccctgacaaaagtgaatggcgtacagggtggccctgggattggcagtggggtggccaggaagccccactgtggtcctgacacccccaggactccccaccccagtcccacaactgcagtccctgccacaccgtccacagcccccctgcctcccacccaccagcacctcactgccttccccaccccccgcagggccccccagtgcttgggacgtcacaaaggtgacgacgacaggtgccgcgctcccccttgccatcatctcagcagctgccgagcacacccaggggccgggctccctctccaccccctcagcagacgctggcataagcagccgcgggctctatctgcagcatccaccccctcagcagacgctggcataagcagccgcgggctctatctgcagcacagagctcctggacccgccctagggggatggggcgctgggcgcaggggtcgggtagaccccaatacccctcctcacctgagaagcagatgcctacctgctggccatgcacctgccgggccccatggacaccagctcccttctcctcctggggtcggggtctctccctctcagcgaagggaggacccacctgtgacatgagctgactcggtagccaggccgtgtgaagacggggctctggcccctttgccaagagcctgtcttgtgtgtggcctggcttgtctggaaggcgctcgcggctctgtccacgctccctagctgtgcccctgctgaggcagcccggccacgctcctgggacggcctgagggtcaagtgggcagggttgagggcacaacagtcacctctaaacctgtcgaaccacctgcctccctcgccacaatctcagcagcagattctgggatctgagcagttgagaaggactaatcttgttttaaaaacacccccgaccccggcccgcaaggcgacttactgcaccgccttcccctgtcaccaggaaggccggacgccaggatgtcagcactgagcgcgtgtctggcccagtcttggtcgccagcagagccagggtgagtcgacgaggttttcctctcgggaccctcaatgcctcctgtgaaggctgcgggagtttccacctcatctgtgcgttggggtgttacttttttgttgttgttgttgttttgagatagagtctcgctctctctagagtgccgtgacgcaatctggactcattgaaagctctgcctcccgggttcacgccattctcctgcctcagcctcccaaggagctgggactacaggcacccgccaccacgcccggctaattttttgtattttttagtagagacggggtttcaccgtgttagccaggatggtctggatctcctgacctcgtgatccacccgcctcggcctcccaaagtgctgggattacaggcgtgagccaccgtgcccggccttttttttttgagacggagtctcgttctgtctcccggctagagtgcagtggtgcgatcttggctcactgcaagctccgcctccctcgttcaagaaattctcgtgcctcagcctcccgaatagctgggattgtaggcgtgtgccaccacacccggctaattttttgtatttttagtagagatggggtttcaccatgttggccaggctagtcttgaactcctgatctcaggtgatctgcccaccttggcctcccacagtgctgggattacaggcgtgagccactttgcccagccgggggtgttagctttaaagtcatgttttcgccttacagtgacgcatttcggaagcaaggcttctgcctgcaaaacaccactttcatcctttgtaatcgtaatgttgaagaattgcttttatttctagtcagtcttaacggtgcaacttactggcgcttacaaaggacagcaggcgagctgtattcaatatgcttatgttttatttatgtaggtggcatttaaaatacatgatgtgtttagggttacattgtccacagaaagcatcaaataccactcctctccccgccaaaaccaaataaacaaagccaactctttggcaacagttgtgttaaataaaatcccaggtcacacttgtttctggctcccaagcctgggtcac

SEQ ID NO: 39781 - DNA, 2300 bp, Homo sapien
gtccctcccttccctccccactggctgagcgggaggggatggcctgggattggcttcctaccgttgccatgactgttgctaggatcagggctgtctccagcccctgcaggaaacatgtaatgaattatggatgtccgattttctctgagaggcctgatctgtaatgcagatgagcaccaagtcccccttttcttctggtttcttaagaaaaaaaaatcagttttaaatccgaagctggcatttgtgtagtcctggctgccccttgcagtgaccgctgcccggtgttgattcttatgcaaagagagggccggggtcagggtctgttgtttgttctggaaaagcttgtaggattttcaccagaccttgtgacctttggggacattttttttgtgtgtgatcagagacagaatgggatataaacactagaagtgacattttctaaacgtgaggcacttctctgggctggcagtgccaggagcgtggagggctcagatctctgctggcaaaggtgtgagtgctctcccttctccctctccctcccactccagcctccaccccagagcagagaaacgtttgcccaaatgtgacttataccttcgttctgagagtaggcacaggtgggcctcttccattggctgcccttgtgggctgtgagcagagagggccctcatgtttactaagtgcccttgtgggcttggggccaccccaccgccagatggaggggacagaggtgacaggcgacagggctgggctccctgtccagctccccagtggcagaggtcctcggacagtgggaatcagaagggcgtctttgctgggccacccttggcagggagtgacctgagcaggtgcttcctgtgtgagtgggggtgtctgggaactgtgcaaggtgcggccatgtgggcatgctcagagcctggttggactgtaaggtaggaaggcatccagtcgttcccatgggccagcacagaggagaaacaggcatgtgtgcgcgggcctgaaggcggccccttcccggcagtcttacctaagcgactggtcccttaggctcccagcttcgtgcctgtcacccagcatccccattgcctcacggttccccctctcacgggagaaacgtcgacagtgctggtgggaacacagagatgccacccaggacccccgtgagatgcagacacaagcggctttaactttacaatgcaatgaagcaaaatatgctggctttgagacccggagggcacgaaaacagggagctggggttctggaaggacgccagctcggcctgcgaggggctgaaaaatacctgctgttgcctctgtctcgttgagagttgcctcccaccaccacagagggaaccacgtgagtcaaagacagaaagaaagggacggaaaagaactgtatttcaaagaggcaagcctttatattagaatgacggcaacgcagtttaggtgaaaattacatttgtcacccccacactggagtgtttattgaacggcagctgggtcagctcaaggaatttcaaagagacgcaggacacgaagtgatggatgagtggaatcctccactaaaactccttccaggacactgtgtatctgtctacagtttcattctcgctttctttctttttattgagggcatgccttggacgttttgtttttagtctcaggaccattttaatgaagagccatgggtcactgcttctattcggggtcatgtacagacaacagtcagtggaaatagcacttgtctttgaattgagcagatagaaaatagagaaggaaagtcctggaggagcggctttcccgccagcgtctacctgtagagagtgagacgaagatggagacaattaactggacgaagcaggcaaaatccccgataattgaggccgggtgccacggggtgactttccctttctggagttatttagccagtttctttctctctgctgtgtgtgtcgacacaaccttggcctcccccgctgtaaaatggaaaaaccacagccgcagagctcaccagggaattctgcagctctcggaatgattgcgcgccgggctgacaatgcgaagtgttagattaacgtgaaagtgttctatgttggaacatcgaatacagacgaggcatgtaagaaaacgatgttttaagaaatatgttttatgctatatcatttcttttactgaaaacaattggacaaacaaacaagaaaagccaaggaaaatgcgaccgggacgtggaatcggcccgtctgtgagtggaaggatcacactcccagctgagatagaaataaagccacgcgtgcctctgtt

SEQ ID NO: 39782 - DNA, 2300 bp, Homo sapien
gtgaagacgaagacagccgtggtcgtgctgaggagcgaggcctccagagaagccagccctgctgacaccctgacctccatttctggcctccggaatgggagacagcctgctttggccacatacactgcccatccctggcgctctgtccctgcagccctccaggcccagagcacctggagcgacctgggtttggcttcccatgccctgagcagcacctggtgcctgcacggagaaagcgccgcctggagccagcctgcagttgtggagtgtgggcaacccagagaccagctccagacacacagcgaggcgtggctgtgtgcgctggtggcgactttctcgcaggaactagaacagtttgctgtaacaggagcacagatatcagacaggcagggccacgctgtctgcacggctccaccgagaggccgtccatcgacactgatgacgaatctcgtctgtgcgagcagcgcagatgagtgtggcggcggcaagacagagacacaaacggctggggggcgcctccaaggagctgaaactaggagcagggggcagctcacacgccttatcaccaggacacagggtatcaccagaagaacagctctggcttgtggctgtgctgcctgagattaacgcccgttttgtggatcgggggcagaagctgcacctgtgaccgacggtcttggggctgccaggggagccgcagaaggcagtgacctctgaccccacagcacggggcgcagggcagactgtgccaagcaggcgcgtctggaaaagtaagggaggaaattcggcgggaacctacacattagctccctagaggcgtaactgatgggcaggtgtggaaaacgcccaaacagctcgcgggagcaactcacttccgccgcacgggaggggtcgcggtcaaagggcatccacagaggcgctggggtgaagcggggaagcgggtgggagcagctccggcggcacaccccggccagggcagggccccccacaccccacggcagccgaaggccccgcctccccgcccgggtctgcggctccgtgaagacacagcagctccggagggttgatctcactgacagggagagtccctgaggaggggccggggtgcttccggcctgggtggccggaggaggaggcagggagagccctgcggctgaacagggcagcgccccccgcatccggagggacaggcccggccccgtctccagtcccgcctcccgcctcagccgcagaacctcggtggttccttcagctcctgaagcggtccgcaaacaggtcgagggcgctgacgaggccgttttctgggctaagcagcgacggcgctaggcgactccgcttgtccttcgtttccgctgtcagctcagcaggtgacttattcccagtgctgctcttctcacagacacaaaaccaacagttccggtctcttccgatagttctggcagagacggctgcggggagacacgggcggaggcgggtccgggcgggccccacgtcgcgcagcctcagcgtgttgcgcctcccgcggctgcggccagagacttccgcaaacctcggggcctcaatcgacagaacgtgtcacctcaggcccaggagagcagggtccggggcgcgtcctcagaagccggcagggcgggctcctcgctgagccgcagggcgagcccggcttgggcctcttcccgcgggaggaggccgccgcgttccttccccggttctccagccgaccccgccgcctccgtctcccacacgcagggaccctctcccgacaccggcctgcctggaacgtgccagaatcgtctccctaacccggcggccgtggatgagcaaacctgcacccgcggcagcctgaactgccgtttgtcgcgtagtcctcgagtctcggagcgcaggggtcccgagggcaccccgggccgccgtcctgcggcccccccacagtgtgccgggactcggggtctctcaccacgagcagacctcggcgctgctatccggactcctcgagccccttacaggccacatggccaggggcgaccctcccgtcacaactgtgactctgtgagctcacagggctggcctccacattcttgctggtggaagaccacaagcaacgggatgccttggaaagcatcgttctgcagcaggactgctcaaccggccaatcagaacacagggaaccatgaaagaggtgggaggaggaaaaaggaggacggagaggagggggaagacaggggaggaagggggaggacaggggagggccagggtggagctcagggccaaggcagggtttgaagtctgtggcccgtggc

SEQ ID NO: 39783 - DNA, 2300 bp, Homo sapien
gttgatcttaaaaacacattcaatggtgaaggagtgtgtgtttaaaataaaagtgtttatatttttcagattttgttttctcctgcttccttaaaaaatacactggccgggtgcggtggctcacgcctgtaatcccagcactttgggaggctgagaagggcggatcacgaggtcaagatgctgagaccatcctggccaacatggtgaaaccccgtctctactaaaaacacaaaaattagctgggtgtggtggtgggcgcctgtaatcccagctactcgggaggctgaggcaggagaatcgctttaacccaggaggcagaggttgcagtgagccaagatcgcaccactgcactccagctcggcaacacagcaagtctctcaaaaaaaaaaaaaaaaaaaatactagcacagtggaccctgaagcgccagcagcaaaccctctgagatgtgcgtccggagtggccatgccaccagctttttctgcccactgttttggaaaagtgttgattttggaatgtggtttcccatcactgtgtggaccatgggtgaatggggagggtggatggtctctggggccgtcctctctccgcctccagatcagcaggcagtggatgggtatttgggtctttcttgtactcacacggatgcgatgtgtgattcctggtaggaaacaagaagcagctcactggcaacaccacactgccccttgcattccgaggagtcatgtagtcatgaggggcatgagcaagatggagacccagaggctcacgctcacatgatgacggccgagccgggcctgcaacggaaaggcctgtggcatggggtaacttcagagccttcttctcaacaggcacggcccgcagagccactggaggtaaggatcctctccagccagggaggaagcatcccgcaccgtgcccactttaaaccctggagaaccatgtttgcctctgtctggccctctccccacccccccacctccctttgccgtcttctttgtgtgtaacctttgtgtacaggctgaagagaaaagtcccaaaatccagcacaagccccgtgaccctttctcccaggcccacggtcttggggcactttctcagggcctgaccttggagcagacaagagctgagcgctcaggaagggaactgtccgaggagcctcctccacggcggaactggtgcatcatgtagaataaccgagccacacgtgcggagatgctccacgccccactgcccgtaggtctgagggagatactccccgtgttttgggatgaattgagttccccaaattcgcatgccaagccctaagcccagtacctgtggacgtgaccttatcggggaatagggtctttgtggaggtaactggctaagtttcaatgaggtcattagggcgggccctaatccaacaagacgggggtccttatcaaaggcggagatgcggacacggggcagccacagggaacaccgcgtgaagacggagacggcacccacaagccgaggagagagatctgggacagattcttctccgagggcctcagaagaaaccagccctgcccacacattgaccctggactcccagcctgtgagtggtgggcgatgaatctgcggtttgcgccgccccgtctgctatgctgtcacagcagccaaggccactggctctgtgcatttccctgcctccgcctccctctcccatcactgacgatgcagcactgactccctggacagggcctacattgggtgctgctgatggcgagactgtcatcccccgacatgaaggcaagggctgggctcagaagcctggataccgtggctgcctctgccccaccctcagctctgggacaaaccttcagtcccagcctgtctgcccacgtctctccagctgtgcaatcggcacacccacgtccacgtggctcctcatggggccaaagagcagccgtggccaggaaagcagtcagagaggcccagggttgaacccaaggtcactgcccttgtggttgagcaaaatgaagacagttcctcttcttaaatccggctctgtgcctatgaagacggaagcagcagcattccgcttgcaggtttttgaaaaaacaaatggggcaagagaggccaggaccacgcctgactcaggcgatcggacgggcagggaggctgcaaggcatggcatgagcaggtggagctgtcaggactgccccagcccctggctcaaagatgcccgaccccaggaccctgcctcgctggatggtgaaggccaacttcccctctgttggagctggcctgggcgttgtgggaagggctgggagga

SEQ ID NO: 39784 - DNA, 2300 bp, Homo sapien
ccacctgcgtcgtttcatggctttctccttcatgttgaaggagtgacagggacactgagggatgaagtccccacgctctggcctgctctgctcagtcagggccgctggcatgggccgttcttcccctgggactgcacagcctggacccccaccaagtcctgttgcccaccctggctcagctctcctccagcccagcatgcctgccttcctccctcctttccccatacccggtcctgccatctcccagctgcaaggtccatgccaccccacaggaagagcctcagcggctgtcctcagaccccaccctgtctgccccgaccctgccgcctcaccaaattctaagcacaccatgacccggcctgccctggtgtgctgcccatggcccggcgtgacccagtgtgctgcccatggcccagcgtgacccagtgtgctgcccacggcccagcctgacccgacccggtgtgctgcccgcggcccggcctgacccggtgtgctgctctgggaaggaagcctggtgggaacagtgctcactcactcactctgtcactcgctcactccttcacgccttgtctctggcagctttcgccacaggcagagctgcgtggtcacggtggactgcccgacccacaaagcctccgacactcactctccagcccgttacagaaaccttttctcaagattgtagaacagcagttctgcaaacggggcccctgagcaccagctggaggtcgttaaaaacgcagactcttgggccccaccccagaggttcagaacatgtcctggaggcaaggccagcaagccattgggagcagcccccagggacctcaatggcactggagccgagtaccactcacagctgcagtccaagagctcctgaagacaaacccctgccccctgccagctgggagctcctccacagtagacactcagcaaatgcctgctggccggagcagcggcagggaaggtagacgactgcaaggcattggaaacggcccctctgcatcaggagacaccctgggtgcaggaggaggcttcgctgaaaagcattgcaacagcattatcacatacgtggaaataagaattgcatctcaacccttcccttgccctccacccatctaacatgcctcagccctcctgtggccatagtaacctgaacagtaactacagcagcaggctgcttaggtgccaggtgtaagaagagaaatttcatgaaaacaggaaaatatagcctgcttttctccccagctctaacctttcaacctataactactccctactgtaatttttgtgggatttgctgatattgaaggaagatgattgaaaatctgcttaagatttcgtctttatttcccgcttgacaggcctagggccccactgaggaagtgtttctctctgcagagccctcagccaccccatatgtcccagggatgtgctcaagtcacgaggaccagtcctttgtgtcacatcctgaggtccagagtcacctgccagccttgccgtctgcttggcattattaattttcccataaagtatacaatctgggtaaggatgtattcgtaagggacttcaccaggtgagagtcaccacaactcaggtgtcaggtgtgtgttttctaaagccgatcttagcgttaacgttctcctgtagggaaaactactttctgtctctctacagtgcctggttttggaatttctccacggtgttttgtaaatgtcttgtgacaccagctgaaaaggctgtgttcctttgagcactcagagcccttccatactgaggagttgggaggtggttgaaggaaaggaagcagcacagcttagagcacattctgtggcaaaactgccagagagagcctggggtagccatgctgcaggtcagtgtgcctgtcggccctggccctgagcctggcagcccatatttagagcctcatttcatcctggagccagaagggtggctgtttgcagagaaggccttgaatggaggggactcatccacctcatggaaggtgccatcccaggctggtggttgggaacggagagggaggcagagggggcacaccatcttgctgacggagtcttattttttgtgatgcctccgagcctcaagacccccaagctcacagccattccttgctagagaaacaaagcagcatattatgtgattttcagaggaaataaatggaaacatacaacgtcatgtcagagggacgtgggacacataggtaaactgaggcatggaaagaaagcccgtccctgtgtgaggttagagagccagggcaggatctttccctgaacgaaactctt

SEQ ID NO: 39785 - DNA, 2300 bp, Homo sapien
cctccaccaggagcacctccaccaggagcacctccaccaggagcacctccaccaccaggagcacctccatcatcacgagcatctccaccaccacgagcatctccaccaggagcacctgcaccatgagaacctccaccaccacgagcacctcaaccacgagcacctccaccaccacgagcacctccaccaccaggagcaactccaccacgagcacctccaccacgagcacctccaccaccatgagcacctccaccaccacgagcacctccaccaccatgggcacctccactaccatgggcacctccaccacgagcacctccaccaccacgggcacctccaccaccacgggcacctccatactacgagcacctccaccaccacgggcacctccaccaccacgagcacctccaccaccatgagcacctccatactaagagcacctccaccacgagcacctccaccaccacgagcacctccaccaccacgggcacctccaccaccacgagcacctccaccaccacgggcacctccaccaccacgagcacctccaccaccatgagcacctccatactaagagcacctccaccacgagcacctccaccaccatgagcacctccaccaccacgggcacctccaccgtgagcacctccaccaccacgggcacctccaccaccaggagcacctccagcaccatgggcacctccactaccatgggcacctccaccaccatgggcaccaccaccaccacgggcacctccataccaccatgggcacctccaccaccacgggcaccttcaccaccacgggcacctccaccaccacgggcacctccaccatgagcacctccaccaccacgggcacctccaccaccacgggcacctccacaccacaggcacctccgccaccaggggcacctccgccaccacgggcacctccaccaccaggagcacctccaccaccatgggcacctccaccaccaggggcacctccaccaccaggagcacctccaccacaggcacctccaccaccacgggcacctccaccaccaccatgggcacctccaccaccaggagcacctccaccaccaggagcacctccaccaccacgggcacctccaccaccaggagcacctccaccaccacgggcacctccaccaccacgggcacctccaccaccacgagcaccaccaccacgagcacgtccaccaccacgagcacctccaccaccacgggcacctccaccaccaggggcacctccaccaccacgggcacctccacaccacgagcacctccaccaccaggagcacctccaccaccacgagcacctccaccatgagcacctccatcaccatgagcacctctacagcagttggctgcttacctactgaagctgagggcaatggagcctccttactctaggtcagtccctgcttttggatgtctgctgtgttggccatagtgcagtgccccatggattaggcaccaatctaggtcaggtatcagcctctccagccctgcctggatgttctgtgccacttcatggcacctgaggttggcaaaatggaagaaggaaaaacaagagcttggagtttagaacttgagttcacagcaccctcccagctatttgcttgttttgtgactttggacgactcattgactgttttcaaacctcagggtgccttctctgtcagctagggccaatagttacactccgcgaggctgcattcagatcaaatgaagtgggaataatttgatgtgagagcaaaatgtaaagtctgagcagtttataagttgttggttgccattgctcactcaagatgtccattggccttgcgtgcctgggcatcccacgaatgcctggagtgggaaagatgccatggcaaatcctcatgaagtactctcttttcagtagtgttctttacttggctacaagcagacagtaagatgtcatggggttagaagaatagcaacaattgtgggtaaagaatggaggaggtggggcgtggtggccatgcctgtcatcccagcactttgggggttaagaatggaggaggtggggcgtggcggccgagcctgtcatctcagcactttggggggtaaagaatggagaaggtgggggtgtggtggccatgcctgtcatcccagcactttgggaggccaaggcaggagcatcacttaccaggagtttgagaccaggctgggcaacatagtgagaccccatctccacaaaaatatttaaaaatttagccaagcgtggtgatgtacctgtaagtcccacacaggaggttgaggtgggaggat

SEQ ID NO: 39786 - DNA, 2300 bp, Homo sapien
gcacctgccaccacacccggctaattttttgtatttttagtagagacggggtttcaccatgttggccaggctggtctcgatctcctgacctcatgatctgcctgcctcagcctcccaaagtgatgggattacaggcatgagccaccgggcctggcccaaaatggctcttattgaaaagacagaaaataacaaatggctggcacggatgtggagaggagccctcggacactgtgggtgggaatgtaaattagcgcagccactatagagaatagtatggaggttgctcagaaaaaagtgaaactagaactaacatatgatccagaaattccactaccgggtttgtatccaaaagaaaggaaatcaatatatcaaagagatatctgcatgcctgtgtttattgcaggactagtcacaatagcaaaaatatggagtcgacctaagtgtccatcaatggatgaatggatatagaaaatgcagaatatatacacaatggaatagtattctgccataaaaaagggtgcaagcctgtcataggcaccaacatgggaaactggaagtcattatgtgaagtgaaataagccaaacatagaaagacaaatactgcatgttctcactcatatgtgggagctaacaaatggatctcatgagggtgcctccgttgagattggtggttaccagaggatgggaaggggagctgggaggaaggaaggagagacattgactaatggctacaaatagacagaagaaataaaacctagtgtttgatagatcaacagggtgactagagttaacaataatgtatgtatgtttcaaattagccaaaagagaacagcttgactgttcctggcacaaagaaaagatgaatattttaggtgaagatcccaatcaccctgatttgatctttacaaattatacaatggtattaaattatcacatgtaccctgaaaatatgtacatcgattctgtatcaatatagaaaagctttctagagagcccatttttctacactcggcacctccacaacaagcaggaagcagccggtgtgaccacacctcccaaaaccaccattacgggctgcttagcattctaggacacggagacgtcgtgggggaaactgcagggtgactgaagaaggagaatcccagaactcccccaaggacgacagtgcagagcccacagcgttgttgaaggggctgggtgagctgtgagtagatcccaggcaccatcaccatcgtccttgccattgctggccgtcatctctggtcatcgcaaacagagccccttacggtacgttaggggatggtgtggaaacgcttggctaaatgaagatgctgctgacattgctacgtggtgcctgccacacaggcaggcaatgtcttcagaggagccccagcttctcctctcccttctcctcctcagatctaggtagggccgcttgtgctcccttggggcatgaaggaaaaacttcacgcaggccacccctctagccaccgtgctcattcagaagccacaccagacaaacgttgaggggtgggtaaggctgcctgggccctgggccctcagaacctcaagcaaagctgcccgaaggtggggtctgccctggcgtctgtggggtgggggcacacagtctgatcccagtctgacatgcaccagctgtgagcctcgagatgcctcaagtatgtcttcatggagccgccgtgaagacgtgatggcactcagtgggactccccacagggccagtggaacctgtccctgcctggccccccagttacccagttacccggtgcaacctgtccccgcctggtcacccagttacctggtggaacccgtccccacccagccactctgttaccaggtagaacctgtccctgcccgaccactctgctgtggggaaaagcaagagagatcagattgttactgtgtctgtgtagaaagaagtagacataggagactccattttgttatgtactaagaaaaattcttctgccttgagattctgttaatctatgaccttacccccaaccccgtgctctgtgaaacatgtgctgtgtcaactcagagttgaatggattaagggcggtgcaggatgtgctttgttaaacagatgcttgaaggcagcatgctccttaagagtcatcaccactccctaatctcaagtacccagggacacaaaaactgcggaaggccgcagggacctctgcctaggaaagccaggtattgtccaaggtttctccccatgtgatagtctgaaatatggcctcgtgggaagggaaagacctgaccgtcccccagcccgacac

SEQ ID NO: 39787 - DNA, 2300 bp, Homo sapien
agggagagagttagggagagagggagagggagagagttagggagagagagggagagttagggagagagttagggagagagggagagttagggagagagttagggaaagggagagagttagggagagagggagaggaggagagttagggaaagggagagagggagagggagagagttgagggagttagggagagggagagagttagggagaggcagagagttagggagaggtatcacatggctttaaatgatcagaacagggagtcgcggagctcactcatcaccaaggggtggctcaagccgttcaggagagatcctccgccatgctgccattgcctcccaccagaccccacctccaactccaacactggggattacaattcaacaggagattagggcaggacaaatgtccaaacagtatcaccaccaagcccacatttggggtgcgcctcgctgtgggcttacagcctttttcctggatggatattgctgggggggggggttgcatttgttttgaggcaagcgctgctgtgttaaaaattagagtctagtctactacaaataatgagtcagaagcagccccatctatccagtccttgctgccatccttctcccaaccagcggctgtttttgtaggatccgcaggtttacacacgggcctgactttgtaggagggaagggctgcccgggagctaccgtgacctctatgctgccgcattctgcaagaaggtgctttctacggggaggtggtcccctgggcgtctgggtgtgaaggataagctgccacccaccaccccctccgggcacaggtggctgcgacaaacaaagaggagctttcttgaaggatgggagggtgaggggccccagcaaggagatgacggaggtctgaggacagaggtgtccgtgaggagggcacttaagacagtcagccccaatatccaactctgaattgcagatgtttgggctacgatggaacctccccgctgccatcccagcccccattcactgtccacaggtgccagccttgcccaggctggtaaggggcgcggaaggcatggccctggtggccaggcatggaggagaaaacccacagggcgccgagcagatgtccttggaatgagaacgtggcaggaaggcacgcgggagggctcaggcctctctgtccaaggcagaagcaggtgcggaggttgggggcccaggtggggtcgccaggacagggacccggcagggggtggtcctggggtagcgtgtgagggaggtgggctgtggagaagcgcaggctccctcccacccggaggcccctactggccccctttgtcttaggacctcttggaagtggcactgtctcctgaggaggacacgcgacatcccccaggaccccgggcgggacggcggcgaggagaccaggcccgcaacaggcctcaccctgctctgccccagagcccgcctggccccagcccacgccctgggccctccgggagctttcctgggaccgagcctgggcgccgcccgcgctgcaggggaggtcgactgggtccacctccgcgcgccccgatgcgcaagtggcccgttacgtttaaattaaagaaacggttggaaggcgttaattcgacgcgcgcggggccccgcgggtagaggccgcctgcccaggtccccagcagagtaggttcgggccttcccgtccgggccaagggcgcggcttaggcccccgccgtccccagggacagtgcgacccccagcaccgggccgggcggggagcggcggcaggcggggaggggatcggagggccaggcggggggcaggaatgcaggtgggaggggacgcgcggggcggggggcggacggggcgttccgagcggggaggggcgcgagccggggccggggagtccagggccgggcgtggggctccgggccgcggcgcctgcgagtggggagggaagggagccgggcgggcggggggcgtggccggggcgagcggggctggccgggggcgtggcctgagggcggacgcgcgtccgggggcggggccctgccgccgggggcggggccggggcggggccgggcgctgtccggtgctgaagctcggcccggcgtcgccgcaagagcgcgagaggcgcggcgggaggagccggcggcgcgcgcctccctgggcccggactcggccgcctcccgccgcctcccgcgcggccatggactgagcgccgccggccaggccgcggggatggggccgccgctcccgctgctgctgctgctactgctgctgctgccgccacgcgtcctgcctgccgccccttcgtccgtc

SEQ ID NO: 39788 - DNA, 2300 bp, Homo sapien
gtgtagctcagaactctcacttttaagtgactgattataatgcaacctggcatatcccaaaaaagggatttgttaggtggttcagcccggaaattaagaggtgtttctgtgtcagacatgactacatccagagtttgtgacagggtccttgggattctgcctgtccttgtggtcagctttgttgccaggctgactttccctgtggattgggctagtggctatttcctggcatctgtgtgggaaaccatcacctttttgctctgctctggtcatgtgctcctgtggatgggggcgtgagtcagacattattgggtggtaccccaccaggacccccggaagttgctgttaccacagggaaagggttagcacagggtgacccatggcaacagtgagtgagaggacagccctcgaatcacatcagatgatgacgggaaagggtgtggggccagggggagtgcagctggggtcattccatatctccttggccttctgatcacagtctggtaaagaagagtactgctgagctgggaccctggtccctggcccctgacgcctagcccctagcccctagctcctagcccctactccctaacccctaacggccagcctccccctcagccgcttctgtggtgtagctgactgctgtgtaaacctgtttctggatggtttttaagtagtatcccaatatcccagtgctgcatttgattctcactgagatctgtaaaagcctcaacatttgatgttgacatttctttaagcctagttatttgctagaagagattgaaaatgataacatttagtaaattcaacattaagttttgaaaattagattaagttggttgtccaatttctagtggatccatctgtagtctctttcccatagccttaaatatcttcatggcagattccagaggggtctgtgtgtgtggacacccccagtgtatctgtcttcatgacgttgcaactgaagtagatgctaggagaacactggagccaggatactgggcagtgtcttagttaatctttaattataagcaaaatcatccatcatttgtttaacagatctaaagtttaagagtaaatattaaatagaccaatattatttgcttcagcttttttgtttaattattattattatttttttttttatttttttttttttgagaccaagtctttctctgttgcccaggctggagtggagtgcagtggtgcgaccttggctcactgcaacctccacctctaggttcaagcaattctcatgcctcagcctcctgagtagctgggattacaggtgcccaccaccatgcctggctaatttttgtatttttagtagaggtgaggtttcactgtcttggccaggctggtctcaaactcaagtgatccacccaccttggcctttcaaggtgctgggattacaggcgtgagccaccatacccagcctgtttaattctttataattcacttctgttgtgaaaacagcattttatacttaagcttaatgattgcaacagtcaaaattatttattttttaaacttcacttatcatttaggaattattttcccgtaaggaccaaatctacttttattatttaaaaaatttactttttggaggagctaattataactagaattctagatctccagtgtagccagtttcattgtataggtatatctgttctcttaaaaataaaacagaaccaacaacactgttctctaattcaggtgttgagggaaccacactgctgaacttctgtatgttcacatgtgcaatgaacacaatttttagtttagtgactaatacactattactgttattgaagatatcagttttaacttaaatgggacaaacgtcatacttatttatttattttggttagaatttaggttaacctgatcaacctggcttttggtattggctcaccaaataccaaagtgtaataatctcttttttgttaccattttatacatgtgttaagtgagaaatgtgtaatgatttcaacaaacttgtgtgattagaaaactgatatattccaattttctttctagtgaagggatttttttatgtttcattacttcttgacattctgaaagagataactggaagttccttgattcagaaaacagattcagatgaagaagttgcaatgctgttggacacagtccagaaagtatttcagaaaatgttggaatgtattgcacggagcttcaggaagcagccggaagaaggcctgcgggtactcagaactccccaggacggggttcgctagatgggcttttcagggctggctacacctacacag

SEQ ID NO: 39789 - DNA, 2300 bp, Homo sapien
ataaaaacttctgaatcccaaggacaggccttcagattcctaaagttcttttctgtttttttttttttttttttttttgctttatttttatcatctttttttcttcctatttgctttttcttaaatgactggtcatcttttccattcttatgtttggataaaggattgggttggtaaggtagttagcaggtgttcttctctagttgtgtagagtcatgtctcaggtttgcctaaatgggcagagtgcaacagcaggaggacttcccttagtttctgtggaggaagagcaggcaggcaggtgacccctcggtacccaagtacaaagggccctttccttctgggtggcattgctcttccttcttttgcttttctggaggcttagagttattgctggctctttttttgttcttctttgtctgttgcccagtatctcttcctggcagatgacacacgtggtttagaaaccatttgtaagactttatcctggggagcacatccttgcccctgaactcctgctggcctgtatgcctcatcaggggttgtttgcagcccttgccacaaactcttctctgtaacctgggctctgggttcggggctgatgtgagctctctgaggtcacagcctcctgtctttagagcacccttacctaggaatgtctaggttacaaccttttatgctcttttctccatgaatctattccttattccctctcttacagaaatttctcagtctttttgtttctattattgctaatagaaattgatcattttggtcaaattttggggaagagatggggtaaatgcttaattttaacttgaaatctttttttctaattaaagtagtaagaattctgttgtgtttttcaacgtttctaatagaaaatgtcatgcataataaaaaagagactggagtaataacccctgtgtgcccacaacacagttttactcattgctgactaatcccaatctgatttcttcttcccctgtcttgaaacatatttgggacatcatatcatttcagctctaaatgggtcagaaggtattgataaaagataattttttttttaatcatgccatgatcacagctaaagataaattaacgatgattgcttagtgtctttgggtacccattcgttgctctcattttctcgttttgtttgaatgtttctctaactaaggcccatgtgctatgactaactgacatgttgcttaagtctcctggaccacgagctctcttgccataatctttttgtgttttgttttcttaaaacttgctgtttttgttgtcattgaagaagccaaattattctatgacgtttccagcagtctggattttatagaacccattcctgtgatgccattagtgtgtccctctgccctttgtgtttcctataaattggtagttaaatgagagagttgatccgattcatgtatttgggattttgtttcgtgagattatttccctgttgatgtcgaatactcccatcggggtacttattgcctcattgtctgtttttgaatttttagtaccactgacgatcatggcctggattagttcattacaagtagaattattttattctgggctctaaaatgcattacagcattttagaattcaaaagcgtggtgtacgtgggccatgcctaatctgaacacctgccatggtcagctgagtgtgcaggtctcactgaatgacagagctggttttgaggccctgctgtcaggggatgtggcacatgaggcaccccatgtttctggcttgatcttaaatactctgctttagaagcgatagcaagtaatctcaggtctaggaatccatatgtgtccagtatttctatgctcaaagtttctctaagttacgaatccctgaagtgctcacgtgtgaagcagatgtggatttcgggaaataagtcaaggtttttaagcctttctcccctcctacttatagagccttttagaagatccttacccgatggtccgttccacagggatccttggtgtttgtaaaataacttctaagtactgggaaatgatgcccccgaccattcttattgacctcctgaagaaggtgactggggaactggcatttgacacgagctcagctgatgttcgttgttctgtctttaaggtaagattttttaaattatgtaagtaatgtttatttgttgtagaataattagaaaaacaggaaaagaaaaagattaaaataatacctgtaatcctactccacaaagataacatttttgacctgtcatatatccaaagtaaggtttttaaaaaccaaattcaaagtgttttcta

SEQ ID NO: 39790 - DNA, 2300 bp, Homo sapien
gtagtctgagtaattaagatattataagtatagatatcactatttggtaaatttatggaaaaatgcacaaaaagaatttaaagggagaatattagatttcactcaagtgaaacgtgttactcaactccaagtaattgtttttgtcacaacttataacacattatagtttcttcctcaaattgtttttatttgataactattaaatttatctgataagtcattttattgatattgaaagaggtttcaggcagtgcttcagacatcatttgaaattaaaaatctcaacattgttgatgaaaatgttctagaattagacagtaacaatggtagcatagctctaaatatactgaaagccactgaattgtatactttaaaacagtagattttgtggcatgtgaattaagtcttaagctgtttagaaaatttttctatgaagcaagtgtactgttgatatcaaagtttgatagtattgtacacaaaaagcaaactatagactaatgtcacttatcaccatcaatacaaactacaaaataataatcagaaaaaaataatccccatactgcagctcttctagggttaagttgatacaagctcacttaaagtgtaggctgttcttttacagcctgtttaatctttcaaaattttcatgtttcactaataaagtttagccccaaaaggtgtgaatagagaagtaaggcaaaattaattgttgttagggacatgaggctacaaagaattttgggaagattctgactggaaaagaagtgagtaggaaaagaagaatgaaagctacaagaatgatcattttctgattttttcataagttttgggaggaacttgatacctaaattaatctcatacagtgaggggtcactaagtgtgacacctccttgttacaaagttatgaaacagttaccacatgttggtaataaagaggttagttaatgttttggaacaagcgtgagctcttagaaccattcaggaatctccccttttccattttatcctgaaggtcagaggtttaaacgagtctttttttgaggttatgtggctgttggcagaatagcagaaactagaacccaaaccattttatagcccaaggccattaatctttttatttcagccgtagattctttcttgtgattgactgcatttactactgtcctatatccattgaagttactcctgctgaagaattgtcatgacatgtggatgccagccagagcctacttgtggtggagagaacaattctccctgttgctctttccaaatgccattttattttatttatttatttttttgttaatgccttccttttcctttttttggtccttaggttctgagttactttcaccatcaaaagaaagttcggcagggagtggaagagatgctttatagattatataagcccatcctttggagaggattaaaggtatacatttcaaatagtttatccgtgtttggaatgtactacttgtgcttttgaatttagcaaactctaagtccaaattacaataaaatagtaaagataaggctgaagactgaatgctttctgaaatttttgaacaaatgtttttttcttttattaaaagcatttcttggtttcatttaactggaaatctggattggtttagtgctaactacacagttatttttaagtaaccatgtttagggaaggagattagaggcatgccgtaaagcaaaccagctgaggctgtgggtggtttgccgcgctggcctgggctgtccagggctgtccagatccttgagatctaacaaacacacaataactttcagtgcagacaacctggtatctttagtgaggatgtggggtgaccacttcttagtgacatgaagtgggctttgaagtgaggaagctttatcttttcatagtatctgttgacattgaactgagcaatgtttggtcaatttaaacgttataattgtctgtaatttgaaaataaatctgtatcaagataattaaagtgttactttgggaacactgtacttaagccttcgtatgttaactctttgggattctgagatactcttcttttattattataggccagaaactctgaagttcgatcaaatgctgcattgttgtttgttgaagcatttcctattagggatccaaaccttcatgctattgaaatggatagtgaaatccagaaacagtttgaagagctctatgtacgtacttcaggtggtcaagcttcttacagatatcagctttgtccaggctgtggcatgtactgcttgtgtgtgtccccacctcccctgtaaccgccagagctctg

SEQ ID NO: 39791 - DNA, 2300 bp, Homo sapien
ggattacaggcatgagccattgtgtctggcctaattagtttaatttaagctccattcagatgttatagatggtgagatgggcagtactcagcaactaactgctatttacaggtttttcagggaagtctgacttactggaccaatgatcaagaacttgttgagaagaaaatacctgattatgtgattaccattgctagatagtgtcaacttaactaagaatttgtgacactgaattttttcttaaagtatgttgtgaacgtgatctgaggagtgattattgactcctaggggagttttactgtattgaaatttaaatgatggtacttttcaagttttaacaaaactgtaaaactagttattaatttagtctaagttaatgaaaatatttgattatgaaatatataaaattttagttacaaaagatgtaaaaatatcttaatgatttttaagaaaacttttcacataccctcatccttcactgtgcgagtgtaattagtttgttgtgacaaagtatctcatcaagcttcttattcttagcatcacttggatttatgtatgttttatagtacattgttttattctgaattcttgagttgaaatacagtgtcttattaaaaagtcaccccaatcataatgaaaatagcttccaaatgctttgtgaattttactatcagtttatttgtatggtctgcaaataactagtgaaatgattagtgctaacactgtagttgctatcaacttcccagttaattcaggaatgttatattagtgtaatgacattcagatacctacagattataattatgagcattagtatcattaatctaattattgagcttttctgttaataaaagcactgcagtttttgtattcattatggtaattgctttgactgtttttcacctctgagccaaaatttgaggctggcacattgagggatagtagtggattattgattggtcagtagacctgtcttggctctggtgttaacagagataccattggtgttgttacactgaggtttggttagcctcagcatctgcctttctaaaattggtgatacgatttctctgagacttccagttccaaaaatctcttttctattatgtctgttgagggtctttttataacaatcgtcaaacagttttttaattaacattatttgcattttataactaatgtatataaatctttggcaagttaaacataactaatattatttgcttagcaaagctttaaataatatataaagtcatgatactctaaactgttgactctgaagtaataagaatttgccttactaattggaaaattactgtgctgtattttaggtattttatatgcattacctgagtctgaacgaaaactacagagttctattcaggatttgtgtgttacctggtgggagaaaggcctgcctgccaaggaagacacaggaaagacagcctttgtcatgttactaaggaggagtctggagactaagacagtatgctcactttttatttttttaaagacagggtctctctctattgcccagatggagtgcagtggcatgatcatagctcactgcagcctcaaactcctgggctcgagcaatcctcctgcctcagcctctcaagtagctgagacttcaggagtgcaccacctagctaggactttatttttaaacgtcttcctaacattctaaacctgcgctattcaacgtagtagccacttgccacagaaagctgtttaaatttaaagttaaaaataatgaaaaattcagttcctcagttgcattagtcacattttagtagctctacagtgaaatgtggctaatgtctactgcactagacagttcagatgtataaaatcttcatcatcgaggaagttcttaaacttgctggatttttaattattttccttatgttttaaaaaaatgttctgtagagctatagggggcatttgcaaattttaaaatctgtttttatttgtcgttattttttaatctttgatgaatcaactagaattaccattatttatgatataaaatatacttgatttgaaatatgactttactgttcattgaaaaaggtatcacattttttgtgtcattcctagggtgcagacgtatgtcggctttggcgtatccatcaagctttatattgctttgattatgatttggaggaaagtggagaaattaaagatatgttacttgagtgcttcataaatattaattatatcaagaaagaagaggtaaataggtatttgttttttgatctgtttgtgagctgcttcttaatagatgtttctcctgtgtt

SEQ ID NO: 39792 - DNA, 2300 bp, Homo sapien
tgagtgggctcgagcaaaactctagcagaggcaccgctggccacggaggtttctagctggtgaagcgatacccaaaggatcctatgacattagtggctgcatgggcaggtgcattgggggtgcactgggcgctcctgctgccctgcttccacgtgcctctgagcactgcactacatagacatttaggcctcataacaaccccctagaggaggctgagctctgcattatacagacatttaggcctcataacaaccccctagaggaggctcagtacttaagtaggtcccatttgatagatgaggaaactgaggctcagtcgtccatggcttgtcaaaggtcaccagctagtgagcacagaaccaggttagcccaggtggtacagcttcagagctcacatgcgtaacttgttacattattcctactcaggaagtggaaaccccaggaacagatggctgattggaggagggaccagcataaggaaaggggcaggattcaggggtgggaggggaagtcgatatctgttttggatgcatgtcagcaccagcgtgggagtaggcagtgagctgttgaaaattctggagttcagaaataaccgtgtcttgcaaatccagatgcagaggtcactgcttgaaggtggcagtttgcaccttggatatgaaggaaattgctaagaagaaagcagtgagaagatgagggcaccaaaattcaagaaatggcagggaaggatctgtgtatggagggaggaggaggtcagaggtggctggagccccaggatgaaataggcaatgttagatatcggccacctgttgacaagggtcccagactcagcatcctctgagtgggtcttctccctcccctctgcagcctgccttgcttcactgttgcaagcttcctagtaaaccagtcttctccctgctataattttatattgcttgttgaaacgatattccaacaagtaacataaatatttttgatatactaggctaaataaaacatatttaaaaattaatgtcacctatttatcttcatttttctaatgtggtcactagaaatttacaagtgcacttgtggctcccatgatgttcctattggttggtgctgtgctcccacagtgcaacgacttcaatctcgccaagacctctggcttgagttaagccaggaaaacagataccactctagacatctcaagcatgaaagaatatagctccagggaaggccaagtcctcacgaagggatgcagagctcggtggtaaagagcaccgttttctaagaatttgctttcaacaaaaattgggaacgcccaatcaagttattcgctgacacaaattaaaagagattgatacatcagtatgtgattttggcatttaagtccaaagaattgaatgacattgctactcctccttcacacgggtgcctccgagggtccccgctaaggcctctccctctccaccctatgggcagctgacctgccgggggcctcacctgctggaggagcaactgcaggagaagcacctgttaggggccgcacctggccggaggggctcctgcgggggaagcacctgcccagggtgcacctaccgtgtgcaggctgcggaccacccggacaggtgccccctcggcagggagggcggtcacgggggccggccaggtcggggtggggtcctcccggggatccagacacggccctgtggcctctccccgccccaagcctttcctttctctccccctctctctcttcctctccttcctccttcccacaacaccgcccgctcgcagcgccccgccctctcctggaccgcgcactccctccgcggaggccccaggacgcgcacgagcgcgcagtggacgtcggcgcgcggaccgggcatgggttccccagctgtggcgccccgcgtgcgcgttccgtagtgcccggtagggcactgggcttagctgctcgaggccgcgccctaagaggcggggcatagacaggaagaagactggcgggcatgtgggcggggcatgatctggaggcggggcgggccgggcgtgtgggcgaggcccgaggctcgcggcgccccagctctcgcgagagcggcgcctgatgacgaccgggagggcggggcccgtctggggcgccggcgggtgcgtttgaatctggtccgagcgcgggaaacggcgggtccccgagcccaggtaagagctgcggtgccgagccgggattgggttcagagcaggggctgggaagtagcagggatcgggcgggaagcccctcctcggctggtcggggtcccagcctcccctcccctaaggaggcggcc

SEQ ID NO: 39793 - DNA, 2300 bp, Homo sapien
cgcttgcctgaccctgtctcattattctgtgttggttgttttattaggttggtgcaaaagtaattggagtttttgccattgaaactgcaattacttttgccccaatctgatacttttttacattctgttttatacaaaaggatttgtgttttgtctagctggtttttccttcataaagtgcacttctgtattctcaaaataatctatgcttactggaccttggattttaaaaataatttttaaagttccacaaacattgtcatagttatttcatttaaaactgcttttgtgattatagtttagtttgaaaagaaatatgcaatcaaccttttaggttttcctgagtagttatgtgttaatttctctgaccatttttgtatagcctgagaaaccttcagagttcttactctatttgattaaattattttatattacagccatctaacaggaataattcctgttgcagagataatgcagaaggttattatacaggaaaaagaggctgggcatggtggctcacacctgtaatctcagtactttgggaggctgagatgagaggatcacttgaggccaagagtttgagaacagcctgggcaacatagtgagatccacctctgttttttaaaaaatttttaaatgccttgctgtaaattttctttaatgtggattttgaatggagaaggcttaaaaggtacttagaaatgtattgtctccataaatgtcatgaatggaaactgtatacatcgttatgagtgtgtattgccaccattttcccaggggttaaaagacaggtagactattgcctattaacccagggttctccgaaccgattggtcattattgtcattactgcttttctcatttgtcattattacatcatttctttctgtgctcattgtaatctataatgacgaaatagcagatcttttgcttgttaacagtgttttgtgtctttgttaggagatttcataccatgttaatcattatggaaacactacttaagagaatatggctgaaatatgtttgggtttttaaaaatatctttcttacagactaatattgtctgtggacctttctacatttgtttgtttgtttttgaaacagttttgtcacccaggctggagtgcagtggcgcgatatcagctcactgcagccgcctcctcccaggttcaagcgattctcatgcctcagcctcttgagtggctgggactacaggtgcgcgccaccatgcccaactaattttttgtatttttagtagagatgaggtttcaccatgttggccaggctggtctcgaacccctggcctcaggtgatctgagcctcccaaagtgctgaaattacaggcgtgagccaccccacctggcccctttctacattttctaagttcctatctctgaggacaaagggtcaggagcgtagacaacgtagaaaggttctgcagacatgatcctagttatgccagtgtttccaccctgtgttttgcaggtcagagacgagcagcaccagtgttccctggggaacctgaaggtccccctcagccagctgctcaccagtgaggacatgactgtgagccagcgcttccagctcagtaactcgggtccaaacagcaccatcaagatgaagattgccctgcgggtatcgtgtcgtcctgcagtgaacaccataggggatggggaggcgggtgctggcagggatactcatgggccccgggcatgaggccggtgaagaaagctctgtgtcggctgcagctctgggccgcaggagggcgccggtgcagggaggagatattgttgctgggtatcagagggttccggggagaagacaaaggctgggactcagccatagaacaggccacgtttccaggttgcccgagcaggcccacggctactcaaacagtgctttcctgtgaacccagcaaccttaccgttatcctttggcccagaaagtgttactgttggtatcaacaaggttttctcctaagtcttaacttttcaaaggttgttcagaagagagaatttaataaaactccacgagacagtagaacttacaggaaaaaaatattttttgtccaaaatcacgattcatttgtaaatagctaaggaaatattgaaagtaaaactggcaaacatatggggaaatactaaaactcatgaatcaaagaaatgcaaattaaaataaagagccagctttttaagaaaattacaaatgtcttctattgagggggcaatgggaacagcctccttgccccggcagagactggaggtgtcgcacacctctccagagggagctgcgacaaccct

SEQ ID NO: 39794 - DNA, 2300 bp, Homo sapien
aagtggctgggactacatgtgcatgccaccatacccagctaatttttgtgtgttggaggggcgtgtgtgtgtgtgtgtgtgtgtgtgtctatttatgtatgtaaagatgcggtttcaccacattgcccaggctggtctcgaactcctgagctcaagccatctatccaccttggcctctcaaagtgctgggattacagacgtgagccatcatgcctggcctgtcttctctcttcttcttcctaataagtcttacaagatgtttattgattttattttcttaaccaattttttgtttaattgtcattattgcttttcttttactatttcattgatttctactatgatcattattatttcagtcccacttactttgggtctttgcttctctttttctagtttcttaaagaagaagcttgagacatttctgtttttataatgtaggcatttactccaataaatttcactttaaattctgtagctacatctcacaaattttgacttgtcgttgatgtctccttttgattattattatttccttaatttccctttcagttttttcctttgacctgtgtatgggttattttggtctgttatttagtttccatatgtttggggatttttttttaatctttctattattgattccaatttcattccatagtggtcagagtacatactttgtatgacatgagcccttttatgtttgagaccggctttatggcccagagcactgcctgtcctgggacacactccacgtgcacctgtaggctgtgtgcctttctggtgttggcgagtgtctcatgaatgtcagtaggtcagggtggttggtggcattgccattgctcaggccctctggggccttactagttctcagactacttatatcaggtatgaagagcatggcgtttaaatctctgaatttatgtttttttcctcagcctctgtttttgctacttgtatcttgaacctctcttgataggtgtgtgtgaacagccaggcctaggagacctggtcatgccgcttgcccgaccctgtctcattagataggtgagtgtgaacagccgggcctaggagacctggtcatgccgcttgcctgaccctgtctcattagataggtgagtgtgaacagccgggcctaggagacctggtcatgccgcttgcctgaccctgtctcattattctgtgttggttgttttattaggttggtgcaaaagtaattggagtttttgccattgaaactgcaattacttttgccccaatctgatacttttttacattctgttttatacaaaaggatttgtgttttgtctagctggtttttccttcataaagtgcacttctgtattctcaaaataatctatgcttactggaccttggattttaaaaataatttttaaagttccacaaacattgtcatagttatttcatttaaaactgcttttgtgattatagtttagtttgaaaagaaatatgcaatcaaccttttaggttttcctgagtagttatgtgttaatttctctgaccatttttgtatagcctgagaaaccttcagagttcttactctatttgattaaattattttatattacagccatctaacaggaataattcctgttgcagagataatgcagaaggttattatacaggaaaaagaggctgggcatggtggctcacacctgtaatctcagtactttgggaggctgagatgagaggatcacttgaggccaagagtttgagaacagcctgggcaacatagtgagatccacctctgttttttaaaaaatttttaaatgccttgctgtaaattttctttaatgtggattttgaatggagaaggcttaaaaggtacttagaaatgtattgtctccataaatgtcatgaatggaaactgtatacatcgttatgagtgtgtattgccaccattttcccaggggttaaaagacaggtagactattgcctattaacccagggttctccgaaccgattggtcattattgtcattactgcttttctcatttgtcattattacatcatttctttctgtgctcattgtaatctataatgacgaaatagcagatcttttgcttgttaacagtgttttgtgtctttgttaggagatttcataccatgttaatcattatggaaacactacttaagagaatatggctgaaatatgtttgggtttttaaaaatatctttcttacagactaatattgtctgtggacctttctacatttgtttgtttgtttttgaaacagttttgtcacccaggctggagtgcagtggcgcgatatcagctc

SEQ ID NO: 39795 - DNA, 2300 bp, Homo sapien
tcatcccatctagttgtatctggcgtctgggggtggtgccaatcttggaagtacgggaggtttaggggaacgggaatgggcctcctctcagatgcaccgagtgagggcgtccatcgggctcaatgcagcatgggtctagagcctgggagcaagggtgggggaacgtgaggttagcgttcactgtgcgagtgaggaatccacagtaacgcacaaccctactggagttgtgagtgaacgtataaaataagacgttccaagaggacgtgtaaaataagagggttgagatgctttcaaacattttttgatgcatgtaacattgtagggaagatgagttgtttttgtttttgttttacagctctaacctcagctgggccaaactcagtattctgagctcacagaaactccacctcactcttccttactctcctgacactgggggtgagctggaggaagcttgtggaaaaatagtctgttccttgataaattattagcgttttgttgcatttctggagtgcttgttcatagacaaatgcttaaggttgtttcaggaagaaatgtgttttctatgttttaaagttgtttcagtaagaaatgtgtttctatgttctaaagttgtcgtattgttatttttatagtcttatgattgacctcattgaagttgaaaaggagcgccttttagatgaagtaagtttccctggagtgtgggtctgtttacaattgttgactgagtccctgccctgtgccagaggagccacgaaccaccccttcaccatcacacagtgccggaatcctaattagtatggcatgaacaacatttacttaacatatactaagaatttaggccttttagaaatagcaaatgaaaaataaatttaagagtccattcaggtgcgtgttgagtccctaccatatgctgggaatccttacggatatgaagcataaactgacgttattgcagacaaatatgcgatcccctgcaggagtaagggcagggctgtgcgagatgccccctagtgatggagattttcaggtgtttggagggaatggtggagaaggcacagtgcggccagtgaggcatctcacgtgagagatgcctgtagagacagtgggaactcatggcaaggagactcgacttccaccattttattgctatcagaataaaaagtatcaaaaaggaaacatttgtggtggcttctaaaagaagggtaagatttagataaatgaagcaaaattaaacaaaagtgttgaattctgctgctttcgtaatcacacgtttccttcccttgagtgttcagcattcattggctgtgacatctcgttttcctgggtgtgccaggcactggatggacagtcctgcccatggcttctatcatttagcatttgaggagcatctttgattaattattttgtgacttttaagctgatacaactgtatactattttattagtatagagtgatgaattagaacaaacagattaaatcgtttgatactgaaattcagtatttggaatcaatgttgtattacctcttaccctgtacattccgttaaaggccatttggtggagcatgcttgcctacacctgtggtcccagctgctggggaggctgaggcaggaggatcgcttgagcccagcctgggcaacacagcaagacccctatctcaaaaaaaagaagtctattcatagaagactttactgtctctaggtagtgctagaaaacatttgaattcttatgtgtaaagtgggaatgatactagtacttgcttagggtttctgtcggggtcacggggttggtgtgtgtaaagcacttagaatggtcgctcacacctgttgctgccatcgcctccaaacgtgaggtcactggcatccacatagcgtagagctggatatggtgaggctcagccttcgcgttactgagaactgttgatgcctcgtggttagtgagcagcatggaacatttgtagagactgggtttaatttggatttttgattcagaagaacttttgctgaacgtaaacattttttctcttcagtggttcactctggacgaggttcccaaggggaagctacacttgagactggagtggctcacgttaatgccaaatgcgtcaaacctcgacaaggtgctgttgaagcatgtgctcttgaaaactacctaaccaactactcctcataactgagcttggtctctcagttgtgttgctacttgattttttaacaattatagcagtaattttcattattgtgtaataagtcactacagtagcatcagggataaattaaagataatggagtttttaa

SEQ ID NO: 39796 - DNA, 2300 bp, Homo sapien
cagcctccttgagataagcatggtactgtgctgggtcctctgcattcggcgtccctctgccaggagcgcgctctggggctgcgtggggctgtctgtcctcgtgtctctgtggaggggttgtccctccagaagcccatctgttctcctctgagccagcctcacctgggcactgctgccttgccctgctcttgtttgtctcagcacctgcttctcctatacacacttgcatttccccgctgctgggatgtactcggcaccagaagagggtctttattccctcggcactcccaattctcgagacggggttaggtgcgtagctatcttccatgccagttaaacaagccagccaagggtctaaacttcagtttgttcttcttttcagggtgttctaaggatacattttattgaagctcaggatcttcaggggaaagacacttaccttaagggacttgtcaagggaaagtcagacccctatggaatcattagagttggcaaccaaatcttccaaagcagagtcatcaaggagaacctcagtccaaagtggaatgaagtctatgaggtggggtgtcgtgtctgctgtgttgctggggtggtgggctgagccctgagcgggatggccaagctctcattccagcacagtcacgtgggagtgtggctcatttaggccatcatttaaatgttccttgtttaatttcccatctttaaaaagtgtcgtaccttctctccttactacacaacattcttgtcatgccaacaagtaatgttttaaaccttaattacataatgctatcatactgaatgatcagcaaaatatttttcataatgtgagtagcttgtatttctaagtataaaatgttacgtgtggttattaatgcagtaaacacaaaaatgaggttagttatatacctccttgcaagcttttttttaaattaggacatcttcacatgtcaatgaatagagatctacgtgatttttaataaccattccatcgaatagacgccttcatctgtttacccagagaggcctaggctattcaggtcagcattacaaacaatgctgtacaagtagaatgtgagtgtctcttcactcagccaagttttccccagataaagctctttaaagtgaaattgctggatcaaaagttacacatttttaaaggactgaaatatctttgtagaattacccttcaggacagtcgtgtgatttatactccaccagtttttaaaggactgacgtatgtgtagaattacccttcagaacagtcgtacggtttatacttcaccgtacgactcctctcccccactcctttgtgagtctggtctcttgccagtttcttaccctgagtggtgctaagcagataactcgtggttattccaagatagcatctgagtggagccacttcaggactagagggatgtgtcctggatctttggtctgtctcatgccttgcaccaagcttgtgggtgacgtatcatgaccttgttggagtgattgaacttgatctattgagacgcaatccaggatccctagaaacaagcacggtagactgttactgtgtggcaggtgtttcagtgacctcccgtcctcaagaggtgtgtgtgacttgacaataaaaaaataagtgtcctaaaagaatttactggctgggtgcggtggctcacactggtaatcccaacgctttgggaggccgaggtgggtggatcatttaaggtcaggagtttgagaccagcctggccaacatggtgaaaccccatctctactaaaaatacagaaattagccgggcatggtggcacatgcctgtaatcccagctacttgggaggctgaggcaggagaatcgcttgaacccaggaggcggaggttgcagtgagccaagattgtgccactgcactccaacctgggagatagagcgagactccatctccagaaataaataaataaataaataaataaataaggatttaccaccagagaaaagtacctggtcatatttactacaatcatcatatcatactcagtgtatgactatattagtaaaaatgcacttaactactaaccattgatgttttaggctttagtgtatgaacatcctggacaagaattagagattgagctctttgatgaagacccagacaaggatgactttttaggaaggtaaataaagcccattgtggttattggaggagggcatggggtcagtctttttgtttaataatcaaaagtatgttttaaaatacatttgtatacttgttgtctattcattaaatggttcttagatataacaattgtttcaccttggat

SEQ ID NO: 39797 - DNA, 2300 bp, Homo sapien
tcctagcattagtcatagtatgaattggtgggtttttttcaattatttttatttatttattttttgacacaaggttttgctctgttgcccagactggagtgcagtggcacaatcatggctcactgcagcctcaacctactgggctcagtcacccctcccgcctcagcctccccagtagcttgggctacaggcatgcgccaccacgtctcactaatttttaaaattttttgtagaagggaggtttcttacccaggctggtcttgaactcctgggctcaagcgatcctcctgcctctacttcccaaagatctgggagggaatacaggcgtgagccactgcacctggctgttgttatttttttatctgataaaagtattatttttattgtgttcaacatgttttgaaatatgtatacattgtagaatgtgctaaatcaagctaattaacaaatgcattatgtcacgggcttaccattttttgtggtggaacactagaaaatctactcttagtgactttttcaagaatatattatattgttgctaactatagttacagtgttgtacaatagatctcttgaactcattccttgtaattgaaatgttttatccatttgttaatatctctctagactctcccccattcttttagtaaaaataatacatgttcacttttttaaaatccaagaaaaaatatatttaaaagatcatccataataccaaaccatccataatggtagttgctagtaaagtataaattgaatggggtttaatggattacggcagtgtctagatgaaagtatcagtacaaagtaagaagcacatcccacgtgcacttgtgtattgcagcagcagtgtcctttcggataacagcttcagttttgtgcttggtgattgcgtgctggaattagtgataaccacaccaacagcagatgtggaaatactaatatgatggttttcattatgctttctttattacttgtaaaattgtcattgaaactgagtttcttttttttaatttgttcagttacacggtgaagtccccctttatctttctatatttaatgaacatgtagttgtatttttcttcatttcttatgttatggctagacaggtttcaaaaacatttttttctgatttaaagaagaaagtatgctcattgaagaataagctttggaggagaataaagaagaaaaacgttacctgcaattctactaactagtgataacattacattggcaacatttccgtggattttgttaatgttttaatgatatgtttggatatatgggtgtgtatagtatcctcctttcttaaatgctatattatggatagtatgttattcttcagaaatatgactttgactattgcagtatcatctgtcttatgaagctaccagactttatttaaatgatgtctgatagacatttgaaaaactagattgtgagatatgatataatgagaagagttaaaaatagaatttgagatatttaattttctgctctttttaagttatgaaaacgtatttacttgagctatttattagatctgtgtctaggatatatgaattatttttgaactcattagacatgataattttgtaagcagaagtctggccttggaaggcagtgtttgtttttgcatggtatgttgttaaaagacagaggatttatccctatctctttttgtctgaataacctttggaagaaagcattccctccataatgagtcacaacttcagattgcttttcttcccctgtgctgtgttggtatattaaagtttgctaacagttacaagtatttttaactgccatggtttcgtgtagcacaattgagtaatggctactttgaggttcccatgatgatttgttgaattggtgtgtccttgtctggacatgaccagtcatgtggccagggcccgtgcgagtggggctgcccttctgtggggtgtgctgaggtgtggccaccggcctctggttagctttgaggctcccaccgtctcgcagagcccacagctcaggctctggctctggtgggtgtgggttgcgccctgagacccaccccttcctaactccctgcccttgggtgagtcaggtccaactcttagaaccttgtttcctctttggtttgatgggggttgagcctgactctgtgctgtggttgtgaggctggaatgcggagaggccagtgaacacactggacatgggcgggcagggaggcatgtcctcgggtcagccgtctgagtcacaggcccagagatgcccagctgtgaccagtgctccgcttgcaggcaagtcctggtgtg

SEQ ID NO: 39798 - DNA, 2300 bp, Homo sapien
gtcatgaaaggtcacaggagattgaggggtataatattagcaaaaatctaagagccgagctggacctgcagtcagaccagacacctgtaagactgagctgtggcagagccttaggatctgctttctgcaggcaattaaccacagggaggggctggaaacccggggctcacacagagggaagctgaggacacttgggctgactggtatgcaacatggaaacttctcttcaatctagtttacatccttgggtcaaccactggatggcacatggcacaggatttttttttttttcttgagacgtagtcttgctctgtcgcccaggctggagtgcagtggtgcgatctcgactcactgcaacctccgcctcccgggttcaagtaattctcctgcctcagcctcccgagtagctgggactccaggtgcgcgccgccatgcgcggctaattttttgttatttttagtagagacggggtttcaccatgttggccaggatggtcttgatctcctgacctcgtgatctgccctcctcggcctcccaaagtgctgggattacagaattttttacgtggcttatgtttatgcaagtctttgtaggatgtgatcctacaattttccagtagaggaaagctgcaaaagaaaggctcaggctcctttctgtgtcaacaaagcaattacttgcttttgtgttgaggcttagttttgaatgaaaggtggtgttaggagcattaaccggttgcatatttacaatctacataatataatttgttgctgcagcaaaccagggactgtgaagagtaagaaaagggaaaccacttccattccttgcttggggtttactgcccttgcctggagttgagagtttagactctgcaatgttttacatatgtgatataatctccacatacatatgcacacaaaattatgaagacgcaggaacgaggggagacagattcctatgtaaaggtgaccctgcttcttctgggcatttgtttattcattcagtacctgccagtgccctactctgttacaaattcagtaaaaatttccttggaattcactgaatatgctcaaaaacagtcaagtaggatgttctttgctactgtttggcttggagtttccttgaaagaaactacagaacaaatataattaactcgattgaattcactggaaagtaaagtgatcaatagttgtgtttttgagttaactgaaaagtgacctcaggaatcacaggaaaggcccaaaattagtcgtttgaaacagctattcatagttggccacaatattaacaccttcggcgaagctgcgtggtgcccggggtggagttcccgagtgtcaacagcgtcccttgggcgcttgcggtggtctttgcccggcactaccagacccctcagggaggacttttgggattaaaggcatcttaaaagccaactgaactgtgtgagagttgtcaaggtcacaacggagtcgtttgtgtttaaaaccctgacaagcagggtgggaagggccccagaggcagcgttctcacgccggaatgcccgataacaagaccgtcccgagagactccgcaaaagccacaaccttgcacactggctaggcaacctcacaccgaaaaataccggaggactcccgccagcggcgcccgtccgacctccggcgggcggcgccctctcacccgtcctcctggccgcaaaatgaccgcaaacagggacgccgccctctcatcccaccgccaccccggctgcgctcagcggccgcgcacccccacgtttgccagcagctcccagaggcggtcagcctttgggtttgacgacggcaacttcccgggcctcggcgagcgcagccacgcacccggaagccgcctcggggcgcgacgccgagccaaaaccgcccgcgggctccgaggccacaggcaagtggggagggtgccccgtggggctcgaggggacgcaggcacgcccagcccacgcaccgagcactctcctttcccgtccccggctcccgccagccgagacacaacgctcgcgtgatgacgtcgtgcgcctgcccggcccactccagtagtctccgacccggcccacggcccgccccgcgcgatgacgtcagtatccaccccgcccgctcccggtgacgtgccagccccaggcccacgccgctcccgccccgcgtgatgacgccaccgtcccgggcggaggcgggcgtgcggcggagccgcgtcccctcagaggggcgctggcgcggggctgagccgcccgggatcagcgcgagcacccagcccgcctcggccgggagggcagcgcggca

SEQ ID NO: 39799 - DNA, 2300 bp, Homo sapien
acatcacacgtgggggtctgtcggggggggctgggggatagcattaggagaaatacctaatgtagatgacgggttgatgggtgtcgcaaaccaccgtggcatgtgtatacctatgtaacaaacctgcacgttctgcacatgtaccccagaacttaaagtataataataataaaaaaagagaagggggtttgttttgggaaagggctgttatctttctttcaaagttaaactattctacgaccaggaatggacaaggacagcttggaggttagaagcaagatggagtcaggttagatctctttcactgtcataattttctcagttctaattcttgcagaggtagtttcagacttaagttgcagatctaaagttacaattggcgtgtctttgtttaagtgaggacacacatcttgaaaggtctccaggctggcaaaacatttacacctgggagactggtgggggccaaggtgcccggccctgccttcacgggggcctggctggcaggagccttgcagcctgcaaagcaacagctgtgcatttggaagagggtgttgggcgactcggcttgcaaccacccaaggggttcaccttgcccgctgcctagacagagcctatcgagatgggggaattgcaatagagaaagagtaatttacacagagctggctgtgcaggagactagagttttattattactcaaatccatctccttgagcattgaagcattcagggatcagagttttcaaggataacttgggtggggggaagccagtgagccaggagtgctgattggtcagagatgaaatcatagggagtcaaagcggtcttcttgcccttatcagttcctgggtgaggggccacaagatctgatgagccagtttattgatctgggtggtgccagctgatccatcaagtgcaggttctgcaaaatatctcaagcactgatcttaggagcagtttagggagggtcagaatattgtagcctccagctgcatattagaaactactcctaaaacgtaatttctaatcttgtggctaacatcagtcctacaaaggcaatcaagtccccaggcaagaaggcctgctttgggaaagggctgttaccgtctgtgtttaaattataaaatataaactaagtttctcccaaagttagttcagcctactgccaggaaggaacaagcacagcttggaggtcagaagcaagatgctgtgggttaagttacacctcttttactgcctcagtcataattttgaaaaggcggtttcaggctttcagccctaactttccctttggctgaaggagttcggaggtcctgagagtttttgattttcccttacgtgttgtataaaaacagtctctcaacgttgattcctgcctaccttactgcttgtttttatcaaaagacgacatatgggaatataatttgttaagtgcaaagccttattcaaatgtaaagctcttttcttttttttttttttttttttgagacagagtctcgctctgtcgcccaggttggagtgcagtggcgtgatctccgctcactgcaagctccgtctcccaggttcacgccatccttctgcctcagcctcccgagtagctgggactacaggcgcctgctactgcgcccagctattttttttttttgtatttttagtagagacggggtttcaccgtgttagccaggatggtctcgatctcctgacctcatgatccacccgcctccgcctcccaaagtgctgggattacaggggtgagccaccgcgctcggcctcaaacgtaaagctcttttcaatatctgctctccctttctatcttccccgactgtcagtccggtcccgtgggaacccggggcgggttggggcgagtcaagagcccctgcaccccaagtcagggtactgcacctaccccttggggagaccaacgaccgctcggtcctctgctgctcctgcctggcggttgctaggagccggggaagcgcaggcgcattgggaggggccgcgggcacgccgagcagcgaccactcggccttcccctgctcctgcctgccaggtgctaaaaatgccggggatgcgcaggcgcactgggagaggccgcagggcacgctgggcagtgcttctgggccctctgctgctcctgcttgtcggttgctaggcgctgggacgcgcctcccgaagggtgcggggcacaggtggcctcttcggggtggaccgcgcctggccggggccgaggacaccgcggccgcccgggcctgcgggaagcgatggagcccgggaaggtcggtgcggcgctgggtctgggcgag

SEQ ID NO: 39800 - DNA, 2300 bp, Homo sapien
tctgaggatataatgtcatgaaaaacgctccagtgatacgagaaaagcatcttacaaaagaatatgtacagagtcctactttcttgatggaatggcttgtatcagagaaatcctccagctaaaacaagggtaaaagttggatttaaaacaacaaaaacactccagctgattgaatataccggagcaaccaaggccgctgggccctgaagagccgaggtcctggaaagaagggaaacatggaggcgatccctgtttccattcaggtttgcatcttgatttctcaagacagtagagtgaaacagaaagatctgatggcctagggcatttgacgttcgcacagggtcgaggggatgaaaatggaagttgagagccttccggtgggagaatttctgataaaacatcctaggttttggtcgagcctcctgcaggcctgtgctctaggaagcagggcagacctggaggagtgtgaggtgaaggatcgggggaggaggaggagcagagagcagacccggtggccgaggcacctggatgttgggcgggtcgttcactcggtcattcactgtgcattcattgagcaccggctgtgtggcgataacagtaaagaaacaaaaatctctgcccttgcgagtttatatcccagtgaggagtaacaaacaaatatcttaaggatttgaccccgggcacactaatgttagggtgaaacttaggaaaggaaaacccagcacaggcgatggaaaaggaactgtttgtgaagcaagaggaagccacgtgggtgcggcgtttcggggcctgtgggcagagggccatcggccgtgtcaggcctgtgggtgcagggccattggctgtgtcaggtctgtgggtggagcatgatgggctgtgtcaggcctgtgggctgagggcgattggagggcgatcagctgtgtcagacctgtgggagcgcgattggctgtgtcaggcctgtgggccgagggcaattggctatgtcaggcctgtgggccgagtgcgattggctgtgtcaggcctgtgggtggagggccattggctgtgtcaggcttgtgggcggagcacgattggctgtgtcaggcctgtgggctgagggtgattggagggccatcagctgtgtcaggcctgtgggccgagggcacttggctgtgtcaggcctgtgggccgagggcaattggagggcaattggctgtgtcaggctcgtgggccgatcactatttgctgtgtcagacctgtgggcggaggacgattagagggcagttggctgtgtcagacctgtgggtggagggccattggctgtgtcaggcctgtgtgcgcagggcgattggctgtgtcagcctgtgggccaagggtgattggctgtgtcaggcctgtgggcggagggcgattggctgtgtcaggcctgtgagcgaggagcgttggctgtgtcaggcctgtgggaggagtgcgattggctgtgtcaggcttgtgggccaagggcgattggctgtttcaggcctgtgggaggagcgcgaatggctgtttcaggcccgtgggccgagggcgattggctgtgtcaggcctgtgggcggagggcgattggagcgtgaaaggcaggtcaagtcctgggggaagcacagaggttggctgtggcctggaaaagagcgtggcccaaaacacttactggctgcgtggtccgaccatggtgcaggtgattgcatagtcagtatgtcagctcctgaagtcaaatgaattagtccttaggaacatcccaggcatatatgttgtgtgacttgattttgtgttagctcaggcatacgcattagaacggtcacacatgaggttcgtgacacacacacgaggcagtcggggagcagaatcaccaaatgccaaggtcacacaccaggttcccacgactgtctactactcagttatttttaacagctgttaaatatctcagactcaccccagcctgaagctaggtttctgacaataacatgcatttaactctaagtttacttctgttctccctacacttccccacgtatattattcgagttaatttttgtcttgtttccaatttatttcaaaggatgcgaagtacaaaactgcttcggctcattgacttagatttttcatttactttctctctcttggatctaccaccagtaaatgaatatgacatgtatatcagaaactttgggaaaaaaaataccaagcaggtaagtatgagatgtgttaactaagtgataaaatgcaagtaaagtctagtaggataactttgtgtcttcctgaataatgttctgcaatattagaac

SEQ ID NO: 39801 - DNA, 2300 bp, Homo sapien
actaaaaacaactattaaatacggcagctggaagaagacctgacgcttgctggtggaagtggccccagaaggctgcagctatgagcgattgtgacgaggtggaaggagggttccctggaattggaggggacgttgtgacccaagcatggatggtgtgggtagcaggatgtgaactgaggggctgataggtgtttgtggtgtgtgtgtggctggggttggccgggtgctgctttccacattgacttggcgcctgccagcggtgcggtccagttctttgactgaagttctcgccagtcatggacttcctatcctcctgtttcacgagctccatctccatcttctgctgatgtgtgagagctgccggcacggccagcagtggcaacagtaacgccttggagtgcagtccctcgccgggtggagcagtgtctggaacggcgctcagccgctcgcagcctttgaggagagcagtgtgccacgtggtgttccagtgctgaagcccctgcagctggtgtattagcaatgttctaaagcagaggggcagccaggcgcactgcattacctcccagctctgagatcccgactcccggcttctggtgggcagctggtttctgtgggagtcgctcgtggagccacaggtgtcttgggctgcatgtgaccacattttagccagactctgaggtcagcttggacagagtgttggggcataggctgtggccgttcatcaaaacctacgtttcatgtatgttggtttcgaaaggaccacgtttgtttcttcatgaagctgaatttttttttgagtattcggaagtgtgttaaatttaacttggattctggcaggtcgttgaaatgtgaacatatttttcttctccctagatcgaaaagtatcctccttgcacacctcccgagttcagaggcagatggtggtctccgttcacgacttacccgagaagagctttgtgcccctgctggacagcaaatacgtcctctgtgtgtgggatatttggcagccttcagggccacagaaagttctgatatgtgagtcccaggtacagctcaggatgagagtcgcacgtttgatgggaggatgggcagtggacagagcgtgaaggtgcaggtggggagagtcacggagagaggtgcagggacaggaggtgggtagggacttatgggccattctctgtctctcacagctggcctcagctgtgctgtgggtgcagcgagacacatgggtgtgcttgtagttcagaatgagcaaacgagaattttcacagagcagccctttgggtcagctgagaattaggaaatggaggtggttgtaggctgaatgaaaatactcaccatgctgggtgtagctctggggccctagatgcctgtgtttttgccttgcactgttttggtcctgagtgttttagaggtttcttagactgcgtggaggtttcttagactgcatggaggtttcttcaactgcactgaggtttcttagactgtgttgaagtgtgctgtcgctcacagcccttctggaggcctcccattcaccgcccaggaggctggcaccgaggcttgaggactgtgcggtgaggggtcagggctgcctctcttatgtttgggaaaatgtgcatttgtattttcctagttatgtattccctggcctcaaacccattgatttccacaaaagctgtagagaagaataacttgaaattgtaacttttgtaatacaagatgtaaataaaatggcgcaggatggaactgctacttctgaggttcagccgattgagctgagtggacaggctcccggcaggctttgtgtgaccagatgagtgtcagcaccttgcgtttgtgatcataacaagcctacggggtgggtttctcatccctattctccatttcaggaacctgacaagccaccttttatttctgtgcaggagtctacgttctgcttactgggccctgcaggtgactcccgtgcaaagtgaaacatggtcagacaccccactcagtaaatgcagcttgtgttagcatgcttctcatattcttctgtcattggctttctgtgcctttgtcttttaggtcacgtgttgctgcttgagccctttgaaagcatttttactgtttgccggaacagcgcacggctcagttgtcgtctgggatttgagagaagactcaaggctgcattactctgtgacgctgagcgatggcttctggacgttccggaccgccacgttttccaccggtcagtgtcatctgcctgccaattgtgtgtctgctagaaaagccacacggatttgaggaacaaagcttta

SEQ ID NO: 39802 - DNA, 2300 bp, Homo sapien
cggtttcctcaggaagaggacggcctcccgcgcgctgcctgctttctcaggaagaggacggcctcccgcgcgctgccggcttcctcaggaagaggacggcctcccgcgcgctgcctgcttcctcaggaagaggacggcctcccgcctgctgccggtttcctcaggaagaggacggcctcccgcgcgctgccggtttcctcaggaagaggacggcctcccgcgcgctgcctgcttcctcaggaagaggacggcctcccgcgcgctgccggtttcctcaggaagaggacggcctcccgcgcgctgccggcttcctcaggaagaggacggcctcccgcgcgctgccggcttccacaggaagaggacggcctcccgcgcgctgccggcttcctcaggaagaggacggcctcccgcgcgctgccggcttcctcaggaagaggacggcctcccgcgcgctgccggcttcctcaggaagaggacggcctcccgcgcgctgctggctttatctgggctcctgaggttctcctttgagtgtcatcacacccacacttgcgactccttcccgccacagagggaggttggtggcgattggttttgtcttcattttgcccagaaagacatggaaaaaccaagttagatcaaacggaggaaaggagtcctgccacctgtgtgggctatgtggcctgggccaggtgctcagggcaggtagggctcctggcatgtgtctagggctccaggcgtgtgtctagggctcctgatgagtcagcctcacacgtggcctgctcaggggcccgggaaagagtcagcgctgcacagtcaggcacggggaccctcgcgtgtgagtccacggccttcagaggggtcaggtgggaggacagagtttgcttctgaacgaccttgaccatggaggtggatagattgtgttcacttaaatgtaaaacagtgaaatttaaatgttttaaggaaacaaaatgttatttgtatttaaaattgattaacagtgaaagatagataaatggtaaatggaacaaacatacaacagacgtgagaaagagcaaaagatgggaatgacgagatgagacaaagaggagcctgagaagagaaagggccggcgggcgcagagacagaggacccagccacgctggggagggcgggcgcagagacggaggacccagctataccatggagggcgggtgcagaggggccaggcgagagggccaggcaggcacagagacagaggacgcagctttgccagggagggcaggtgcagagacagaggacccagctatgccagggagggcgggtgcagagacagaggacccagctatgccagggagggcaggtgcagagacagaggacccagctatgccagggagggcgggtgcagaggggtcaagcgctgacagtgagggggtctttccagtggcttcccctctggagctcacacacacttactttaatccttataaggccctgtgaggcaggcaccgtaataattgctccataaccagctggcgagaaaatccaagctcgtaattagtaatcatcacgaaacagctttcttggctgacagcacataaaccaaaacagtagatgtgctggttccggctgctgagggccagggtctgcagacctgccctgtgaagcttacgtggcctgccagacttcatgctcggcaggtcccgtggcctcctggggctgtttctttgaggtgaaaagagggtggaccagatgcagttgtttcaaattgctttctgagggtctccctcctgggctggactaagtcagggggctttcatcctccatcaatcaggccaacaagtctattctataaaccggggtccacattcaattttatttgaacaaaatgttctatcagcctgaaaactgctaggaaggtctctaaggccatctggctctgagcctgcgattccaatgcttgttagcggatttgtttgtccagctgttggtgtctcttcttcctggctttgccgctcagccctgggctttccagagctttctaggggtctcctaagagggcaagcgggtggtactttctgtattttaatattgtgttagaatctgggacatctgattgctgaaatgagatgttagttggtacagggaggggtttccaggacccgcacgcccttgcggagtgcctgctggagggagccggtgtgtccaggacacccttgcggagtgtctgctggagggagccagtgtgtcagtgagatggctatgcccctgggctgctgtgtcccaggtttcctcagtctctaaccctttgttctcacagggga

SEQ ID NO: 39803 - DNA, 2300 bp, Homo sapien
gtagtatacacggtctgcaatgtcactttgcttattttagaggaaggagatgactgttagaccttgttttctataggaacaggcaaaggggagttgactgcgatgtttaaatagcacaggtggcctgtgagcctctgcacaccagcctttctgactagaagcccagggagatgagctgacagtgctgttcacaggcgttcctggggagagtgccaggcccaagggcagtagctggtgggggcagagcggggaacctgggctctgacgcaggcacaggcaggggtgtggtctttaaagagcccacaggctgcagaaggggcctccttggtgatgaaacttgacctcctgtggagggagggcagccctggaatttctctgacctttctttaggcaccaaagactgtaaacagtctctgccccggggcctgacatgaccagtctctgacctcagggtttattttattaaaaataattcttgaaaactctccatttcaaccgttgcccgagccacgtgttgaggatgacggcatcgcgttctttctgcccagggtgcggaggaggggccgcccccgggcggtgggaaggggggctgtccccagacacctcaaggcctgcggagtgtggacgttaaagttcacagtccctccaaggatcaagggttcattttgagagggagcagggactcccttgttagaggcctgcagtcctccagccccctgcaaagagttccttcaaggggaagccagctcgcctgtaaatgaacaacctgataagcaagaaggttacgggcagcccaagtcagcagccaggggagtgagtccagagatttttgtttctctgtagactctaaagatcccatcttcacacatgtccccgagctgcctttcagaagcccagaccccactgcggacccccacgaagagaccttagatggggggaacgggaggctgacctctgatcactgttctttgggtctaaatttcttcttgaggggcttggagggagccacacccctgagtcggttaacaatttctctgccgaccccaatttttaaacaaagctgctcttccttaaccaactacaaatcaggaaatccttgaatcctctgatgacccctaagtcctcacttcgagatctcccacccttttaggtcaaaacccacgtgtacgcccaacgtcctgattgacgactttgcctgcagcttctgctttcctgaaattcgctgctgcctttagaacccttgtctgcagccagtggggagttcaggacttaggcggagctgccccaccctcctgcttggcaccctgcaaatacatgccctcccttccatcgctgcagacctcagagtgggcgtccggtctcctgtgcgggatgagaatacacaccctcccttccatcgctgcagaccttagagtggatgtccggtctcctgtatgggatgagaatacacgccttcccttccatcgctgcagagtggacgtctggtctcctgtgtgggataatacacgccctcctttcaatcgctgcagacctcagagtggacgtccggtctcctgtgtgggataatacacgccctcctttcaatcgctgcggacctcagagtggatgtccggtctcctgtatgggatgagatacactccttcccttccactgctgcagacctcagagtggacgtccggtctcctgtgtgggatgagatacactccttcccttccactgctgcagacctcagagtggacgtccggtctcctttgtgggatgagaatacactccttcccttccatcactgcagacctcagagtggacgtccggtctcctgtgcgggacaagaatacactccttcccttccatcactgcagacctcagagtggacgtccagtctcctgtgcgggatgagatacactccttcccttccatcgctgcagacctcagagtggacgtccagtctctctgtgcgggccaagtgtacacagttttgttccgtcacaacttccacgacaggccagtgtgaggtttttgagctggtgctgactgaaaactgtcagctgcccaaggacctgggagctctgctccccactcctggtgtgcggtcttgcgcctggcctccctgcctaggttacatgcagtggtcatcccggtcgctcccacacccgtgtgggctctgggatcccctcttccagccagcccaggggacatctggctgtctcaggacccagccatctgtaaaaattaggcaggtcccttcagtatgctcctggtcaacaaagaaaaacttcaattttgagaatggcatctgtatt

SEQ ID NO: 39804 - DNA, 2300 bp, Homo sapien
aaaccctacaggggaggaacagccgaggggccgcactgaacctggggtctgcagcgtccacctgcctccctctcgctccacatgctcagccgtcctttcctgggcacctggcctgggccgtttactccccagtatccgtctgtgatggatcctctgcggcccccagaaatggtgggttgttctgtagatccgaccgcctcacctgtctccccaaaccaacctcgggttcattctcccagaagtccagggatgagcttgttgcagcagaggggtgtggccggcgtggcccagggtgtgcaggacagggtgcggacctttggggattgaggggtctctggacactgctgctttgctgtcctaacagcccctctgtccggcctcattttaccggggatatgggttttgcaaaccaaggtgacactgacaggatgtgtgagcttccctgtggctgcctcccggcacagctgtcccgacctttgacatcgcgccccagctggggtctgtgatgccaccaatgcacaggaacaagacattcatttttaagggaaaagtggagtcaaatgtgctcagaacaactgagtcccacagtcggggcacctgggccagggctgggcagcttgctgaggtccatcgagcgctgtgggggccagggcttggcacacacatggagactgtgccctgatatccccacccttctgcagctggctcagcaacgtccccagacaccctccccacatctgcaaaccacccttcgcctgaaggagcagccgctagggctgctgagcgccagctctggggaggagggcttgaaacagttttatatgttgttaaaataattcttatcctaagattatttttgttaaaaagagaataggtttccggttcccactcagctgtatcccgcaccccacgtaaccccatcaccaggggcccgcaggcctggccgcagctggcctggggctgagcgtcaggctctgcggctcccacagggcggcaggtgacctcctgaggcagagccagagctgctgagggtcccacggaacacctgtgtggagaggtcccctccttcatgaccttgctctcctgatctggttgtctcctcagcccgccttccgtggggaggcaaaacagccctgtggagttgggtggggcagggctcagccgggccgggtgggcgccccaagagagaggacgggctgccctcctgttgatttctcctggtcctaacgtcaggggggccctgactggcttccctctgtcctgcagatgagggggctacccttatgggacctgggaggccgccctgatgtgggacggatgtcacccggtggtcgcccaggctcgtgctgggccacacaactgcgtttccacatttcctccttggctcccctattctcttgggccgggcgcagtggctcacgccttaatcccagcactttgggaggccgaggcgggcccatcacgaggtcaggagatcgagaccatcctggctaacatggtgaaaccctgtctctactaaaaatacaaaaaattagccaggcgtgttggcgggcgcctgtagtcccagctatgggaggctgaggcaggagaatggcgtgaacccgggaggcggagcttgcagggagcagagatcaggccactgcagtccagcctgggcgacagagcgagactccgtctcaaaaaaaaaaaaaaaaaaaaaagtggatccactatacggctgaaacacattttgcacaagattatctaaatgctggagtttaaatcgagtcaatgacaacacgactccaattccaggtatggggtttagtggacaaccagcttgacggagtcaggaccgcgctgacctgcccgacacggtgctcgggcatctggaaggaggaagccggcgtctcagccccgcagaagccccgaaccgtgggcctcccgccgcgtccgacaggcaggggtggggctagatgaccgaggtctccgtttgcaggaaggactgggcgcgggagccgcggtggaactgcagggcgccctccgagccgttgcgggagaaggaggaaccgcagaccctgtaatcccggctcgcggacggggtcgggcaccggcttcgccattttcgcttcagctcgcactgcacctgggaggtgagggcagcgggaacgcccgtgagcctgggcaggtgcgggcggctgctatgggaagcgcggcccgcgagcctccagctctccctcccgcctgctcccgtatctgtgttgccagcagatggacagaaacagaaacggccttgggggcagaggctggagggagcggga

SEQ ID NO: 39805 - DNA, 2300 bp, Homo sapien
tcccctgatgctttgctgtttagtctgaagaactatttttcttcttaattaaacatttcagagattctgcaaatattataagtgcatattcactgctaagggattagaaagtcaaaatattttaaagtgagaaagcaaagaaaaggatggcacaaaaccaaaatgaataatttttcttcctgttgcagtttctgctcgttgaatactttgaatacttggttggtttagggactcgcttccaagacgaagcaacagcacatagcacaggcggctctggaggctgcaagcaccagaacaggccccaggcagccacggggtggacatgcacggtcctgggccggctctgcccaccggcgagcgcagggctgcctgggagctgaactgaacagagtttctcctgcccggagctcacgcttcgtcccatcaggcccacttgcttcccagattcacatttttagttgtgtttcctgcttgcacagggccaaagtctgccctgggtgttgtgtgtgcaatcattattgtttattgttttcgaaattaattaaattcgagaaaaaaaattagcctccacagaagccacagacttggctacatgtgtgagggaatcagcagagatgtgggtgtgggagcccctgggaggagaagggctctgcggaccagagggctctagggcagccctgggcactgctgagcagctgcatctcatctggacctggagcccaaggggccgcaccagccgtggccatggtctgggcctttatttggggtctcacctgctgcagtcagatcctgaagcagataagccagccagggatcagtctccctgtccaaggtcttcccgtctgtgtcctcttcctgccaagaccagctttcaggcctgggggagtcttaggtcttcactgagtaaagggtttcatccacagtgtatcaaggagcaatggccccagtccttgccctccacagctgctcctctccgcttgcccacccgcactgtaagccacagttctcgagcaccaccaccagcagactgagggctcgggatcaccaagtgtgggaggctccccgagccgtgtgctggggcccgaccacccggccctgccctgccctgcccttcatcccatcacaactcttctgtgctgatggatgggggccggggttcccactgcgtggaaaacagaacagctcaggcagaggacgggagcggcagtggccgggctggtgtgaggctggggattccgcttgccccggcagggctcaggcttccaagaggccacggaggagctcctgggactgatcgtggtgcgggctctggcccagtgggtctgtgtgggggctgagaccctgcctttccagcacgttcccagctggtgccagttggagtcagagcctggaatccttacacgagaggccagaagccttggcctcagcagtccaggcctgagaacccacccagctgtcactcaccgatggctgagtgactttgcacaaagccctgttgcccgccctatcccactcctgggatcagacccagaaatcttggtctgtgtgtcccaactggctacaattgctgctcagcttctgaaaggtgcctcttcaagcctgtttcttgaaacaaggcactgaaaagcatacgttgtgtcaaaagcccaaaaggagtgggaattctccttggtgatttggatttcatcttgggcactgatgaaagagcacagagtgggggcctccctccttgagtcagggtcaggcaggggcaaggcagtagaatctctaacaccctgggcactcacagccctgccattgcttctgtggtggaggtggccagggcggagtgtggcgttcccgggaatggcctcagcagcacaccgtggtgggcacgcgagggggccggctcccgtaagtcttctgtgttacatactggttaactccgttcttacataaagagcacgtctgctaaatttagccaagagaactgtttggcatttcggcctccccatgcttcaagtgcacacatttcttccgtgttacgccacatccctaaaaataagcctctgccctcctccagcactcaggccaccgcagtgactcgttcccactgatggcaaacttcactccccagggctcccatccctggtgacaaagatcacagcagctggcactgcagatgcctttgtgggaggcaccatctgatcatcccgccaaccctcctgcaaccctgcaaggacacaccagcctcccagggtgccaggaggagcctgccagagacccccagagcggcctgccccaaatcacctctgagagca

SEQ ID NO: 39806 - DNA, 2300 bp, Homo sapien
aataggcagatgatagatgacaggcagatgacagataggcagatgatagatgactgatagatgacaggcagatcacagatatgatagatcacagatagatgacaaataggcagatgatagatgactgatagatgacaggcagatcacagatatgatagatcacagatagatgataaataggcagatgatagatgacaggcagatgacagataggcagatgatagactgatagatgacaggcagatgacagataggcagatgatagattgatagatgacaggcagatgacagataggcagatgataggtgattgatagatgccagccagatgacagataggcagatgataggtgattgatagatgacagccaggtagatcacagatatgccggatcacagatgatggataggcagatgatagatgacagataatagatgatagattacagatagacgatcgataggaagataatagatgataggtacatgacagatcatagataaatgacagagaggtagatgatagatgataaataggtagatggtaggtaatagataggtaatagatcgcagagagatgataggtagatgatagctgattgatacatgatacagagatgataggtacatgatagatggatagatcataaatgacagcagatgatagatgataaataggtagatgacaggttatagataggtaaattacagatgaaagataggcaaatgatagatgataggtacataatagatggatagatcatagataatagatgacaggtaggtgatagaggaaaggtggatgatagatgataggcgcatgatgatagatacctgacagatggatagatgaaaggtagatgatggacaggtagatgatagatgacagataatagatgacagattacagatagatgatcgataggaagatgatagatgataggtacatgacagatcgatagatgatacgtagatgatggataggtagatgatagataatgtggatgataaacatcagatgatagaaaaatcgatatctgtgaatacggggggtgggggatcagagagaagcaaatgataagcccaatgaggtaaatgttaatgaccgaatccacaaaaaggataaaaaggagttatttgtaatattcttattcttctaatttttgtgtaagtttgaaattatttccaaataaaaaattaaaacaacacgaacttaacttgtatctctcattccagtgctttccacttgctggggaacgccgagctctcctgggttggtcacgcgggcgccttgggaggccgcgcagtcccgcgtggggcgcggcggggcggccccagtggcaccgcgtgagtccccgcccagcgttccccacccgccgccgcgtttgcggggagagaatgacccccgttttgcaaacgcaggacacaaaacccgccacccagctgaggctgggacccacctatacccccgtctgcgtttttctccagctttctgttcgacctgatgtcctctttgaggctgcggggatccccaccaaaaagcactctgattttctccattttcagatgccccaacctagccccactggctacaaagacggcgcgcccaccccggacgggtctctggccgctttcttgggcttccgcagttgtttagaaaggcaggtacaggcggccgcaaaggcatccgccccttccgagcgcacacctggcccggtcctcctctcccggccccgcgccggccgctctcccccagttctctctactcggagccgggcgcgcactgagcaccccgcttcccagcccctccgcccacagatcggggaggcgcggccgggaggggggcgtgggccagggaagaggggaggagaacggagagagaggctgggggggtcgaggagaccagagggagcgcgcgcggcggggacagagagcccaggggcgaggagagggcgcggggcgcagcggaaggggaagtggggggcggtgaggaggggcgcggagcgggggttctcgggggaggagggagacgaggattggggcagcgcggggcggggacaggggcggggggcggagcggcggggcgcgtgggggacgggcgtgcattgagcgcgctccagctgccgggacggagggggcggcccccgcgctcgggcgctcggctacagctgcggggcccgaggtctccgcgcactcgctcccggcccatgctggaggcggcggaaccgcggggacctaggacggaggcggcgggcgctgggcggcccccggcacgctgagctcgggatgcggacgctgct

SEQ ID NO: 39807 - DNA, 2300 bp, Homo sapien
ttgttcaggctgggaagaagagagcaatgacgaaaacacatttaaacatttcctccattcatgtcaggaactcatccatataaggcctcatgagcacatggatctggtgcatggtcccctcaagctctacaggcactaggcagtcagcattgctgattggcttaaaggagctatgcacaagggtttcatccaggtcagtgaccatacagatccttccttgatttttctctgtcacctctgggagcaggcaggttcctgggatctgataaaactgatattggagacgctggagctgatccgacatagcaatggtgttgactccctccttatgtgtggattgctcagcgggggaacttgactgtccaacatgctgggtgcaagaacagcagaaaggggacttttaagatgtggcaaacatgaggcctcttcggagaggactttggaaaccaggccttgtttggtaaggaccagggcatcttccctccatgcctgggtgatgatggagccttgttccatctaacaatcctgagggctgggctggggggcatgggctggggcctgattcagttcccgagattctgacctccacagctgttcacataccccttctcctttccatactggccgggaagggaggtggcttgtagggagggtggttggccttggcagcggctccccagtgtgcccccatccccgattcccccagcgagagcttcaagatcctcagtttgggtctaacatagagaatccaccagaaacacattttttttcaagttttattttaagttcaggggtccatatgtgataaagtttatttttcaacttttattttaagtttaggggtccatgtgcagagtatgcaggtctcttacatacataaatgcgtaccactgtggtttactgcacagatcatctcatcacccaggtaccaagcccagcatccgcagctattcttcctgatgctctccttcccctcccccatgccatgaaacaggtgtccagtgtgtgttgttcttcctgatgtgtccatgtgttctcattgatctgcttctgctaataagttagaataataataggcggtgtttggttttctgttcctgcattagtttgctgggagtaatggcttcaaattccaaccatgtccctgcaagggacatcatctcattacattttatggcttcatagtgttccatggtgtatgtgtaccacatttcctttatccagtgtatcattgatgggcatgtagattgattacatgatgttgctattgtaaatagtgctgcaatgaacatttgtatacatgtatttttaaaatagaattatttatattcctttgggtgtaatggtattgctgggtcaaatggtagttctgcttctaggtctttgaggaatctccacactctcttcctcaatgcttgaaataatttacactcccaccaacagtgtaaaagtgttcccttttctccacaacctcgccagcatctgtttttttttttttactttttattaatagccattataatttgtgtgagatggtatctcattatggttttgatttgtatttatgcagttatcagtgatgttgagcttttcatgtttgttgggcacatgtatgtcctcttttgagatatgtctgttcatgttctttgacccttttttaatggggccttttttttttctcttgtaaattttgttaaattcctcctagattctggatattagacatttgtgagatggataggttgcataatttttctcccattctctaggttgtctgctctgatgatagtttctttggctccgcagaagctctttagtttaattagaccccattagtcaatttttgcttttgttgctatagctttttgcctttctgtcataaagtcttttctcatgcctatatcctgaatggtattatctagattttttcttctaagggttttatagttttgggttgtacatttaagtctttaatccatcttgagttaatttttgtacatggtgttaagaagggttccagtttaaattctctgcatatggctagccagttctcctagcaccattttttgaatagggacacctttccctaattccttgtttttgttaactttgtcaaagatcaggttgttgtaggtttttggctttatttctaggttctctactttgtttcatttgtctatgtgtctgtttctataccagtaccatgctgtttttgttactgtactcttctagtatagtttgaagttaggtagagtgacacttccagcttttttttttttttcttaaggttggcttggcta

SEQ ID NO: 39808 - DNA, 2300 bp, Homo sapien
ggagaattgcttgaaccgggaggtggaggctgcagtgagctgagatcgcaccactgcactccagcctgggcgacagagcgagactccgtctcaaaaaaaaaaaaaaaaaaaaggaaaaagaaaatagctcccatggctaaggtgatgtggggtttgaggtcgaattccacgttgatcttgcagcagtgggagaggaaagtacccttcggcacgtgtggtcggggagaagctcaggcctgctcacggtcttctctccgggaatgatgcctctcacccccttcctggcctcctgcatctgggctcttttcgtagacgtgcgtgcctgggaagtggaggccgggacaggagcccctgtgacacctcctgctgtgtcccctccccctcgccgtgggctcctcctgtccttgttctgggccccaccccaggctgtctgcgtatcacctaatgtttctcctcttggtccttttatcacaacttaactatctcctgtgcccatctctcctggggaccaaatgggaacttgggaagcccagttcaggctaagatctgcctttgagtgcctgtgagccaccaggtccccatccggcggtgtttatgctttcgacaggggcctcctgtgatcacatagtcctaacccaaaggagtgaatataactcttcccttggaagcagtccatgcaaaaacattttaaagtaatgcatatgcctattaagggaaatttgaaaagttcggaagtggaaagaagagataaaaacgctctgtagtcctctccaccgaattccccctcaaatgtttttataaaaacgtagttgtaggccagatacggtggcttatacctgtaatcccagcatttggaaggtcgaggtgggaagatcacttgaggtcaggaattcgaccttgtctctcaaaaacatttaaaaagtttgctgggtgtggtggcacctgcttgtggtcccagctacccaggggctgaggtgggaggatcacttgagcccaggagtttgaggctgtggtgaaccatgatcacaccactgcactccagcctgggcaacagagcgaaaccctgtctcagaaatacatacacacggctgggtgcagtggctcacgcctgtaatcccagcactttgggaggctgaggtgggcagatcacgaggtcaggagatcgagaccatcctggctaacacagtgaaaccgcgtctctactaaaaatacaaaaaattagccgggcgaggtggcaggcgcctgtagtcccagctactcaggaggctgaggcaggagaatggcgtgtacctgggaggtggagcttgcagtgagccaggatggcgccactgcactctagcctgggcgacagcgagactccgtctcaaaaaaaaaaaaaaaaaaagaaatacatacacacacacatgcatacacacatgcatacacacacatacatacatgcatacgtggatacatacgtacataagtcttagttgcagtcacgttatagatgcaattcgtattttgtatttttcattttttatatattctttaaagacctctctttaagtgactgcataatgttatactaaggtttttcaacctttcctccgtgagtgaatggacaattgagttgtttcctttttttttttttttttttttttttttagtattaaatattggggctggtgggtgcggtggctcacacctgtaatcccagcaatttaggaggccgaggcaggtggatcatgaggtcaggagtttgagaccaccttgaccaacacagtgaaaccccgtctctactaaaaatacaaaaattagccgggtgtggtggcacgcacctgtaatcccagctactcaggaggctgaggcaggagaattggcttgaacccgggaggtggaggttgcagtgagcaaagatgcgtcactgcactctggcctgggcgacagagggagactccgtctcagaaaaaaaaaaaaaaaaaattggggccgggcacagtgactcatgcctgtaatcccagcactttgggaggcccaggagggtggatcgcttgcacacaggagttggagaccagcctggccaacgtggtgaaaccccatctctactaaaaatacaaaaattaactgggcgtggtggcatgtgcctgtaatcccaactacttgggaggctgaggcgggagaattgtttgaaccagggaggcggaggttgcagtgagctgattgcaacactgccctccagtctgggcaacagagcgagagtctgtctcaaaaataaataaattttttaaaaaagtatatgggaggatgtgtgtaggtta

SEQ ID NO: 39809 - DNA, 2300 bp, Homo sapien
aggagaaatttttaaatttctcatttacaaaagttctatgggaagataccttttaaattttaattattttaaacatacagaaagggataatttctaaactttgagaggatgggggatctacaaagacattgatttgactatatacatttgaaccaaaataaaaggaacatagacttaggaaaatatttgcaataaggatgacagtgtgagatctttgttacataaagctgacacaaaatgagaacaaaagcattaagagttgggcacggtggctcacgcctataatctcagcactctgagtccataaccgagcagcctgctctgatgatagaggctgaggcaaggaggctcacgtgagctcagaaattgaggcttcagggagctgtgattgtaccactgcactccagcccggacaacagagagagaccatgattccaaaaaacaaaaagcattaactcccaaacaaacaggcaaaatatccacattttataaaaaagaattaatacaactaataagcaaatagagtgggaactatccagcccttctagtgatgaggaaatatgaattaaagactgtagggtcccgctgggcgtggtggctcacgcctgtaatcccagcactttgggaggccgaggcaggcagatcccgatgtcaggagatcgagaccatcctggctaacatgatgaaaccccgtctctactaaaaatacaaaaaattagctgggtgcggtggcgggcgcttgtggtcccagctactcgggaggctgaggcaggacaatggcgtgaacccaggagacggggcttgcagtgagccgagactgtgccactgccctccagcctaggcgacagagcgagactcggtctcaaaaaaaaaaaaaaaaaagactgtagggtcccatttcttcatttatccaattaagtgaaatagctgctgcctagggtggctgagctgggagtgccaaggtgcttttggaaagccgtgggacgctgcgcatctggaattgccaatgtcttcactcctttcatccagcaatcacattcatgagaatctatccttccaattctaattatggaaaaagctatgcacccaaaaatatgcatcggggcataatttaatagaaattgtaagtgacccaaatacctcatacgaagttaaatacataatgatatttccatagaagaaatgctctggcaaccattaaaaacaattatcctaagcctttatagcaaaatgggaagacaggtgtggtgtgatatggagggaaagtgaagccagtgcagaagtgtccgtgctgcaagcaggaactcgcactgggaggggagacacgtgatcagggcggaagtgtccgtgctgcgaggcggagctggcgctgggaggggagacacgtgatccgggcggaagtgtccgtgctgccagcaggagctcccgctgggagggcagacacgtggtccgggtggaagtgtccctgctgcgagcaggagctcacgctgggagggcagacacatggtccggtggaagtgtccctgctgcaagcaggagcgctagtgctgggagggcggacacgtggctccgggcagaagtgtccgccagcaggagcgctcgtgcttggaaggtagacacgtggcccgggcggaagtgtccttgcagcgagcaggagctggcgctgggagggcagacacgtggtccgggcggaagtgtccgtgcagcgagcgggagctcgcgctgggagcggagacaggtgatctgggcggaagtgtccatgctgcgagcgctcgcggctgggagcgcagacacgtggtccaggcggaagtgtccatgctgcagcaggagctcgcactgggaggggagacacgtgatcagggcggaagtgtccgtgctgcgaggaggagctagcgctgggaggggagacacgtggtctgggcggaagtgtccgtgctgcgagcaggagctctcgctgggagggcagacacgtgatcctggcggaagtgtctgtgctgtgagccgcagctcacactgggagggaagacacgtggtccgggcggaagtgtctgtgctgcgagtgggcgctccggctgggagggcagacacgtggtccgggcggaagtgtccgtgcagcgagcaggagctcgcgctgggagggcagacaagtggtccagtggaagtgtccgtgctgcaagcaggagcgctagtgctgggagggcagacacgtggcccaggcggaagtgtccacgcctacctcgagcaggagcgctcatgctgggaaggcagatgggtggcccgggcagaagtgtccgtgctgc

SEQ ID NO: 39810 - DNA, 2300 bp, Homo sapien
tgttttttgagacggtctcacgctgtcacccaggctggagtgcagtggtacgatcacagctcactgtagcctcaaacttccgggatcaagtgatttttctgccttagcctcctgagtagatgggattgtaggcatacgccacctggctacttctgtatgtttttctagaaatggggtcatatatgctgccaggctagtcttgaactcctgggctcaagcgatcctcctgcctcagcctcctgagtagctgggaccacaggcacccactaccacgcctggctaatttttgtattttttgtagacatggggtctctttatgttgcccaggctgacctcaaactcctaggctcgaacagtcttcccacctcaccctcccaaagtgctgggattaacaggcataagccaccatgcctggtttaaaactgcatttcccaatgatgattatgttctctgagccccatctgagcgcacacatgtgtggtgctcttgggagtcgggggcacagcctcaaatataatacaatatttccaacatcgtgtccttggaatacagatgatttttattttcttctttatttttttctatgtttttctaagctttctctaatgagcatgcactactgtaataaacagaagacaaaaggattaaaacaattttttaataggagaaatttttaaatttctcatttacaaaagttctatgggaagataccttttaaattttaattattttaaacatacagaaagggataatttctaaactttgagaggatgggggatctacaaagacattgatttgactatatacatttgaaccaaaataaaaggaacatagacttaggaaaatatttgcaataaggatgacagtgtgagatctttgttacataaagctgacacaaaatgagaacaaaagcattaagagttgggcacggtggctcacgcctataatctcagcactctgagtccataaccgagcagcctgctctgatgatagaggctgaggcaaggaggctcacgtgagctcagaaattgaggcttcagggagctgtgattgtaccactgcactccagcccggacaacagagagagaccatgattccaaaaaacaaaaagcattaactcccaaacaaacaggcaaaatatccacattttataaaaaagaattaatacaactaataagcaaatagagtgggaactatccagcccttctagtgatgaggaaatatgaattaaagactgtagggtcccgctgggcgtggtggctcacgcctgtaatcccagcactttgggaggccgaggcaggcagatcccgatgtcaggagatcgagaccatcctggctaacatgatgaaaccccgtctctactaaaaatacaaaaaattagctgggtgcggtggcgggcgcttgtggtcccagctactcgggaggctgaggcaggacaatggcgtgaacccaggagacggggcttgcagtgagccgagactgtgccactgccctccagcctaggcgacagagcgagactcggtctcaaaaaaaaaaaaaaaaaagactgtagggtcccatttcttcatttatccaattaagtgaaatagctgctgcctagggtggctgagctgggagtgccaaggtgcttttggaaagccgtgggacgctgcgcatctggaattgccaatgtcttcactcctttcatccagcaatcacattcatgagaatctatccttccaattctaattatggaaaaagctatgcacccaaaaatatgcatcggggcataatttaatagaaattgtaagtgacccaaatacctcatacgaagttaaatacataatgatatttccatagaagaaatgctctggcaaccattaaaaacaattatcctaagcctttatagcaaaatgggaagacaggtgtggtgtgatatggagggaaagtgaagccagtgcagaagtgtccgtgctgcaagcaggaactcgcactgggaggggagacacgtgatcagggcggaagtgtccgtgctgcgaggcggagctggcgctgggaggggagacacgtgatccgggcggaagtgtccgtgctgccagcaggagctcccgctgggagggcagacacgtggtccgggtggaagtgtccctgctgcgagcaggagctcacgctgggagggcagacacatggtccggtggaagtgtccctgctgcaagcaggagcgctagtgctgggagggcggacacgtggctccgggcagaagtgtccgccagcaggagcgctcgtgcttggaaggtagacacgtggcccgggcggaagtg

SEQ ID NO: 39811 - DNA, 2300 bp, Homo sapien
catgaggactgtggcgtggccagcctgcagctcttggacgtgctgctgacaatagtggccctcgcaggtgctaccggcctgagggacaaggtaaggctgacagtggtggctgctgcttgacctagcggagctcacagctggaaggcatctctaagtgaggtgaactgtctcctatgcatcccctctgtgcttgaccagcaaagaccagggattgagaaccttgcgggtgagtccccgggcaacggccttcggggcagctctccagctgccagtgtattctggcatcagggagtggagacagctgtttaatgttagggtcttcagcaaagaagcaaacaagaaataagacgtaacctttaaacctgcgcacttgagtagggtttaatagtgcacatgtcgctgggcgtggcatctcacgcctgtaatcccagcactttgggaggccgaggtgggcggatcacctgaggtcaggagtttgagaccagcctgaccaacatggtgaaaccccgtctctactaaaaatacaaaaaattagccaggcgtgttggcatgtgcctgtagtcccagctactcaggaggctgaggcaggaaaattgcttgaaccagggaagcagaggttgcagtgagccaagatcgtgccactgcactccagcctgggctgagcaacagagcgagactccgtccaaaaaaaaaaaaaagtgcatgtgcatgtgtgactgagtcgagagaagataccgtgatttcccgctctcattgcagcacagcgttcagaagtacttctcgcccatgggctccctgtttatgcccaaaaatcatcttttttcttcagtggagtctcgctctgtcacccaggctggagtgcagtggcgcgatctcggctcactgcaacttctgcctcccaggttcaagtgattctcctgcctcagcctcctgagtagccgggattacaggcgcccaccaccatacccggctaatttttatatttttagtagagacaaggttttgccacgttggccaggttggtctcaagctcctgactgcaggtgatccacctgcctcagcctcccaaagggctgggatcataggcatgagccaccgcacctggccattatgcccaaaaatcttttaaccccaaccttctaatgggcttctagggcccctggaggccccagtatctgtctgcctctctggaagctgagacttagttcctcctcccattctgtctctgtggacagcccctctcggcagattctctctctgggagatttacggcctgaatgtactatggggaacctggtgtggaggaggctgctgccctccccttccttcttggggcctctaaaaacaagcttcccaaggggcgtgtgtctcagcagatgctgtcactgttagggcctgaggtaccagcaaaagcaaagtctttgcctgctggtcatgggggacgaagccaggtagccccagattcagactccaggcttggggcaatggccaccggggagcctcagcccttcctctgttcctaagcccccaaggagagcagccagctaaaagtaaaaggtggccaaggttatcatctctgtctgcccagttacttttacctggaggtctggtctgctgggcttaactctttaagccacttgcccgcccctctctgctcctcaccacctcagaggagccctgcctgcccaggcggacaccacgtccgtgtaagccccaggaccacctgtgctgtgtgcatcccagtgtgcacagtgcctgcttcatgattcgctgcagagacggcgttggtgtgaacgggatcagggtctcgccctgcacccgcggctctcgctctcctgcaccctgggcggggctccctgtggcagcctccctcccgattatcctggcaggcccggcctgtgtggttcttacgcgtgagggggatagtgagtcccagcaggcaggcaggcttgagccctgagtgttggaattgtctcagtctctgacttgtaacctccaggcacaggagacgatggactcactggccatggtggagggtgtcagcagctgccaggacctctaccgcaagcacattggtcccctcctggagcgggtgaccgcgtcgcaccttgactggaccgcacactcgccggagctcctgcagttcagtgtcatcgtcgcacagtcaggtgagccgtcccgacagctggcgtgccgtgcctggccccactcaggctacacacctgctcccccaggtgctcagcaggtaccagcgccgaccagctgagctgtggttcactgaagcgtgttgttaaaagtac

SEQ ID NO: 39812 - DNA, 2300 bp, Homo sapien
ggcagacactgaaaattgtctggtcaaatatagagaaatctataaatgtgaagtcttgtcacttcctcagagacggtgctgcgttcgtggcaggagggtggtgcttgctgcaaaggatgcctgattccctgtttgttcctgtgcttggaggtgtggtcagccaggaggggctgtgtcttctaaacgcacctgccttttgattttaaccgaaaagatgatcgctcctgaaatgtacatgacaggtcattctagaaactagccagatattgtcctcagaagtcagccagttagtacaggccttagagaaattgggctgtgggaaaaatcaggaatggaataaaaacaaatctgtggcttctgtgggagttggggccacgacagggccacacggctcctccagctccgagggagacggggccgcgcggctcctccagctctgagggagacggggccgcgcggctcctccagctccgagggagatggagccatgcagctctgtgtcttctgtgggtcagggcggggccggggtgcaaggacagaacgctgctgtagtacagtgggagtgttttgtttagtcttccatgatttacgtcagtggggaatgaggcttagagttttagagctgattaggaaatttagaaccaacccattgtctagccaaataattaccaaacttctttgaacttgcacccccattagtaaaaacagtttttaagcataggcctccaatatatgtacactgttgataaatcacgtgtttaaattacatggccacggtcctgactcactctgtactttatgaaacatacataaaatagacattagagggacgttataagaagtaaatacaggccaggcgtggtggttcttatctatgatcccagcactttgagaggccacggcaggaggatcacttaaggctaggagtttgagactgcagttagccacgattgcaccactgcactccagcctgggcgacagagcaagaccctgtctctaaaaaataagttaaaatttatttagaaagaagtaagcacacgcaaagccttaggaattcttgggtccagcacacgcctgctgtgttgcgggcttcagagcctggctgattcacagtggatgaggctggagccgggaggggaagccattcatccagcgcagccgtaggtgcagagctgagactccacctccccgtcaatcagtaaacatgttaagccatagaattttatttgtcttaaaacttggtgttatagaaaagctcaaaaatgcacagaagaggggcaggcagcagagcgactgccagcttcagcgctgaccagcccttggcatgcgtgttctgcctgcctggggccacttttctttttaactttggagggcggggagaacttgggcatgttgtaaagcagataatgcagtgcgccgtcatttccctcacaggtgccgtgtgcatcactaacgcagcttctccaccacatagctcaagtgcctgttcacatttcacaaaataagcacagattccttagctcccagtctgtgttcagttttcccatcaacaagcacgcccttttatggttgacatgccggcaccctacctccagcgcctgggggctctccctgcaagggctctcccatggctgctgcccctcgtgagccgtagactaggagccccgggcgggctctgtcggccctgacactggggccggagcgggagccctgtattagtccattctcatgtcgctaataaagatctaccacagactgggtaatttataaagaaaaagaggcttaatggactcaaagttccacatggctgtgcaggcctcaccatcatggtggaaggcaaaggaggagcaaagtcacgtcttacgtggcggcaggcgagagagtgtgcaggggaactgccctttatactaacatcagatctcgtgagacttaatatcaagagaacagcacgggaaagacccacccccatgattcagttccctcccacagggtccctcccaggatacgtggggattatgggagctacagttcaagatgggattcgggtggggacacgaccaaattgtaccaagctctgacggtgctgccggtctcttccaggacctctacctggagcgcctgctgctgtgtgtgcaggctctggtgtctgtgtgtcatgaggactgtggcgtggccagcctgcagctcttggacgtgctgctgacaatagtggccctcgcaggtgctaccggcctgagggacaaggtaaggctgacagtggtggctgctgcttgacctagcggagctcacagctggaaggc

SEQ ID NO: 39813 - DNA, 2300 bp, Homo sapien
cctggagggcatgtcttggatctgaggccccagtgacttgctaaaatgctacacactgtggccaccggggaagctgagtgacctctgatctttctgtctctgagttacctgtcatcgtagtcagacatgtgatcttttgtgtctggcctcttcactgtgcatggttccaggtttcagccttgaagaggtaggtttcctgatgagaaatggcttgaaggtggtgagttgaagagtcactcggggtattctggggccaggatggaagccctgactcgctccctcgtctgtgctgctggggtccacccgtagggccggctccaggtgtgacatagcacctgctcaggacacccctgctttgcctccatggccaggcttcattctccggctctctccctccagcagcagagtggctgcctaggggctgtgcgcagagacacagggggaccctttcccaccaggagcctttgttcaccccccttggtctcatcaggccagcggaagttgagtcaccatgtacgctggccggcccctcctggagctggcgtgggttcggcaccaggcagcacagagggcccctgaggacatcaggctctgcccagtggggagaaagtgggcagagtgcggggtcagtgtccatgctgcccggcacttgcagcaggcacttctggcactggctaaatatttgggctgcggagggcagttcaaggggccagggcaagaacagagcccagcaagaagtgcaggcggccggctggtttttctctcccaccttccttaagcctgaggcagagcatggcccacaaggaaagtggagtctgtgtcatgggccaagtcttactcctcaaaacagtgtgatgactctgtatggagagctctgtgtgaatactgaagctccatagctgatagctgtcggtgtaagcctactgtcactgtctaaaaataaccatcactgtctaaaaataccgtcactgtctaaaaataccatcactgtatcgatagctgtctgtaaatactggaactctgtggagcacgctctgtaaatactggaactctattgctagctgtaaacggtgtaactcagtataactataccgtaactctaaaaataccataactatgtgtcgacagctgcctataaatgctataactgtattggtagctatgtataagcagcctactctgtatcaatagctgtctgttagaaagctgacatcacattgttgatctaaagcaagcttgtccaacctgcggcccgtgggccacatgcagcccgggacggctttgaatgctgcccaacaccaattcataaactttcttaaaatgttacgagattgtttttgtgatttttttttttcttttagctcgtcagctatcattagtgttagtgttattttatgtgtggcccaagacaattcttccagcatggcccgtttcttcccaatggggtttgcgtcctattagagaccctgcacggcccttcacgtgagtttcgtgtggagtcacggtgctgccccttttactctgatcagccctgcgaccccgtcctggagctccatgtgggctccttgcagacacctccaccccctcaacaacccagggactggtgccctgggaccccatcctctctgcacagaaggtcctgactgccttctgactcgtaggaaaccttccagcagcctgctagactcggcttaaatcactgaacttcactggaagggcctggaaataacttcatctcctccttacaaggctcagaggcctcagagctcactcaggtagcacagccaggtgagcctcagagcaaggtcaggacacaggcggtctagccgccctggagccttaggccccgggatggtgtctgaagttgtggaaagggggtgtcccagtgcggcaggggctaatgcatctccccacgctcacatgactgcagctccgagcccaggacactgaccacacccagaaccccggcgaggcaggcaggacggacgtatggccgtgcagttgtgaagcaggccttgaacaaactgccctgtgccgccctcaggtgggtgactcatggacttcgccctgcaggggtgccctggttgtcgccaggcctgcagtcggcagctgctcagctttgctgcagttttcctgctcgatgtgtgctgctggtgaggccaccaggcctgttcttgtcaagagagaccttccgggagcaacagatgttacaggagagactggggatgcatggacagcttttcagagatgagtgtttgtcacgttcctgccaagtacctgtttgccatttgtatgccttc

SEQ ID NO: 39814 - DNA, 2211 bp, Homo sapien
tgtgatggatctcccctgtccccttgctccccgcctccattctccacgccccaagccccgccccccacctgcctgctccctttgccccctccacctgcctatcctgtgccatcctcctccttgcacgccgccctcccgcgaccctcacctcccaccctcctccctgcctgagccccctccaccccacccgggcccacgagccagcgcttctgtccagatacctggaaaccaccgcagaaattcctgttaggcggtttggggtggggtgtgccctgatagctgccccctttccttccctcgggggcttgcaggacttgcacctggttgagggcacgcgctttgagactctgctctggtcatttcactttctgtcccattcatcctactcccctgcctttccgctctggcttggaccactgtcctaagtggaaggaggccgcttctcccctccactttataacgttccccatcttttttagagctctgatctgatccggtcgttccctttccttagctggccattcctgcagggtcttgccctttccctcccctggctgggatgtggaatgatagcaggcgcctgcttcctgctggcgggaaggctttccgaaggagggaacactgatgctataaatccgtgggcggtagggagcaggaaagcagtgagggatctggccagctcaggccgtcccagtgatgtcccagtgatggtctgaatgtagtgggaagtgcagggggtgtcaatagaagtgatagacccgagttcaggttgttaaaagatcactgcagctgcgtggagaatagattccagaagtagaggaagagctggacttggggaaatgccgagatttccacgttggttaactttggatttcacatggtccagaactcctgtggagcttggggaagaaccttgggctggatggacatggccattgagaattcctggcatttaatgtatttcttcttcatcctcaaccacttccctacccagtctgtacatcagccccacgagctccctccctggaccgtaggttccacaggacagcactgtgcccatctgtgccccagccccaagcgcagcctgctggggtatgtgctcactggttgctgtggggtgagggactgtgcctctgcctggagcatcccctcatctccagcacctctggccttcctctcccctgggtggggggcctcacctctggtctcggtcacactgggcaacggcagagaggttgaggcgctcacccaaagtctcactggaatagccgtttcccagacgggccccaagtagtgcagagctgaggcaagaggcggcctggatgccagagaccctttggttctgactttttttttttttttttttgagacagggtttcactctgtctcccaggctggagtgcagtggggcgatctcagctcactgcaacctccgcctcctgagttcaagcgattctcctgcctcagcctcccaagtagctgggattacaggcgcctgccacctcttgttctgactttctgcggggactttacaaataggaagtgcagtggctttgcctggagtggtgctggcccagcttcctggaggagcctggggtctcgtctcaggtggggctgggagtgtggcctcgcctctgtcttctgggctcggcttctttcctctggccagtgtccccgtcaggcctccaccttggcttcagcaggtccaggctctctggtcttcagccacaatgggtttgcacccccagcctttccccgctggtcctcctaagcctctgggttgcacaggtgtcatcagggtgggacgcttgtccctgagcctcttcctgtgccgggcggtacagagctctccttggcagcctggattgtgtactgttcatgcagcaaggacctggcgtaggagaggaagggaggtgaggaactcataggcaggcagccgtcctctggaagcccacagagctgggcgaggcgtgtgggagcagctctggtaactgggggcctccctgtccctcagaccacttccacatgcagtcggagtctctgatcgggcccctgatgcagaccatctcccaccagcactggaaggtccgtgtggccgccattgaagccacaggcgcagtgatccattttggcaacgggaagtccgtggacgacgtgctttcccattttgctcagcgactgtttgatgacgtcccgcaggtaactggtgtt

SEQ ID NO: 39815 - DNA, 2300 bp, Homo sapien
acttagtggcctctgtcaacagtgttacatttgttccatttcctgtgggtcatggaggaagcagctgctcggctctggcctggaaccctcctcgggctggggggatcagaaggtcttatggggcagaggagatttctgtggtggcttccccccaacagggctggagggtggcaggaaggtgctgctcctcctctgagcttctctgcagctgagcgatccaggagagagcagggcaggagccacagtatcttttacaacctggctttgcaaatctcagactcatttccttagcattctctagttggatccgtcagccctattcatcgtggtcttagttgcatccgtcagccctattcatcgtgggacagagcacacagggtgtggacaccaggaggcgagtgaggatcattgggggccggctgcctccatgccaggtgtaacagaaatactcaaaataacagtgtcttaaaccacacggctgtttctcacgctctgggagtctgtctagggtgggtgtgttgttccatggggcccgagaaccagctttctcttactgatgctcctcaggggcccaggatggctgctgcagccccagccatcatctccacatgccagtcagcaggaaggaggagaggggagggacatgttcagaaactgcacatgccactgtgtctgcgtgcccctggtcagcacttggtcagttgcacaggtgggaggcacctggtaaatgctgctcactgtggttttctgtctcagggcattacgggaatttgcaaaacagcatgtcaggaaggggtaaaatacgtccccattcaagttgagaggcgggggcagctttggggcttttagggcccagtctaggctttccttcttggttccgtggttcctatctagggtggtcactcagccctgcggagctgcagtttctgcctctggaaaataaggataaaagtatgttcccctctcagggttatctgttgcgaggtcgatgtgggtcagtgtgtccaagagcccccctccctgacctggagtgggcgttcaacacagcaagttccctcctccctcctttctccacaccccaggggacttatctagggtcacggaaaaacctcatcactagcatgtcgtctctcggtctgactcacatcccggcgtacaccctactcgaacgcgtggcctctgtcagtggatgataccatttgaattttagcaaagtcgagcttgctgctgtccgggtggactctgtgtctctgtttttggaatgtgcagtgctgaatcgtacccaccgtgcggctgctctgtacagttgtggagttcgtgcactgtacaaaggcccaggcagagggttgagaggggctgagacccaggctgctttctgcacaccaggctggagctgactgcctagagcaggggcctcgttcctgtttgcaccagggcccatcagcttgatgggatgtgtgtgcttaaagaaggggtgtgtttttctaattcacatttataatcctagtttctagaatgaattctaatttctaattcacataacgctgacagggccgtgtttgttggtattgtatgattcagcatgcttttcccagggttgagggaagtcaagtatcggcttttaatgggtaacgaggcagcttcaggcacggctggatccagggtcttagctgacgtcagccgcactctcccttctacgtcatgtgcttgagtctctgtgttggcctcagtttctccagatgtgtttatgagctccctgcccttcatggctagaaacccgggttcaggctctggctggctgtgcgctcaccgtgtggaactaccacgggtcctggctgggtggggaactctgctgccagccaggacacttagcaaccatgccgggagcttctccagaagccccccgggaggagggaggtggggggcataggacaccgtggcagctcacgcagactccgagtcgtcgagggctttggggacttggaatgcttggagggtctcatttaaaagttgagagtcatttggggaaatctggaaacgtcaggatgatccaggtatgaagattcaccttcttgtctgttttttactttctcccgaacagggcagcacgctgaggaaacgcaagatgtacgaggagttcctcagcaaggtctccatcctaggtcagtggctgcgcccctgcacggctgtgtgtcccgacatctgggcgcctgctggccaccccggcctcttccccattccctgcgtggctggcagttgagtgttgttggtattatggaggtttggggtgcaacacacag

SEQ ID NO: 39816 - DNA, 2300 bp, Homo sapien
gatgcccatgtgtgaagtggagacgcatagcaagggtggtggaggcagcacttgccctccacacctgggcccggaggaggctggagccgcagctgtgatgctggacagttttccaggagagagtggtggaggcagcagggtcctgagctgggtggtggggggtacacagtgtccatttgattacttaaggcatttaatggaatattttaccattataagttgaaatatttttttaaaaaagagggaggaattgtaaaatgatttcttaaaggtctgttcattctgagaacccatactttgtggttttgaagaaatgcagtttagagaacggtgccagggcggctcctgcagatgcgtgcaccagggaggccgtggccaggaaatgtccccaccggggccaggtgcccgggactggggctggggcagcatggccaagccccaccacccatgggcggagagtggagggcccccagctctccctacagccctgccacccactgacccctccccaggtgggaggacagtggaggccccccggccctccctacagccctgccacacactgacccctccccaggtgggaggacagtggaggccccccggccctccctacagccctgccacacactgacccctccccaggtgggaggacagtggaggccccccggccttccctacagccctgccacacactgacccctccccaggtgggaggacagtggaggccccccggccctccctacagccctgccacacactgacccctccccaggtgggaggacagtggaggccccccagccttccctacagccctgccacacactgacccctccccaggtgggaggacggtggaggccccccagccctccctacaaccctgccacacactgatccctccccaggtgggaggacagtggaggccccccagccctccctacagccctgccacacactgacctctcctgcagttctgccttcctcccggaggaaacaggaaactgagttgccagggaagttgggaacaaggactcaaaaaagaagcacttcttaaatagagagaaaacaaccactattttaagaatgacttatttatggaccctggaatcaggagggtcagggctgtctggatctttgatttcatatttgtttcctgggtggctcagcccccatccctgggagtcagggtgcacctgtgggcccgcaaaggtttccaagaatctcctttttaagtaatcagggcaggcaggaggccaccctcggagtgtccccgtgggtgcactccctgcctgggtctctggtttctctgcgtcacattgtgggctgagtgctctttgaggggtctggtctccgaaggtggttattgcatctgttaataagagtgtgacgctggcaccgtgttctggggtaggtgcctctctaccttcctggccgacaggtgcttccccacttgtcccgggtgcctctgccagctcccccatgccccttgggtcctgtctgcatggtccatttcacatccagatttggaacattggacagccaggcttcctggttggcgcagccctgagactcggcctcaccggcttcgagtttgcgtgtcatgaagggtctgtgttttccacagagaggttccgaatgcacatgtcacttctgtgtcaagggtcccaggctccttcgactgaaagtgttctccctgaaaggaaaacaatgcagaaaacatgtcatcaagattgctggttgtattctagtagaattgtatttaccgatgggagaatgttcacaatctattgttacttttgtttttctaaatggagttcaaaatgcatgtatggcatgaccccatttttgtaaaaaccaaaacagcaaactgcgtctgtgcacagaacagaaatggggctgggaggttgtgtgcccagggctggcggtgccatctctggccttcgggtcatgaaggatttcaattttcttctttgaactctcatggattttctcattttccccaatgactgtgaagcgatttacacaagactgtgaaatgaggggaggaagggtttaaatgtccctgtgctgcctgcagccctaatttggcgtgttttgcttttcagtgacatattcgatgccatgttccctgtcactcacatcgctggggagactgttatacagcaaggtacgttctgcctgctcctcggagccaaagtccagaggggaaaaatggactatgcacttaaaaaaaaaatagcataagggcaggcacgatggcccacgcctgtaatcccagcactttgggaggctgaggtgggcag

SEQ ID NO: 39817 - DNA, 2300 bp, Homo sapien
gtggatcttgactctgaattggctggggcatgcaaaatcgggggcacgcttggtgttgcccaggctcagctctgcctagacacacgtgagggccaagatctggtttgtgtttcatgagctctcccacgatgaagacccagccaggctgtctgaagaaggggtgttcttgagtaggagggaaggactgctccaatacgaaaaatctaacaatagcatagtccttaagagcttgagctttgaagagggagaacagacccatttaaggcatgaaaaataaaggaaactcttgagtccctccaaggaaaattccagccacctggctagcctcaagaagtagatgagcaccctgataagtaagaaggtaataatagcttaaaacaatagtcaagaaaattagagccacaaactaatcttaaatgacgagttaatgggtgcagcacaccaacatggtacatgtatacatacgtaacatacctgcacgttgtgcacatgtaccctaaaacttaaagtataattaaaaaaaaaagaaaattagagccacaaaatgtttgtttccctatagaaactagagataacatcttaacatatgtccctgagttgttttgtagaaacccagaccccgctaaatggaaaataccacctgttggctcgtagatctcagataaggaggaactgaggactgaacactcataactgttctttgttctaaatttcttcctgagggacctggaggaagtcacacccacaggccagagcagaacattcctttctgctgaccccaagtttgtagccaaaacttaaccaatcacaaatcagaaaatctttgggtttttgtttgtttgtttgagacagagtctcactctgctgcccaggctggagtgcagtggcacgatctcagctcactgaaccctctgcctcccacgttcaaacgattctcatgcttcagcctcctgagtagctgggattacaggtgcacaccaccatgcccagataatttttgtatttttagtagagatggtgttttgccatgttggtctggctggtctcaaactcctggcctcaagttatccacccaccttggcctcccaaagcgctgagattacaggtgtgaaccactgcacctggtctcaaatcagaaaatctttgaattcatctaatggtcacctatcctgtgggccctcactttgagatattttgccttttttggcgaaaccaatatgtagcctccatgtattgtatgaccttgcctgcaacctctgccttcccacctttaaaaacccttacacataagccatcagggagattaggccttaaggattagctccctgatactccttgcttgctgcctgcaataaattcctcaacttgtgtctcagcaatgccgatatcagtgcttgactttgataggctgggtgggtggacccaaatttggtttggtgaccctttgagcttagattcaaaattctagttttgtcactctgcagttttgtgatcttgagcaagttacttaacctctctgagccttgtttgtcatgtgtaatgaaaagagctatacttaccttgtgaggtagtcctcaggattcaatgagataataagtactcactaaacaaaactcgttattacaaaagaatcactttgtctctgaagtgggcaattcaacccatttctaggagattttaaacatgattttagatatttggtgtgattttgtgaatgggtttatcgttaatagctttcatgctccagaattttcttgaataataggtttttgcaaagtgcattccatggaatactcatttgggtgacgttaatagacatcactcaaaagctgggtgaatattacaatgtttacttcatctgtaacaagctgagtagctacagtacatatctaagagggggctctaattctcaatattttccaaatttattagatcacagacttttcttttagtgaagtgcttaatgaaacttaagttctgtgaaaagtactttgagaaatattgctttaaaaagaaaaagattgagccctgtatcaggggaaatatctaatattatattaaacaaaaaagtcccactgaagaaaatcatcttattgttcatagaccttagtttaggtattggggccaaaggatggatgaccatttcaaacgatccaggctaagccaggaggagagctcaaagtctgatctggtgagtaagttgtgaagggaatgtgatgaaaaaatacacttctattgcaaagaaatcatgagctaggtttatacgctatgctgtgaatggccaatagattataaattca

SEQ ID NO: 39818 - DNA, 2300 bp, Homo sapien
tttataatagatactatgtatagcaatctatggttagttttggtcttaaccaggaaaaatcactcttttgagttttgctgtttttaccagattatttttactggatgattgctcatattatttgattattattgcaatttgtctttctggaataggaagcaagaggcctgaattctggttcctattctatcaattgtgtgaattctggaaactcagtttacttttctgggcctcatggttttcatctgaatgatgaccaacttggataaaatggtctttatataattccataggcatttcccttcccaagggcttgagtctttttcaacaattatagagttttccggtccctcttcccagtgcctcagcaccttgctattcatgttcatctgatcagttgtttgcatgctgacttacattaccctgatgggcagtacctgtggctgtttctgctccctcacccagtccataggcttctggttgtaaaaagtgtgcatcttgagactgtggacagttagctccagaggtgacagtataatcacttcacgtagaagaggatagagagagactcatgccagtggtggtgagcaagtattagagatatgatgtgtgcctctgtgagttttggggtctaagataaattatggcactaggaagatggtcctttgtgtcagaagaactggagttgttggtgcaaaaaagtatgatgtcagcatagcagttttatttgtacctcagcaacttctaaaataatctctattaagtgttttcaggaactactttctactataggaaaatgattgaggtgagtatccatctggacacagagaaatataacactgttttctgctcaccctccacttcacatataaatacaatatgtgttaaaggactaaatttctagtgtcacagtttgtactttatagtttgaagtcaataagaaagctcatataccttcctaaaagtcacttattaatgtttgatattaatctaattttatcataaattaaaagtataaaactacaaatttcttaaagataaaatatccaaatggattcagtcaaattaagcatgataatatcaaatatcagaataggttaccatgcaggaggtactgagtacttaaaggggtggggaatgcaatgaacataaaagctggtaccaaggggaggaggagacagtgatgaattaaaacattatcttaactaatccaagtgctggtcttcaatactttcatgtgtatagacaaagagaaactgcagagatttctcacaacctctgtgtccattttatgcatgtatcttagcagaaacactggtgaaatccctccaaaacatatttattaggcatggaaaaagccttacatgacaggtggcataggctccttatgaaatcattgcaggatgggaagccatttagggcttcgtaattgtgaaagattgtatagaaactgaggcacttaaatagcagtaagcatgagaaaatgtggtagataatggtggtgattctatttcttgtgaaagtccacttactctagtctgctacagttgtgggctttccgatttcacataccccagtctctatattctctcaatccacagcctacctcaactaagtccgtcccaggcacctcttactgcagtgataatccatctgttaatcatgttttcctcttatgtctactttctgtcagagaattgtgggtgcaaactgggaagggaaggaaattataagaatatgtataagtacaaatggaatatgttggaaatgaggaatagttaatatcacaggtcatttaaacacctgatgaatttcatggatagtcaggaatcttgttcttacctaatctgttaattttagatcagacattacactgaaagtattgatgaggggtttaaatcaggttgcagctcacatgttgtgataatattatgttgattttttgtttttaatatgtgaggaacagaataactgtatactatttattcatagtgacattgcaatattgattttagtacatattattatcttcataatcacaatttcctccccattttcttagttctcataattttagccacagcccagttggctggaccaatggatggagagaatcactcagtggtatctgagtttttgtttctgggactcactcattcatgggagatccagctcctcctcctagtgttttcctctgtgctctatgtggcaagcattactggaaacatcttcattgtgttttctgtgaccactgaccctcacttacactcccccatgtactttctactggccagtctctc

SEQ ID NO: 39819 - DNA, 2300 bp, Homo sapien
gtgcttattctaaaacaagtaaatgtttgcctatggtctgagattctaatccacggagttcattctaatccacattcaacactatcatgtaccagtgggcctcataacccacctagccctgtgatttttcaggttcacttttctaaacttgtgaattaaatatttattttcttagttcagaagaggaaaaaaactcttgtaattgttgcccatttcaggagaaatcttgcatatgaaaacaagagataaatatacacaactgagggctgtggtttaaacaaaatcttgagaatgttttttgaccttatacatttgtgctttagtataacaaaatgatatagacaaaggtaacttttaatagaaccagtcactaaattaaaaaaatgacaaattcttctgcttagctaagcaacagagaaggtaaaatactaattcaattcatcaatttaagcaatactcattaagagccaagtatgtgcttactgaataagctgctaaggtttggtggttacatagtgtgcggtgaaatgatgtctacatcacagtccaacattcacagagtttaaaagcctaccaagaatcaagacagacacaaatacctaacatagacgtttgtatatgataagagagccagagtacaatttaggagaagaaattgtatggaaggaaggttcatttccattagaccagaaaagacagcacatttgaaggcctgaataagaaatattctggataagatattgtggctgctaccagaatggctcttgatgatctctacctcttggtatttatacccttatataatctctttcctatagtgtaagctggtcccaggtacttgtttctattgaatagaatagaacaaaagaaatgagatgccacttctgagattagattataagatactgtgaatttcttcttgtgccctctccctctctctctttctcttgccctctcatttgaatgaagccaactggcatgctgtcagtggcccagtgtaagtcctgttacaagaaattgacgattacctgtagccaaccctaagtgaagaactgaggtcctcagtcctacaaatggagagaaactgaatctagctaagaaccatgtgagtgagctgggaagaagatccaccctcagttgaaatttaagatgacatattgagcagacatactgagacacactgaaagtaagagagcaggaggaaacaaaaccagggtcatacaaagaacacaactgattttgagattctcacataagtattacaccttcagtgagcacgtgtactagaaatttaaaaaataaataaaataaaccttcaaagtgagctagcaaataaatttccctatggtctcagctctgagtggagagagaaaatgttccctgtggagtttatagccagaatccagctctcaaacaggtttcagcctgaactcacacaatctgtgtggcttccaaatttgcaagctgagaatttaattcaaagtggtctcaggttgatagcagtccaaaatgctaggtaggaaaaaaaatcctctctggacaaataaatcatcaaagcaagctcataagagcaggtttcaaaggtcatgagcttctaacacacacacaaaaatcacacacacaaaatgggggtagcagcaacatgggtagcgtattcaaacttgaaaagactttaaatatttgtattattagatgtagattatgaaacacatattttaatgtggttaatttttttaaggaatcaaaactatgagtaaagaccaagaaaattgtgctggatggccacttccaccatggctcccctcctatttaagtctgggtactgtgtcatccgaagtcttcaggcacattgttccaggtttgggtttgcctatgaaagaaactcatgagagctggaaatgaggagtgaagaggaggtcttcacataaagcaggcttaaggattagacatagcaggtttgacagatgtgatggcttgcagaatcctttatgagctcccactgtccatctggataagatttacagacctttcagaaattcctataagcttgggttctgtgcccacactctagactgtcaggctaagatctctgatataaaacagacctcttctgattttgtctagctgcttttctaatatctattcaccaagctcttccaataatagcataaggccctaattaatattaaacttttatcattataatacataggatgtcttctgttttcctgatcaaattctgactactattaaaatataaagaattgtccagaaatatataaaaaaagaatcacacattg

SEQ ID NO: 39820 - DNA, 2300 bp, Homo sapien
acacacatgcatatgtgtatataatgcccagtataagcaatgtgcacaaataaaattagctaacagagatagtatagagtgagaggagaggcagattaatctttgaggaaaagcacaattttatagctgaatggagaaagctgaggtggtttctaagatggagaataagacgaaaaatgtaagtacgttgtttgactgaattcaagaaagaagggtaaaagagaagaaagtagtggtcttatcattaaatgccacagagaggtaaagataaagacaacatattgttttgggtttagtaatttaagggttaccaaattccgttttggaggaggaacagattccatgtccactagaatggaatgaacaagaaatggaggaggaaaataggtagtttttcaaaagttttcaaaaatatgaaaagaagaaatgaaatggtacttggaagagattgttgaaatgggagagactatggtggcttgtttagaagcagttgagatagatccaattgagatagagatattgactatataaacaaaagaatgacaaattaatagtgtaatggataacttgactttggcaaatattgtgaattttgtgaaagtacaactaaaaggcaatgtcactccaataatcaccagagtaatcaatttgcttattgctgtccctttaaatatagttctctggtatcaactaacatgtttttaactaatgatgcttcttaaagaaaagggaaaagacctttttctttctttcagtcttcaatgattcactgcttcatctcgctccaccaaagataaatgaaatctacatctcttatacattaacaatgcatgacaatttataaatagctaaatttttggagctaactttaagtacctgaatggaatttaatcaacccactaatctccttctcacttctcagttatttatcaagtttatgtcaagggacaaggaaaaattatccaaacattgtttaaaacaatcatcattaattagtaacacttatccaggggggtttttaacctttcccccactcaaggattattctaatgtcagagtagaataaaaaataagtgcagcgatgctgactcttccaagcttaacatttctcacaagtcaattagctttgtactgggaggagggcttgaagggctgcttgcagtagttgtgtagcagcagcacaatggccgcagacaaggaaaacagtttctaggaattcctcgtatataattttatatttttgacaagattaatgacccatgctcccttcctctccatttctttttttggaattctgttggtatgtagttactatattttattaaaggaaattagccttatctcttattatattttattaaagaaaattattatattattcctttatatttttattaaaggattttattattattaaagcaaattagccttatctcttattatattttttatgaccttcaaagtagtgtctctgcttaaaagtgtaccctggccgggcgtggtggctcacacctgtaattccagcactttgggaggccgaggcgggtggatcacgaggtcaggagatcgagaccatcctggctaacacggtgaaaccccgtctgtactaaaaatacaaaaaattagcagggcatagtggcgggcgcctgtagtcccagctactcaggaggctcaggcaggagaatggcgtgaaccagggagacggagcttgcggtgagctgagatcgcaccgctgcactccagcctgggcgacagagcaagactccgtctcaaaaaaaaaaaaaaaagtgtaccctgaagcacacatcaagcgacatgtagagttcataaattctggccaaatggtcatacctcaaacctcatcagcagtaaggctctttacttgcactgacaaatatgaacgctggggaatttggaaatgatatataatatataatattatatatataatagatatataatatataatatatataatacatatataatattatatatgtaatagatatacaatatataatatataatagatatataatatatataatagatatataatatataactttccatgtgattttcctcttaatttttttctagctgatccatatgaattcctcttgttaagaaaaataaagcatccaggattcaatgaagaactgactatcaccttgttaatcattcagaaacatgttgcaggcttaagccatttttgatatagatactgaaacaattacttgctaagagcaaacttgaaggtatggataaggccctgagtcatcttcctgagctgaatgata

SEQ ID NO: 39821 - DNA, 2300 bp, Homo sapien
gtgggccggaagaagatagaagaaagcaacatgcttgtgttcttcgtggatgttaaagccaacaagcaccagatcagacaggctgtgaagaaggtctatgacagtgatgtggccaaggtcaccaccctgatttttcctgataaagagaacaaggcatatatgttcgactggctcctgattatgaagctttggatgttgcaacaaaattgggatcatctaaactgagtccagctggctaactctaaatacatgtgtatcttttcaccataaaagaataatgtttttcataagagtgacaacttaattagaatcaaatctataagctttaagattttacatttctgtaagtataatattagcttatttgactagaactcaagcagaataggaatttatgtttgttttatattcaagtgataactttgaagacatagttttattacaccaaaaattttatattaatctcatttaagtaagttttatccaaatcatgttaacttaaaaaacatttgatcagttcctatatttctaggagtttggtgaatatttatttataaatggttatttttttccaagccaagttagaatagagcacttttataggattttataaatgaattttgcagtgctatccggagttaagaaaatatcacatatacattacatacagtaatagatatacaaacacaaatagagatttcatagctttcatcctgaaatttcagccatgaatcaggcataaatattctgatggttaattttagacatctacttgattggattaagaaacatacatagctggtcaaacaatttcagccatgaaacaggcataaatattctgatggttaattttagacatctacttgactggattgagagacacacgtagctggtgaaacacaatttctgggcatatctgtgaaggtgtttctggaagacactgagataaccctgacccagtgtggatgggcactgatatggtttgcctgtgtccccacccagatctcatcttgaattgtagttcctataatccgtacatgtcgtgggagggacccagtgggaggtgattgaatcatggtggttgttactgccattctgttttcatggcagtgagtgagttctcatgatccaatggtttcataaggggctgttcccctttggctcagcacttcttcttgttgctgccatgtgaagaaggacgtctttgtttccccttctgccatgattgtgaggcctctgcagccacgtggaactgtcagcccatttaacctctttgttctttataaattgctcagactcaggtatttcttcacagctgtataaaaatggatgaatacaggcaccatccaattggttgagagcccagatagaataacaaggaagaggaaaggtgaattatctcctgaaattgaaacatccttcttctcctgcccttgacatcagaatcagtgtctcagagctttggcctcagaatcagagttacaccattggcttccctgattctgagtcctttatatctggagtgagtcatgctgccagctttcctggttctccaacttggagacaggctattgtgtaacttctcagcctccataattatgtgaaccaattcccctaatgagtcttctctcatctatctacatatatcctattgattctgcctttctggagaaccctgactaatgttattacaataatacaaaattcactagtttatatagaagacttggtttttgtctttgccccattttgtatttgtattataactgtgtatctggaaaatggaacaagtttttatcttcttcatatgagggccaaagcttttttctcaccaatatttttggagatttttaagattttcttttgtttggacatacaatcttatggaggctgagaaataaaattttttctattttatttttcagccccagatgtttgcttttgcagattcttgagcacattgagagcatggagagcactccaaggcatggagtggggtgcctaaagtttcagtgattacagggagttgagagactcaactgggaaaggaaaagtctaaaaggaggcaatttggaagataaaaattttctcaaaggagcgattaaatttctaaataattcttagtaaaatcatgtaaacaggaaaggaaatagaattagttccatattggtggaacacatagcagaggtttgagaagggagaatttagtcaactgagaagttctcatgaaaggagcaagttcaagatcacagagacaccttgaaacaaaaagccaggaataacttccaacccaagaggag

SEQ ID NO: 39822 - DNA, 2300 bp, Homo sapien
gaccagcttgggcaaatagcaagacccttatgtctacaaaaaatatatatatatattagatggcatgcttgcacatacctgtagtcccagctacccaggaggctgaagcgggaggattgcttgagcccaggagttcgaggctgcaatgagccagccataatcgcaccactgcactccagcctgggcgacagagtgagaccctgtctctctctctctgtcacacacacacacacgttaaatttgttggattatatatttcgggggttgagcacttttcgttataaaatatttatgattgtgggaacaagttaataaagacatgaaagttatttaaatgtcccagaactttaagaacaaaaagcattcttagtttaaaaataagttttactttaaaggtaacagtacacacataaattgttgttaaaatcgacagtaacaaagagaagtaacaatactaatagcctgtcacaaactgattcttaataacctatataaacaaacattaagcccgggcgccgggtggctcatgcctgttatcccagcactttgggaagccgaggcaggcagatcacttgaggccaggagttccagaccagcctgaccaacatggtgaagcccagtctctaccaaaaacacaaaaaattagccgggtatattggcacgcacctgtaatcccagctacttgggagactgaggcaggagaatccttgaacccaggaagcagaggtcgcagtgaggcgagaccatgccattgtgacaggagagaaactctgtctcaaaaaaaaattatatgtttacaacaggtgcatttctcctcttgctttctgaggacgccctgctatgtagctgagtagtcactaataaactatcttaacttcactatactctgtgacttgccaaaaggtctttcccatgtgaaatccaaaaacctgttcttggggtctaggacaagacccattttataatgacaaaactatacaaattctagagggaaacatagaaagaaagctatgtgaccttgcgtttggccatgagttttaacacgacactatcagaggcatttgaacccctcctctatatgaactccagggtggtttatgttccattggctaagagaaagttttcttcaaaaatgtgacatgatttgaggtcaaacattaatatcaagtaaactcaaaagattgagaagctagcattagttctgggaaaaccagaagtgtgccttttttggaaataatcattggtagcacaaacttaagaatctccaaaggaaataaaaatgagttattaacttacagttttcaccaattaagatataaatgaagctaacgaaatccggaaatacaatttcactgtttttaatgttcattaaaaaaaaatccttatcaaatagccccagtaagtcaccaattaagtctttactacttaaaagcaaaatccacctatgtcctgaacagtatccactttacgagcctcattatatgtacgagataaaattcagaaataaataaatatacatgtatacgtatacaaatatatttcaaattaaaaaatacttttagatagtggtatgtattacatttagaaattaataacgaagtaaattatgggatgtcatccacgcctgtcccaaaggtaccgaatttataaatcatctcaggtgcggagcaggacaggttgaaaataggaatgacatgaacccgcgcggaacagctgccggcgcggtgtccagggcggcaccccgcccggtcccggcccctccagccctgggcccgacccctactacgcctctgcctcgacgcgaacgcggagcccgagcgcgcgtcacgccgtgtggggccgaagaggctgctacccagaggcggagtgcgggctcgcgagggtccccacccgactctcgctcccgccagcacctacggactcgcgtccccgccgcgcgccgactcgggagcagcaccgcccccggcacaggagcctcacgcgcctcttacctaacaggaagttgggtggaagcagcgcggacccacggcacaccgaacgcactccaacagaacccgacgcagacacgcgctttcaaccggcggagacactggcagggccagaaacgcgcgcagcgggggcgggaggtcggtaagctccccgcccctgcccgagaccccgccccggcccggccccgcctttttctctgcctcccctccctgcacgtacgggccccgcccctcgcgcgacgttttttgttgacccggaaacggattctccggagccgaggtccgctcgggtgagtgccctccgctttttgt

SEQ ID NO: 39823 - DNA, 2300 bp, Homo sapien
atatatgggggcataactcaacatgtgtaaaagacaatcttctgcttttcactgaacctccaggaattcaggacaataaacctctacatgcagaccaacaggtgagtttttctgccccttctttcataacaccgttcttccctagtgaagtccacacacatccttacatggcagctgtgggtatatcaactggtctgaccccttttagtcacagagcctgaagtctgctagtacctgctgagcacagtgtcatgggtgagaatgggcaaggctttttctttctctggttcctgaacttcccaggctctctcacttctggatcctgaatacccaaatcccaagcttccttcccagaaccaacacctcctcctcattagaaagatacctttgttgtgtgcttactttataaagtcttgctctttccctgtccactgccttgtgtcactatgtgtgtgtcttggggccggtggaaaggtgaacagaagccagtagagagtaacaagcaccagcttcacaggaatggcatgaccttaatacgatagtggcagttttcccttaacatccctgccccctaaagatttcagatcatatgtcacactcttaagtaacagcgatttgtctttcacggttttaatcatattgattaaaagcatttgtcttctccagaacatcacattaagtcatcaaaaaatataaaccttaaaaagatgtaattattggaactgaaaaacataaaaggtgagctttggaaatatctttgagcagtctattcattatgaacacatgtaatctgttggaacaaagttctaggacaatccaggtcatccttcaatatttgcagaaaacagcacaaagaaaacttgatacttaaacttagttggaaactttatgccacagccattaaatacagagatcatataaaggaatagaggaagctgttgaatactaaactaactcaaatcatcattatccttacgaagtgcacactgaattaatgtaaaaagcatttagtaaacaaaaagtattttcaatatacaattaagactgaaaagtattgaggcctcataagctgaacctgacacaataaatttaaaagggaaactaatttggaaatcagaaaaccatctaaagaatttgggaattaggcttctgctgccctctctgctactgacggtcaaggcctcctcattgtattctgtcctccatatctctgctgattcccattttgtctatttccatttaccccactactacttgctcaggtcactctccttcattgtcggtgtttgttcaaattcctcagacccatccacttcccatctaaacttccctccccttttctcgctcgttggctctacctccctcctctgttttctcctcactctcctgccccacctcgacatccacagcgaggcaatgaagaagcccctgccaaggaagagcccgcttctcagtgggacaccgggaaggtaaacacccaacagtcaccgctagtgggaggcgattgtgcagaagcacgagggttgttacaggatcgggcaggtcccctaccccagtctcggactcagggtcctgtctgaggcggccaccccgaagcgtggggtttgcggagacgtagggcctggcggagggaaggatggggaagcatctcagggaggactggcgtctgccgaatcccagggctgccctgaggggccaagaggggcgagggtggggacgatggaagacaagccacatgccgaatcgggacctgaggccgcgcgcgataggatgggcggacggtgaagagaactagggtggaagggccggacaggggcgacctcagtgacggaaccggacacagacgcagatctggcagctgggcgacaggcttcggagcatttccgggcgtcgcgggactccccgccgacaggagggcggttgccgagcctgtgacatccgcggagaccagcagaccccgggtgtggaggacgccgcaggaagggaactgcgtggctgggtttggccacaaaaagcggagggcactcacccgagcggacctcggctccggagaatccgtttccgggtcaacaaaaaacgtcgcgcgaggggcggggcccgtacgtgcagggaggggaggcagagaaaaaggcggggccgggccggggcggggtctcgggcaggggcggggagcttaccgacctcccgcccccgctgcgcgcgtttctggccctgccagtgtctccgccggttgaaagcgcgtgtctgcgtcgggttctgttggagtgcgttcggtgtgccgtgggtccgcgctgcttcca

SEQ ID NO: 39824 - DNA, 2300 bp, Homo sapien
aagcatcacttttctcttgtacattcagggatgtgcttcattggcttagaaaacgtcctctgtaaataaactccgtgaggctgggatttaaatgcaggaagcagctggcagctgaagctacctattggactatcatctgcttaaacacgcgagaagcctcttgtgaagtctaaagcaaatacaacggcttatttgagccgtatatacaagagacttaaacaaacctcgtgtaatcctcttaaatgttgcatctccccccacggaaacacaacctgccaattagctcaacgtcctgacaaaacctcccagggctgcactgtaggggagaaaggtgtttatttaataagatctttcagagggaagccagctgcgtgtctgaacatcttgggagcaacaaatgaagacagtacagtctaaagggaggacagtgccagcaagagccccaggagctcggcagacaaagacaggaaaagctggaagtggaaaagctgaacgttcacgtgtaaggaaacccactggtcccttagtacaatcacaactgcctctttcgccaagttcctgagtacagttggtcttagttgtgaaagatcagtctcaactggcaagtgctggtgctggatttgagtccaggtggttagaaccctgctgccaggtttgtattccatggaatcctacaggtgtccattctatggaaggttcccagcaccagtgggtctcatgcatgatcaaagttaaatcagctgggcacggtggcatgcacccatagtcccagtggaggtgggaggactgtgtcaactcaagagttccaaaccagcctggacaacatagtgagaccctatctcaaagaaattttttttaattaaaaattttttgaaaaatttaaagttagtccaaacactaagagaagagagttggggtgtgaggatgcgatagttgtgttattaaatccaactacttggtttccatcggggaagggcccacctccccaacgtgtcccttgcggggaccatcacgttctgcccctgtgatggtcagctggccacggacttgctctcaccatatgacgtgcacagacacatatgtgccaaagctcagcaaaccagttaaaatccgttttgtgactgactcttgctcgctctatgcaagaatggcaccttccggatgggaactgctcctggagcccaggccctggcacgagaagacgtgtggtgactgtagtcatcagtgtgccatgtgggcaacagatacggccttgctttgctcagccactgagatattggggttcaagagaccatggccaactggatgaatccaggggatctgtgctctataaaccacctttggatggatccaagttcaattttgcaaagtaaaccaggtgatgtccttggaacttggtgactctctgggtgtaaagtcccagtcccatgtgggtcccagcatcggtggtctggttgctgatgaagatcagactccaagtctaaattttctggagatctacacctcccaaaggaggctggtgagtcctggggtggcccttggataacttctgtgcagtagcagctgctggaagaccgcaaagatcccacaggcttctgatcagaagagcaccgacttggttgtcagggaccctggacatgccctcctgcctgccctcactggggcctccgtagctgctggggaaaactgcttcctatcatcactcagtgactggacagcgcactgggctcaggagaatgttacctcaatttaaggtattggtgatattaagataggaaaataatctttactttttattaagaaaatgtggtaaatatggaacatatctaatagtatatggaagctttgaaatttactgatgaaataaagccctgtggagagcccgttcctcttaatctatggaaacccccccggactctgaagctgctgcggctccttcccggccctgcgttcctgcttccctgggagatgtggccactctccagcattaaaaaaagtgttccttcatttaaaaaatagtttccatatctgtacaatacatattttagcatttctgagatctattacaatgttattattgtgttctctggggcttgctttgttcttctttctacctttctaagattccaccatgttgcttgtttagttcaaccagtgctgatagggacacgtttgcacttgtctctcagtgaacattcgcaagagattttctagggtaagtatctaggaatgggaatttctgagtcataatgtatgtgcaagcctgaacattcatgctttcctccatattcactagtaga

SEQ ID NO: 39825 - DNA, 2300 bp, Homo sapien
atatgctcttgacattactctgtgggctctgctgttactctgtgggttctgacgttactctgtgggctctgctgttactctgtgggttctgacgttactttgtgggctctgctgttactctttgggctctgctatcacactatgggttctgatgttactctgtgggtgcctgctattattctgtgggtcctgctgttactctgtgggctctgatgttacactgtgggttctgctgttactctgtggatctctctgtggttactctctgaattcctgctcttactctgtggacttcttttgttgctttgtgagtttctgcagtttgtttacctctttaccatccatccaggaattctttcactaggaattgtgaggatgctagccaattgggctaaatttaatattactatgtcccccattgtggtggtggggtcttggcttggcaatttctactagtattccatatgcagttaaccttgacacatcagtgaaagaaaaataaaatttcaggcctccaaacttactatgccaaagggaaaagttaatattggcaaaacacacacacacacacacacacacacacacacacacacacgcagtcttctttttgttcccaaaagcttactttatcttatgtgaaatgtagatctactgagtatgagacagatgcataaccctcccccatacctttcttttcacatgtgaaatgtagatttgctgtactctaatcagagcctcacaaaaatgtgaccacttgcctcatagcctactctcccctctttcccctcctaccggcgcttttcccttaaatatttggaaaaaagtacaggccaaaaatcctactgtaacctgtgtttctttttccccagacacgtccacgattttggcagaataaacctctaaatcagttgtgatctgcctcagacactttttgctttacacaacaatccaatcatagcgatttatttggaaatataccttcacaagttaaatcagaccacagcgctactgggcattatttataatggcaaactattgcaaacaatttaaaacctatcatagacatcatagaaactattctaataaattgatacatttatataatagaataatccgcaaccttgaagggaatgaaggaaggaataaagagagagggaaaggaagaaaagaacggagagagggaaggagggacagacaggtgtttaaattggggatgtgcaagcaatattgcctacttcattgccttcacattatttaaaagcatgtggtcaagaaacactattataataagcacttcagaaataacttctaaaattacttttccaaaatatgaatccatactatacacttcctgtaatgtgcaccacatgtagatgcacacattttaacaaggaaaagactaatactcatatttgcttgctacacaccagacactgttttaaatgttttgcacacgctaactcatttgttcttatggaaatcctgtagcgtgcaccgccacctccatgtttctaggcggaaactgaggcacgggggctgcggctcctggacccacctggccttctcggcctgcctctctccctccagccgccccacattcttttttcctaattggaaaaaactattcacgctgctcctccagggcatttcaaccttctagaaagattcgacaagattcgaaactgtttataaagagaacgtgcttgtgcccgaatgctgagtgtgagcgcgcagtgatgccctagagtgcagtcatcccgggcttggcgcccagcgggtggaaatacggccgcagggtggaaatgcggcggcggggctgcccaggctcctgtgggacccgcgcggcgcgggcacgcacattctcagggacgcgcgtcctcaggccacgagaacacctgaaggccccggccagcgtcctcccgtgaagacccggaccggcgtcgtcacccgccgcgcaggcctaaatctcaggtcttcaccgtcatctcccagcgatcgcagggatctcaggcactgaccgcgcccgtccctgcgcacccgagccccaccccacgcccccacgcccccacgcctccacgcccggcactctggacgcgcgcggacggaggggcagtgcctactacgcaggcgcacgctgcgggcgacaggaccaggcagcaacattgccacgcggatccgcgccggccaatcagcatggccaggggcggggcttccctgaggcgcgccgggaggcggcggcccacttccggcaataaccgcctggtcgccgtcaggtgcgggcccaggtggccggcgcgccc

SEQ ID NO: 39826 - DNA, 2300 bp, Homo sapien
ttttctgtatcttctaggattgtataagtgcccatttaatagcttgttttttgttaattatactaaatatagttgggaggtggtgtttggagatgttcatctctcatttattctccatgatgtaaatattctacatttttctctacgatataaatattctatattataaaatactcaagtctgttcgggacgtgaaattaaagtaatacattacagaaaccacttttgcttgagtaattcagctacctttctgtagctaaattcaacgtatattttcaactcttgccatgcttggcatttttataacattttcgtctctgtcgaccatttctttcctgaaatacatttttctcctgacttcctacttctccctctacctttttggctcttccttttcagtttttcttcttggcttatatctgccgatcccttaaatggtgatgtttcttagggtttttttcttggctctcttgatttccctctcgacatattctgtgatattatttgtgtggttttgattagtgtctgaatgctcatgattttcctctttctctctagtctaactctcttctgaaccatggatgtatatatttattcattcagtaaataaatacttatagagctcctgttgttttcctggcattgttcaaggtaatggaatacggacctgaacaagacattgcattttcttggaggaaaacagatgataaacacgctaatcatttcagacagcccttacaactatgaaggcactagataatggcttagactggtagggagggggttgaggcagcagaagggcgctgtttggacggggagtcagggagcctttctgggatgtgacattttgaatcagcagtgtgagcatctgaggtggtttttagcctcatgcacagtctcactgtgtatgagaatcacctgtggacctttaaaaactacttaaacttagccttcacccccaaatattcatatttaactgaactaagatgggactaagcacttgaatgtttaaaaagcttcctgtgatgttaatgcacagcagtagttgaaaaccactgatcaagaggagcagaaatcaagtcagtgggaagaactagcatttgaagtctcactcttatcaaattgtgagcgtcatgaagttaatcacgaagttgcatcattttttaagtcataatttttatacctggagtctggtatttcaaactgaacaggcatgtcctaagctgaaattaatatcccttatctctcctttcctaataaaaccctgctgttccttctgtatgtcttatcccagatccaggggctacaaaacaaaatctagataacttccttgatttcctcctcacgtttccagacagtcttcaagtactgtttgactctgtttcctaaatatttctgcagtctctgctcttctgtttattttgccactgtatactctcaccttttaaaggtcaacattcagaagcctccagtcccaactactttcctccaggtgaccctcaccccataccttctcccactgtgatactgagttctttgtaaaccacaaatctgattgaatcacttacctgcttacttcccttttttggcccctcattgccctcagaatagcatccaactcctctaacttgatccagccttaaatgacttctccatccttaattctggcccactctctctcatctattctaagcttcaaccaaactgaactacttagagttgctgaacatgaatacatttcattttcggttgcttctaacttctggcaaagagagaatacttgtttggaataatattccctattccacactccctgacccctgcttgtttttcaggtatgagctagaatgtcacctctggtaaacctttcatgggatacgcagtattaggccagtaaaaccacgtttacttaccccatttgatcactttagtacacagtactgtgttattgtcactgtcaccaatgtcgagccaacgtttaattaatgagcagacatttaaatgttaagaactttaatctttaaaattaataaatgttctaagtgaaaagaaacttttatgaattatatatactttttaacataatttaactttttcataggagaactatgccatttttgggtcaggactggagatctcctggatggagttggattaagacagaagatggctggaagagatgtgaatcttgtagtcagaaacttgaaagagagaataaccgttgtaacatcagtcacagcatgtaagttacagctgagcagaaccatgccatttgccagtttagcatgtatggccttacc

SEQ ID NO: 39827 - DNA, 2300 bp, Homo sapien
ggcagcagccgggagaaccaccacagaggcgaaggtgggattggaagggcccaggagaagacagagatgttttgggaaacacaaaaaaggtgatggaaataatacgaatgagaaaattaataagaatgaaaccgtaatcatgagtttaaaaggaactagaaagaaaattacagctgaagagaacagggagaggggttccagcatatttatcactggaatcttcaaacaggaaaacaaaacaaaaggacagaacaaatatttaaagataatgttcaggaaaattctgctcaggtaaaaatagatggaagtgtacattgtgagagggcaaattttatgctggggaaggttgactgagaacaggttatgagtgtgccatatcctacaggaattattaaactctgaagatgaagcaagaacctcccaatggctgaacaaacatgtcgtctcttactgagggaaaagatcagggtggcttcaaatttctccaaattcttcagatagtggagtaatccttacttatgggatcctccaggaagaaaggatggcccatgaattttatgtccagtcaaaccatcttttgtatccagtctgcaaacaaacagtattgatcatgtgagaactcagggaatacttactgttctcatgagcagtttcggctggagaaacagtgtccatcggactggatgtcagtgaatctctgcagcatcagctgtgtggctgagggtgacggagcagagtgtgagtggagggcagaggagaaaaggtcggtggttagaggtttgttgactgtctcacctgtaatcacagggaggcactaagatgttattcactaaaatcaagttgtagaggagagggatggaaggaagaaggagcaagatgaatggcagttttatcacaatgtggaacagtaaactaacaggctaagatgtgttgtatgaggattccgaaggagagggaattacatagagttaaaattccaaaagtaacccctagtacaaaatagtgcaaacatttctaaatttcagaagaactacagagagaacgcaaagtttttcaaaaagctacaaaaacatgtcataaaattaagaccaaacatgctgtgtctatacatgtaaacacataactttatacacataacctgaaggctggtaaaagtaaaagatttcagattgaatcaaaaagtgaaacccaactccaagttgtacgtaagaagcacacctaaaacagagatttacaaaagttgaaaataaaagaatgaaaagatacactagggaaaagtaaaaaataaagtgggacaaaaagcattaaaggaaagcagcagcccactttttcctgccatgatgcacatcagagtaggggtaactggaaaagcagggcatccctggaggggcaggtggagcagcggcgagggcctcggtcatcattcccacaggagacctctacttcgtgggttctgtcacagggatttgttactgtggcttcccagaatacaaattctacaattttgtattttagtgcaatttatttgctatttaataatgagtttttaaatacaaaatggtatttaacaatgagttttggtgttgtgtttcctttttaatttctacatggaagggctgtttgattttctgattgtctgttcagcaaacaactgcgagtatgggcttaggttgtgaaaatacttgttagtgcccaaccattcattctagcctctttctggtgtgcccttttgctacagaggctggaaagctaaaagctccatttcagactcttgcagcctgggctccgggaggagatatgcttccactaactaaatgaatagcctgcaagactagaagacagagctgtaggctgcggctgcctcagctcccttgtatgaaggtctcttcaggtttgcatgggtagtgactgtttcctatacttggactcggactgatacagtgacttaatttaggatggcatgttagaaatcttcatgcatgtgtgttatatcactgtggtttgtaattccatattaaatatatatatcgctcagcttttttccgtctttcctttaagctgttgcagctaattgcaaaatcccagttaacttcattgagtggcgtggcacagaagaattacttcaacattttggataaaatcgttcaaaagggtaagatgatcactgtatttttaatactctaaatcttaattagaaatttggtgcaaggagatgggatttttcttttatctttacccagtacacatactgtcaaaaacaattgtgtaaataatgtgataacatcagaaatacaggtcat

SEQ ID NO: 39828 - DNA, 2300 bp, Homo sapien
tgactgatttctatatcttgaaccaaccttgcattcttgggtcaaagcccactaagtcatggtttatgataccttttatacatagctgttagatttggtgtgctggaacagccagccctctgtatccacgggggattggttccaagacccccacccccaccccacctgccacccaccaccttgtgatctcttgggttttggtgtccatctcataggataagcttagaaagtgttccctcttctgtgttttggaagtgtttgtggtggtttcttgttaattcttctttaaatgtttgagagaactccatataagatttgaagtcactgagaagcttcaattatcctttaagaggataagaccattttctccagagatgccttttaatggtttttcttttcattgcgaaggcctaacttagtagataagtggactgtgaaacctagtctgttctgcttatcttcagaattatcaaaaggaaggggtgctgccctctgagaaaagtcagaagcaagcctgccttatgaaactcgactttttaatctccctctcttcattatgatgtgtgcacgtgatggacaccactcacctccctttagtccctatcaaatgctacccaatggcaaagccaagggattagcaacaggtaggaggaaaaagaaggacctgcatacatgactaaccagcaccagccattggggccctctatggctgacaccagcatccaccctgcactcatatgtatctcaacagaattgctgcttctgtcttcactcaagccccactccttatcccttcctgttgtttctgcatagaggaggcagaccctcaactttggaaagcagtgtccccccgcgtcccatgggctaaatgccactgagccggtaggagctgctcaggtgtagcctctgccttcagaatttcagcaggaactgcatcattgtgtgcctaaaaagccctggctcacagcatgagacagtgtgttctaggtggtaacgtggcacctgcacatgcacccccagcagtcctctctaaactcaggcagtgtatggctgctgccattctcgccctcagcatctgtgagatgaaggagttgctccccagggcacctgccccaatacaggccacgtggatctgccattgcttttcacgtgaatgcctaggagaggctgttaaccctcctagttgtcctttttgtacttggtcctcttccttccaatcctcactggctcaaatccacagagtgacaaagaacagagatgcccagagcaccagctggaggggcaagcaggagaaggcactgctggtgccacaggggtcctgggctggctcttggaccataaccagcgttcactgaggatgcggtttctttgaaatgctcttgttcttcctaagtaagggagagcaaaaaaaatgaggacatctgtgtcaaatagaagagacacctcaactgtctcgtttttgcatggaaatttcatttttatttgataatcatttgagaaacttgcacagatgaaggcaagttggtttttattatctaacctatgtagtcaattctaatgtcatttaaaagaatttgacatgttaaaatacacgtgaaatttaccatcttacctattttaagtgtgcaatttagtggcattaaatacattcatactgtgcaaccttctctaccacgtatccacaagttcaactttacaagatgaacttttgtcatcttgtaaaactgaagctctgtacccattaagcaccaactccctattccccatccaccagcccctggcagcctctgttctcctttgtctcttttaatttgacttctgtagggacctcgtatgagtggaaccagaagggatttgtccttttgtgactggcttatttcacttagcgtaatgtcctcaaggtttattcaagttgtaggatatgtcaagatttctttttaaggctgattctatggatggaccacattttgtttgtgtactcatctgttgaggacacttgagttgcttccaccttttagctattgtgaatattgctgccgtaaacatgggtgtgcaaatatctgagtctctgctttcaatcatatggcaatcctatgtttaatttcttagggcactgccataagtgttttacacggtggctgcaccattttacattcccactgaaggttccagttttgccacatccttgccaacacctgtttttaataattgccatcctaatgagtgtgaagtggtatcctgctgagattttgatttgcatttccgtaatgactggtgatgctgagtatctgtttgttggc

SEQ ID NO: 39829 - DNA, 2300 bp, Homo sapien
gcctcagcagatgaaaaggttgtttaaccatgactttctcgatcccaaaatggatttttagtggtaacaattgtatttttatgacactggattgtgtaaagtatgcctcttatggaccttaacaatagcatgacttaattatataaaactcatagaggagctaatgaatgaactgagtcaaattcatagtactcgggaaagttcttctcaaaattccagaaatgcctgctgctccgtaacagccgtttcaccggcttctcccacccaacccccttccctctcatttgtgccaggcctttaggttgtagatatcctgactagctgtgctcttcttcagaagaaagctaaatgtctaaaatattcagtaagttagcttttttatttagcaaggctcaccttcttccagattgtcatagatttgcaggggattacagtttaatgacaattcatggagtggatgttgctagactgagaggaagccagctgtctgggcataagccctgtgttccttcgcattagccagggggatttgtgttatttgtccaagtgttctgagttggttttctgtgttttatttgtagcgtctttatatgggctgtgtttggatcctgactttgttttgcaacctctgtttgatagtttttgactttcatcagtttgtgcttgcaatgtgcttattttgacagcaccccggagccacaccatgccatcttgcatttgcaattttctaagccccctagcccaggaggccaggcctattaggccttgtttgaaaaggagcatatatacatttttaacattcttattatttgcgtgaagatgaactctcaaatttagtttgtactgggtggagtggtccttagtaggcgccagtgtttaattctatttcgtgatgtttgcggccggtaggtttagcggtcaccgggggagggaggcatgtgggaggggtgctgccctcctctctgggtgacggtatagttaggttagtatcgttaggttattatctggctcttcccactcggctgggggctcctgccaggcccagcccccgccctccctgtgcgtcccgcgccagggccccaggtccccccaggccttgggcacgggcgccaccccctcggttctccgggatcctggccggcatctcccaaaggcagttcagagcccctttcatcttaaaagctttgctgctcatcacttctgggaaactcaaaatgtacatttcatttttttaagagtcgtaaagttacgaagcttgcagttttcaagggagctcatagttctggatcctccttcaaaatgcgcttttacatgactgaacacatgaatacatatttggtgtaagaagcgatacgaagcgcgtcgcgggaaaaattaacctgctgggcgggagcggacgcctagaatcccccgttcccgcggctccgtcccgggatcgggggtcgcctcgccggctcctttcggcctgggaaccaggcggttctgccctcaggaatctgtgggcgcctctcccgctcctgattctgacaaagccatagccacgcgggaaaacgttctccgggccctgagccccaacctgggcgccgcgggggtcccaagggttctgcgcggcccggcaccacggccccatccccgccccccaccgccgtcagtccgggccgagcccgcggcgccccaggccccagcggccccaccgcccaccagggctgggcgaggcttcctcccggcgcccccactatcccgcgacctcgggcgccggaggggatgagtcccggatgcccggcgcccaggccccgagggatgccctgaagcgctggggtacaggcgccgctccgcggactgtgccccctccaccttcccctcagccttgccgcggcctgagcgccagcggcgcgcatgcgcactgcgctcccggccgttgccttggtgacccgagcggacgtggccacgccctccggccagggtctgggaaagggtggggggagggggcagtccgggagtaagtgggggtcggcgggggagaaggagagaaccgggagaggggaatttgcgggggccgggtgggggctcgggggtagaggaggacccagggaaccggggatagggcagggctaggggctcggtgggggctcaggatgggggcgtttccgggtgaggaagcagctaggggcgggtaggtgggggtcaaggtggggggaccaggtgacggggtagcctggggtgaggacgtcgttcagtagaacagtgaagggcgagggtctcgccggggcggtggcggggaccacactgggaggaggggg

SEQ ID NO: 39830 - DNA, 2300 bp, Homo sapien
cccattcgaccttgagtttgagggtttatttctgggtcctcgcctctgttcccttggtccatacaccacctttatatcaggacggtgatgctttcattcctgtggcttggcagtaaaattttgaatcaggaaatgtgagtctccagcttcgttctttttaggattgttttgggtaatcaggaacccttgagattccatgtgaatttagggtgggtttttctgtttctctgagaaatatccttgagattctcccaggaagatatattgttttgagggctttaaaactccctataaatattgctgtactttgggggcccttttcttcccacactgtgtttttgagatttacccatgctgttgtgagtacctcgctgaatgcagcacatactgcatcatacaagtgcatcctgatccatttcccctgacggacgtgttcattttttgttatggcaatgctgcaatacacgtttttagctgtgcctctttgtgcttgaatgtgaggggttttctaaggtgtgaacctcagaacagagtcgccaggccatagggtgtgcacagcctccgtctgtcctgggcggccccacgcgggctccacactggtttccgtctgtcctgggcagcaccacggtggctccacactggtttccacactggtttccgtctgtcctgggcggccccgcgcgggccccacactggttgtgcgtttctcaggccaccagcagcgtccaagagctctggccgatctgcctccctccctgcgtctcggcatctttgtctggcactgctgatggttttgcctaaacggctctttgctgtggggcatcctgtgcaccgtgggacgtcttgtgcactgtggggtgttgagccgcatccgtggtctccacccacagatgacaacgacacccccagctatgaaaccagaaatgactccacacattgccaaatgtcccccagggcaaagtcacccacttgggcgttatgttacccactgatgatctgaatttttgtccatttcacctgtctgagtttgtgtgtctctgagcactggtgggactgagcgtgtccgtggcttgtggccactcctgcttcctgtttgtgaattttatgttcataacgtctgcccctttctttgggtttttcactttattcttattattttgtaaattccttaagtattctggatacttaccttttgttattctattctagtagtcactgtccccaaaacaatgttcataaatttgttcttataaagatgagaaataaaaaacattgaattttagagctgcatacatttttttaaaacatgggctttaagaacctttggtctatttgatctttcactttcttttcatctgaaataagaaaagatcatttttaaacatttcttgcagccttggcattcattattattttttttttactgctaattagaaattgtcagcaagactggatgaaagcaacaatagttttgagaaaaactatctcaaaagcagatgttatcaagataaacacgacacacaatagaaaaatgagaccccgggacaaatcactacaacatcaaaattcaagactgaggaaaagtcacagcctcccttattcatttatcccacaaagttttcctctcctgagcacaaaggtttcagtgggactcgcagccctgccagtcggagagtagagcctgtgtcctggggaagcagagacgcagctcgagtctattccggctgtggtgctttgggagttctaagcagcataggatgtctgacccagccctggaaggacaggaagcacctttgggaaaagaggagggtttgcgttccagagcggagaatgggctttaaatcttcctctagaaacaagtacagcattgactgagcaaaggcctggggcgggggtcggggggcggcacctgcaaaccttcacatcaccccaccaggtcatcctagaaaattagtcagtgcctgtaaacatggcagttctcgggaagctgagaacgttccagagacgatggtgtggacggctgcaccagtgtgaagcgctcagtgccgctgaacagcacactgaaaaagggctctggtggtaaattttatgttgtgtatattttaccacgatgtaaacaaacaaacaaaaaactctcggcattgcccccactccctggcagtgtctattgtgggaggagagaccgaaattctcaggacacacccaggcctcaagacttctcgcccaatccgtcaccacttcctggcgcagacatcggactgttaaggcccctccacttcccgctcaggttacagacccca

SEQ ID NO: 39831 - DNA, 2300 bp, Homo sapien
cagggacctctgctcagtgccaccctgcgggatttgtccttctgtgaccagctcatttcacccagcataacatcctcagggtttctcgtgttatagcctgtgtccagattcccctgcgcgcatgtggcagccaccaaccatcctactttctgtctctgtggctccaacccctccggagacctctcctcagtgccaccctgcgggattcgtccttctgtgaccggctcatttcacccagcataacatcctcagggttcctcgtgttatagcctgtgtccagactcccttcttttttaaggctggatcatattccatttgttaaaagaaacacttcaactgaattaaatttaaaggagtttaattgagcaatgaatgattcatgaatcgggcagcgccagaatcacagcagattcagagagactccagggattcctcgtggtcagaacaaatatatagacaaaaaaaaggggaagtgatatataaaactcggcagtgaggtacagaacagctggattggttccaggttggcatttgccttattggaacagtttgaacactcggcagtctacgcatggttgacgtatggctgctgggattggtcaagactcggccactattacaggcgcagactcctgaattaggttttcagtcctgtctgctattaaggtaggttatagttcgtccacaaggactcaaacatagacgtcctggcattcttctcaggccacatttagttcgtgttagcacatggcactgtgtttgtccattgatctgtagatggacatggtgctgttttcaccttttggctgttagaataatgttactctgtacatgggtgtacaagcacctgttgagttccagctttcagtttgggggtttatgcccagaagtggaagggctggatcatacggtaattaaatctgggtttcattttctgaggaatttctaccccgtcttccacaatggctgtaccgtttttcattcccagcaacagcacatgagtgtgctcattcctcctcatcctctccagcacttatttctcgtttgtaaaaatatatgataatcatcctgatggttatgaagcagcacctcgtggttttgatttgcatttccttgctgattagtggtgccggacatctttttgcgtgcgtgttgacctttgtctatcttcttaggagaatttccattccggtcccgtgcctacttttgggttgttttgtttatcacagtttttataaaccagttctacatcagatgagctgtgtgcccctggtctctccaagtagcttaaattctctgagcctgaggcatctcctaggaatgaagacaccctgtaagctcaacaccattattcatgcctaagacaactacaccaattccccagcttttgaatgaccataggaattatcagcagaacaggacactttggaaagtgaatgaggtgggattaataattatgcggaaacagcaggtgtgagccagaaccatcccaggcaagctcgtggtcactttatgtgatatcaactccactccgttcctatctagatttccccactgtccccagcacatctttccaaccagcagccaacaacggtcgggctctgcatttggttgcgagcctgtgttgtctcatttatctctgtccactgcttccctaaaggtggtgactctgacggggccaggccccagtcttgctcttgtagaacagcttctccctccatcacgtaacctttcctcctgctggctgcatttcctgccaccggaagtaaggtcttcaggcgtcggattcagagggcacgtgggtgcagggtgagttcagggaaggcgtcgatggggtggcatggagcaccagggcaatcgcttgtctgaagaggtgagtgcagagccgtcggtggtaaacctatgcagagatgccccagcgcccgcaaacgctctgcctccaggtccccggatgcctcagcaactgccaacggccttttcccaaatcagtgccttcattcgggttgcaaaatagttgatcttctaatttcaccattcctgccacatttattaccaagcattctgtgaaaaaggcttttttctcatcaagaggaaatgaaacacactttctcttaagcaagggggaactgctgaagtcagtccctttcctcaccgatttccgagtagagttgacaatgatgtcagagtggctgccgaagggaaaccagatgccctcccctcccgctccgtctcagcctctctctcccctcagtcttctcccccctcccactccgtctcagcctctctctcccctcagtctt

SEQ ID NO: 39832 - DNA, 2300 bp, Homo sapien
cctctatctatgaaagggttttattgtggtaaaacatacatacagctcattttagtcattttaggtgcatgattcaaggtaccacatgcgtttgctggggccaccacactcgtcctgtttgtggtgagagcatccctctgtgtcttccaggacccatgtgtgccctgtcccgcctgtcctgcctgtcccgcctgtcccgcctgtgagcatccgtgtcccagacgctgtgtgggtgccaatctctcttcctctagggagtggaactgcacggtcgcctggtgacggtgatgttctgagggggtgtcaggcgggctgctgggctccccactcccccagtgctgatcagggccattctgacgggtggaggtggctgctcaagtgttgctgtcctcttctgtctgtctttggagaacatcagcccagaccacccctgcccaaagctgatgctcagatgggcagcatggagggaggggaaggaagccttggcgtccccgccggcccctgtcctgccacttccctccaggtccctaagagacgtctcttctacatgttggaaccttctggaagcaggtgaaacagggatgtttctggctctggaaatagtccccttggatctggtggccttgcagtgtccccgtcttgatgcaggttgtaggccctggagcacaggcatgtggcagcggacgccactcttcccagcgtcacccgaggacaggacgcaggctgctccagacagggtgttcccaggaggccacacatgaggcaggagctgcaggcgccgctgcttcaccgtcttttggcatcaggggagctgtggttgtctgcagggcgccctgcccgcccctgccctcccttctcttcccctaactccgaagtcattgtgaggcgtgggagtggccaggagccgctcttcccacagtaagaacctgtgctgcagtggtgtccaagccggactcctgcctccatcgagaacctccatggccttgtggaacctgggatctcagaggcaccagcctgcaaacctcccgtttaaatgcttctttttttattttttatttttattttctttttgagatggagtctcgcttttgttgcccacgctggagtgcaatagtgtgatctcggctcacctcaacctccacctcccaggttcaagcgattctccagcctcagcctcccaagtagctgggattacaggcatatgccaccacacatgactaattttgtatttttagtagagaaagggtttctccatgttggtcaggctggtcttgaactcccgacctcaggtgatccacccgtctcacccttccaaagtgctgggattagtggtatgagccactgcacccggcctaaatgcttcttaattaatagcacatgctttgcaaatatgaaaataaattcaatattggcagactcataattttactattcttaacgtcccatttgtgtcttttaatgatgaaccatctccaccttctccatcccctgcaagtgaatgcaccattgcaggggtggtgggtcatgtgtagccttttcctgggttgcacagaatccctgcccttgcaggggatggtggttcacatgtggccatttcctgggttccacagaatccctgtaggttccacagaatccctgccattgcagggctggtgggtcatgtgtggccttttcctgggtccctgtaggttccacagaatacctgccattgcaggggtggtgggtcatgtgtggccttttcctgggttccacagaatccctgtaggttccacagaatccctgccactgcggggggtggtgggtcacgtgtggccgtttcctgggttccacagaattcctgtagactcccttcttgcttctgtgatcctgtggggctttactttgcgaaaccttctgcattcactttcctgaccctgagaatattgaggaatagaggtacagtcgagcaggtgggatgctcagggttaattcgttttgtgtatcattctgattccaaaaaggaaaatgcatcttctacaaaacaaaagcaaataaatcttgtctctaatatgtcagcatagatatgataatctgtttattccactgtgtttgaagttagataataattagatcaatttatcttctacaatagtgcaaaatattcagttcatgtaatttattttctgtaaaccacgtcaattaagacaggcagagaaggaaacagtcaggagcatgaggaattgtcaggttgccaatattaagacagttgtgcctagaaggaaaaaaacacagaatatctgagcctgtcagtactgcttgca

SEQ ID NO: 39833 - DNA, 2300 bp, Homo sapien
cgaggggccgccgcgtctctgtcctcacgaggggccgccgcgtctctgtcctcgccgaggggccgccgcgtctctgtcctcacgaggggccgccgcgtctctgtcctcgccgaggggccgccgcgtctctgtcctcacgaggggccgccgcgtctctgtcctcgccgaggggccgccgcgtctctgtcctcgccgagggggcgccgcgtctctgtcctcacgaggggccgccgcgtctctgtcctcgccgagggggcgccgcgtctctgtcctcacgaggggccgccgcgtctctgtcctcgccgaggggccgccgcgtctctgtcctcacgaggggccgccgcgtctctgtcctcgccgaggggccgccgcgtctctgtcctcacgagggggcgccgcgtctctgtcctcacgaggggccgccgcgtctctgtcctcacgaggggccgccgcgtctctgtcctcgccgaggggccgccacgtctctgtcctcactgaggtgttgagactgccatggtttatccatggtgcttcctgcccaccctctccccagccgcccgtttcaagccatgctgcccctctcagcctgtgagaattggctgtgctacctcttctgttccgcaacaccacagtggtagtttgaaatcggccacgggggaaatatttacaccagggaaatgagcagattggaggactcaggacttttccgagagctggttattagccatttaccagcacatcaccaacctatgctatttataaaccaccttctgccaacctggagtccagcttagcttcgtgtcaaaacgcaacctgatgctgactcagatgggcaaatcatcattacttattttttattctcacacacaagtaactttagaaaggactaaattgtaaaataaattttttaaaagaacaaaagaaatacgggtttcccccccatagagggaaaggcccatagaaatgaaattttactataaaaatgcaacaactggccaggcgcaatggctcattcctgaaatcccagcactttgggagcccgaggcaggtggatcacttgagaccaggagtttgagacaaccctggccaacatggcgaaaccccgtctctactgaaaataaaaaaaattagctgggcatggtggtgcttgcctgtactcccagctactggagaggcagtggtaccggaatcacttgaacctgggaggcagaggttgcagtgagccgagattgttccactgcactccagcctgtgcagcaaagtaagagtctgtgtcaggaaaaaaaaaaaaaaaaaaaaagcaacaacttgtacatccttcaaaacacaccatatattatgattgtcgcatctgtgagtgtatgtactgctaatttatattacgttagtcctaggatctttgatggtaaagttgagaatcaccgaagtaaatagtgtaaactctttttctactaaaactacaagatcctgatggaaaatttatttagcctaatatgtttgttatggtttcattgtactgaaaattgttatatttgaatttttttaacagatcaggatcctcatgaccagccaaagagaagaagaattaggaagcataaatcaaagaaaaaatttaaaaatcccaataatgttcttatagaacaagcagaattagagaaacagcagagtctgttacaggagaaatctcagcgacagcacacagatggcaccacaataagcaaaaataaaaaaaggaaactgaaaaagaaacagcaaattaaaaggaagaaagcagccggcttggcagcaaaggctgctggtgtcagtttcatgtaccagcccgaggacagcagcaatgaaggggaaggcgtgggagaggcttgtgaggaggatggtgtggacaccagcgaggaagacccgacactggccggggaggaagacgttaaagataccagggaggaagatggtgcggacgctagcgaggaagacctgacacgggccaggcaggaagagggtgcggacgccagtgaggaagatccgacaccggccggggaggaagacgttaaagacgccagggaggaggacggtgtggacaccattgaggaagacctgacacgggccggggaggaagacggtaaagacaccagggaggaggacggtgcggacgccagcgaggaagacccgacatgggctggggaggaagagggtgcagactccggggaggaggacggtgcagacgccagcgaggaagatgatacaattaccaatgaaaaggcacacagtattctaaattttttgaagtcaacacaggaaatgtattt

SEQ ID NO: 39834 - DNA, 2300 bp, Homo sapien
ctcagaaagcctgtctaacctgcgatgtgatgagtgccacagacaccgttctggtcaaggatagaagacaagtgagaaggaaaaagttcccttcacgtctcctagatacggggttacactaagcatgcttttcccatgggacaaatccgtgtattccatgttcttttctacatttttcccatatggcttaatgttttcaaatggtacaagctcccagtgtagtaggataacgttccaattaaggagtaaatgactgcttttgcacatacttttgccatttaaagaatatacttattataggctgaattgcgctccccgcctcacagccgccaccagcaaatttgtatgttgaagccctaaccccccatacttcagaatgtgactgtgtttggagatggggtcctaaagttgattaagggtcaatgaagtcgtcagggtgcaccctaatccagtattactggtgtccatattagaagatgagatcaggacacacatacgtagagaggcttgaccctgtgacaactgagagagaacggcgtctgcaagccaaggtccaaagccagccctgctgagactatgaccttggccttccagccttccgggctgtgagagaacaaatgtctgttgttgacttcgcccagtctgtggggctttgtagtggcagccctagaaagctaatgcactgtccattgtgcctgttagaaattttcttgctttttcaatcagtataacaaagtttttaaagaaaaagcaggtaatgaaaatctgaaagaagcaacaaaaaagacttctggaactaataaaggattatagtggggttgtacgatacaaagttaatacacggaagtcaactgctttcctatatgtcagcaaagaacaagtggaatttgaaattaaaaacacccagcactttgggaggccaaggtgggcggatcacagggtcaggagattgagaccatcctggctaacacagtagacagtagaaaccccgtctctactaaaaatacaaaaaattagccagtcatggtggtgcacacctgtagtcccagctactcgagaggctgaggcaggagaatcacttgaaccctggaggcagaggttgctgtgagccgagatcatgtcactgcactccagcctgggcaacagagcaagactccgtctcaaaaacaaaacaaaacaaaacaaaacacggtatcatttatattaccacccccccataataaaatattttagtgtagatctaacaaatgtgtacaacatctatatgaagaagctatagaactctgatgaaagaaatcaaagaagactaaaaattgaacagatattccatgttcatggataggaagactcgatattatagagatactcattcttcctaacttgatatacacattcaatacaatcctgattaatatcccagcaagttattttgtggatattgataaactgattctaaagtttagatggagacgcaaaagactgagaatagccaacagaatattaaaggagaaaaacaaaataaaggactggcattacatgacttcaagagttacttaccagaaatctacagtaatcaagacagcgtatttttggcaaaagagtagacacatagattaatgggacagaatagagagtacagaaatagacccacataaataccactgacttatctttgatacaggagcaaacaaaggctattcagtgaatgatcttttcaacaaatggggctggcacaactagacatccacatgcataaaaatatagacacagaccttaaacctttcacaaaaaaatcttactaaaaatggatctggactgggcgcggtggatcacacctataatcccagcactttgggaggccaagatgggcggatcacgaggtcaggagatcgacaccatcctggctaacatggtgaaaccctgtctctaataaaaatacaaaaaatcagctgggcatggtggcgggcgcctgtagtcccagccactcggtaggctgaggcagaagaattgcttgaacccaggagcagaggttgcagtgagctgagatgttgccactgcagtccggcctgggtgacagagcaagactccatctcaaaaaaaaaaaaaaagatcttacacctgagtgtaaaatgcaaaactataaacggttagaagattacttgggaggcaatctaggtgccctcgggttcagcagtgactttttagctacaacaccaaaggcttgatcaatcaaagaaagaattgataagtagatgtccagttgataacctggacatcattaaaattaaaatcttgtgctc

SEQ ID NO: 39835 - DNA, 2300 bp, Homo sapien
cctcttgcttcatccacatcattggagaccagtggttcgttctttgacttggcttcaggaccttccttttctccctggccacccttcatgtaccacagcttgggccccctcatctccccacctctcaaaggccagagcccctcggggcttattccttggaccactttctaaagttcacgcctgctcccttcatgacctcatatgcttactcatcttatgagcacctcaaacttgacctgtctaaaactgcacactaccaccaaacgaagatccccagaaggctctccacctcctcagtgcaactccagccttccagtttccaaacgaaaaatttacagccattctacatttctccttttctgtcacagcccagtttgatcaatcggaaaatctctttggctttaccttaaaacatgtccacaatccaactagcccccccacccagaacctccagtgccaccacttggatgtgagctgtcagcatctcttattgcagcagatgaaatctccacacttccttccatgcaactctagtcatcacaacgctaaatgacttctttaaaatgtacatcaggccatgcacagtggctcatgcatgtaatcccacacattgggaggctgaggtgggaggattgctggaggccaggagctggaggctgtagtgagctgtgatggcaccactgcactccagcctgggccagagtgagaccctgtctaccccaaaaagaaagaaaatgcatcagatcatttcacccctttgctctacatcgtgtaacaactttccaccctgcttcttggaacatgcaaagttatcaggctccctgcagaccctgcctgggtctgggtctcctttcctcctgatctgagctccccttatcctgcccttgcttctggtccccaaactcaaacagggcagccgttctcctgggacatcgtttccctcctgtgggctctctttccctgggcacccccagtcttgctccctcacctacctcaagcccgcgcccatcactctacagttaggccctaccagcttcattttcctccaaaacacccatctccgtgggttcctctcctgagacagcccacatgaggaacagcgcctggcacacacctgggaaatgttttggaagaaacgaattcaaggaggagggtcctgagggggtggagcgggagggcagaggcccttggagctggacagggagacaagaaggggtctggcaagccggggtgacgtgggggccgctgccctgaccactccctgtgtcccacaggtgcctgggggccagggacaccgccctggccatgccctgtgtccagcaggtgcctgggggttggggtcaccgccctggccactcatgtgtccagcaggtgtctggggaccggctggccattccctgtatcctgtaggtgcctgggggccagggacaccgccctggccattccttgtatcctgcaggtgcctgggggccggggacaccgccctgcccactccttgtatccagcaggtgcctaggggctaggggtcaccgccctggccactccctatatcctccaggtgcctgggggctggggtcacagccagggccactatccgtgtctcgcaggtgcccggggaccggggacaccgccctagccactccctgtatcctgcaggtgccttggggccgggggcactgccctggccattccctgtgtccggcgggtgcctgggggcgaagcggggactggggatccgcaggtgcacccgtggggttgggggtgggcgcctctcctctggggccctccgttcccctcttctccacaacgccctccctagcgttcgcccccagagttccgccaccgcgtagagcagtcgccgccagcgctctcacagcgtcctcaggtccccaagagcccgcaccgccgcccccgcagccctccctccgcgcatgctccacagcggggctcccagaggcgggtctggagcctcgcgacacgcctacagactcgatatcagccaatctacggccgtgatgtagttgactgaccgcccgtggcggggtcccgtattcggattgggcattcctgctgttgtgggcggacccaggagggcggaacccggaaggcacggcgctcagctcaggaccgcgcgccgtggtctgaggtccgcggcagggtcccgcatggcggcgcacaggaagcacggtaggtgggtgcggtgcggaggcctgcccagaccccagacccggctctcggctcagaccgcggtgttgactcgggaccccgaccccggcccctttccaggccccaccccaaac

SEQ ID NO: 39836 - DNA, 2300 bp, Homo sapien
gtcttcaggcctgctcttatctccctaaatcctgttcccagggccatggcagaggccacctctgatgccaccctcaatgtgctctcaggtccccgtgcactcccctgctggttggcctctggactttctttgaagctttgggaggtgctcaacttggggagtggggtgtgtgggtgaggagcagccctcagtcactgggacctagaagctgaaaagctgtccagccttcctaagctgacgtgcactccaagctgctcctgttagagcaccccagcaggacggggccccggtggccacaggagcagcccagcgtcaccgcagcctctgggacgtcctctcctgccctgcctctctctccctacttcctctctctagtttcctgggatcgatctcccaaatgaactacctgcacccaaatccacacctcaaaacctgcttgtgggagaacccagggggagatttaataacgacgtcctcaaaaagttcttttctgatgtcacaaactgtatttgttgcccttttcacattcaccaataacactccatatgtttccttcagagaattataacttgtaattgtctgttccttgggtaacttctgggcggatccctctctagactgaaggcttcatggggcggcaaccgtggttttctgtgctgctcacacgctgagaacacaggagaggccgtcagtacatttgtgtgattttcttgttgcggttgcatgaaataatatatatatatatttttaaaaaacgtgaagggatggggacgaaatgcaggggaggaaagcaaagggaaagtaaattgtgaaatgaaaataaattggcctggaatctctccctagttgaggtttgggcgctgaatgcaccttttttttttttttttttgacagtggagaccactgatagattcgggaaacatttagaagaaatggacagcggccggacttctttctcccattcacctttctaccccctcgtcgtttagcactctgccttgaaaataaactgcaactgatgaatattttggtgatcaattatacggggaattcttacagagcctgttttttgtttaaagatcttggaatttctggaaaagattggtttgtccattccaaatattttggatgacctgatttcattctaactcccatccgtctttctatgcggtttgttttcgcatcttttacctcatttaaatgccgtagccatgcaggtggaaagcagaaatccatttctgcgtttatgttaaactggggctgagagacttgcccagggtcggtgaccgcccagggatccccataccagcgcgtctagctcccgcgttccgatcccggaagggaaaacccatgatcctggcgagggtccgtccacacgtggccagggtggctgatcttcccggctgctgtggttgtcaacaccacttctccggatcgattttcccttttcctcggctctgtcgtccatacgccactcacagcaaacccaggcggcgggccccctccgagggcgctccttgcgtccggacccaggttctcggggcgccccccggtgggtccccgcgaagccgccgccgcacaccttcctcagcgtagcccgccagtggaaaccgggggaggttctgcctccagcacccaagcggcggccgcacctcgcagtgagaccctcgcaagcgcccgcgcctccctcgccccgcgtcccctctgccccgcgagcccccctgggcgccgagccgactcgaacccgagcgcgagtcccgcgcacaaacgcgccggcgcgtctctaacagcggtccagaaaggctgaccctgcccgggggcgacgggtgtgaccgggtcccccgctaactttcgggcgcggtgagcgtcgcctgcgcgcgccgcggtggaggccgctgctttcccgccgggagcccggcacagtccccgggtgacccgcgcgccccgcgcaacagttggagccgggctgcccgcgcgctccccaagccgggcccttccccagatgcagccgcgcgccggccgccccccagtgcgccggtgcctccctgggcgccgagtgcgcaggcgccggccgtgaagaccgaccgtgcgccgggctcgagcgcggtctgagcgcgcggcgcctgcggcggcgaacggacggacggaccgcggacggacgtactgaccccaacccgcgagccccgggagccgtcggtctgaggaggggccgcttcgccatgtcgccccgcacctgctgagcccggagcgtccgaggatgtccgcgctgaggaaggtgcgagccgccgggggctgccggg

SEQ ID NO: 39837 - DNA, 2300 bp, Homo sapien
agaccactgatagattcgggaaacatttagaagaaatggacagcggccggacttctttctcccattcacctttctaccccctcgtcgtttagcactctgccttgaaaataaactgcaactgatgaatattttggtgatcaattatacggggaattcttacagagcctgttttttgtttaaagatcttggaatttctggaaaagattggtttgtccattccaaatattttggatgacctgatttcattctaactcccatccgtctttctatgcggtttgttttcgcatcttttacctcatttaaatgccgtagccatgcaggtggaaagcagaaatccatttctgcgtttatgttaaactggggctgagagacttgcccagggtcggtgaccgcccagggatccccataccagcgcgtctagctcccgcgttccgatcccggaagggaaaacccatgatcctggcgagggtccgtccacacgtggccagggtggctgatcttcccggctgctgtggttgtcaacaccacttctccggatcgattttcccttttcctcggctctgtcgtccatacgccactcacagcaaacccaggcggcgggccccctccgagggcgctccttgcgtccggacccaggttctcggggcgccccccggtgggtccccgcgaagccgccgccgcacaccttcctcagcgtagcccgccagtggaaaccgggggaggttctgcctccagcacccaagcggcggccgcacctcgcagtgagaccctcgcaagcgcccgcgcctccctcgccccgcgtcccctctgccccgcgagcccccctgggcgccgagccgactcgaacccgagcgcgagtcccgcgcacaaacgcgccggcgcgtctctaacagcggtccagaaaggctgaccctgcccgggggcgacgggtgtgaccgggtcccccgctaactttcgggcgcggtgagcgtcgcctgcgcgcgccgcggtggaggccgctgctttcccgccgggagcccggcacagtccccgggtgacccgcgcgccccgcgcaacagttggagccgggctgcccgcgcgctccccaagccgggcccttccccagatgcagccgcgcgccggccgccccccagtgcgccggtgcctccctgggcgccgagtgcgcaggcgccggccgtgaagaccgaccgtgcgccgggctcgagcgcggtctgagcgcgcggcgcctgcggcggcgaacggacggacggaccgcggacggacgtactgaccccaacccgcgagccccgggagccgtcggtctgaggaggggccgcttcgccatgtcgccccgcacctgctgagcccggagcgtccgaggatgtccgcgctgaggaaggtgcgagccgccgggggctgccgggagccgggcgcggggctccgagagccgtcgaggcggggagggcgcggtgtgtcggacccgcggggacgccccgagggcgtcagggttgggggcgggggcgagcgggggtcgtgccgcccgccggggccggagcgctggggaccccagggacagcctgtgctcgggggtcgcgcgttgcgctcctcgccgggctccgcgcatccctggccgcgctcgggggtgccgggaccctgggctccgggggtgcgggagcgcacggggccgcggaggtgtgaaattctccgctctgcctgcccggggtggagggggcaaagcctggggggtgccggcgcgccaggggctacgcgcctagctccggtggggcagctgcgagcgagtgggggcggcgggcagcagactgcatccccctccccccaagcccgggtggaaacgccgacggggactgggaatgaatgaagggtgccgggctgggctgcgcgcacgggggctcgcgggggcgggggcgaccaggatggggcccttgtgccgggcagcagcggctgccgagaccaggcggagtggagggtgcgcgcagcgagggggtggccgccgcccggctctccaagtgcgagcgaggagctcggggtcttttttaggggtggttgctaagcgaggcgctacccagcgcagggttttgtaactaagcctcccccggcagcggctgttgctgtctccggctccttcgctaacgattgcaggagaaataatgaggatgtaattattacagccctgcgcggagggctggggggcggcggacgcgggctcctctgcctgcgcgcccaggtggggctgggctgggctgggctgggctgggctggactggacgcctctccccgcccggccctccctcagcgcgcgg

SEQ ID NO: 39838 - DNA, 2300 bp, Homo sapien
aaaaatgacttagagcaatacacttaatcttacttattgcaaagtagaatctttcttcttaaaacaattcaggaaagttaagcgacctaggatagggatttttacttttcagaaaattaataggcgatcttcatttgagctataaaactctctcagagtagtcatacatctacatggagttagcttggctgtgaatctcatttattcctcagttttatgtaggacgtttgccccgataatttgactggttgtatctctatctctgtaaatagagattcttatttctcagattgttctgttttggaaacaaaattacaatgagaaaacttgaatgcaccaatagaaataaatgcaaaagaacatttattttctcatcctctccttaccatttcatctctctttttttttttttttttttttgagatggagtcttgctttgttgcccaggctggagtgcagtggcacgattttggctcactgcaacctccacctcctgggttcaagcagttctcctgcctcagcctcccaagtagctgggattataggcgcacgccaccacttgtggctgaacacacacacacacacttttttttttttttttagtagagacagggtttcaccatgttggccaggctggtctcgaactcctgaccttgtgatccacccgcctcagcctcccaaaatgctgggattacaggtgtgagccactgtgtccagtccatctctctttttattggaaacatatgccctgtcactttgttcccagaaataaaccgtgaagtgtcacagagaaaatataaattctcccacccaatatccagtctggttgaatttattcattccaggatatctgagtcccctgccatgcaaactcatagcctcgtgtggtatattccacctttccagagggcataagtgctcacctgtgtcctgttcattctgggcactgaattgtgtgccattggtcacatgatatcacccagtccagaggcttccctgtaaatacttgaaatggctccttaatagagaacttaagagaggcgtcagtgatgctccaaatgagacgtgagacccagctgaggcctgagacatgaatgagacatgacggggatttatctaatttagttagcacatcatcagagatctgcggaggcctctcctgcgggcacccgtgcctggcccagcggcacctctccctgcggaggcctctcctgcgggcacccgtgcctggcccagcggcaccgctccctgcggaggcctcccctgcgcgcaccctcgcctgatccagcggtacctctccctgcggaggcctctcctgcgcgcaccctcgcctgatccagcggtacctctccctgcggaggcctctcctgcgggcaccctcgcctgatccagcggtacctctccctgcggaggcctcccctgcgcgcaccctcgcctgatccagcggtacctctccctgcggaggcctcccctgcgcgcaccctcgcctgatccagcggtacctctccctgcggaggcctcccctgcgcgcaccctcgcctgatccagcggtacctctccctgcggaggcctcccctgcgcgcaccctcgcctgatccagcggtacctctccctgcggaggcctctcctgcgcgcaccctcgcctgatccagcggtacctctccctgcggaggcctctcctgcgggcagccgtgcctggcccagcggcatctctccctggcgtcagcagctttcctctccgttcccctccgccccgtggtgtcgtcacttctcggctgctcacgctgcgacgttgttttgttgggtcggatctctgcatcggtctgggcatgggtaactactcaggattaatgtcagaagttgagtttttgttggtgacactgacaagctttgtttccctccctgtgctccacacgggctctggtcctctaacacaatcttcctgggtcccgtgctctgcagggccaggtcagatgatttcctgagcagtgcgtatgtcctgtgatgtcctgtgttgctggaatggagtggattcttctctctcagtgaggaatagctttctgattgtgatctcagtggaagtcacgtgctgtacccaccactgggcagaccttgctggccacggcctccacgtgcagtgaccgttctcttggcagcgtctcaggctgtctggaccagctgtcacagtctcgctgtgggtgagtcacctgaggcactgtatggcggatagaaggattcattgccctgggaggtaagcctgggcctacattggcctagggacagttgtgaagcttatcttg

SEQ ID NO: 39839 - DNA, 2300 bp, Homo sapien
aaatgttcatgtagcaaggggtacttagctttcgataaattaccctgcttgcttttgtcgatcatcttccttcattctctctcctgccacttcatcagaagcacttccgcactgtatttatctttaaggtgtagccatataaatttaattattattggattaagaacaattgtactcatcttttttctcatcctactttcttcttttaaaacaaagttggcttcagaccctctgttgttaacaacatgaatcatcactgaagccgttttccttacatctcctgcttttgctgaaagtgtttaatgtttgtttttggtacatgtgggttgtcattttttaaaaaatctcatgtacaactttctgcatacgtgaaacctgggcacttgaaattcctcctcgttccaccaggttcaaaggcttccggagtgagacatctgtgtcgtcttcatcatcagggccagctgcacctgccaacctgggtgtggggccacggtggccggtgtcctgtgtctccatagcccatgctcagggctcctacaggaagagtccagcgtggacacaaaagctgtcagctctcagttcctttcaaggacacgctggcctgctcccatggaacattccagtggcttcacttgcaatttcatgaatattaaaatggcctctgccctgaagaatgcagtaaaacccctctcccccaattctgctgctgacctttgcagtctgagaaatgagctgtctggaaaaggctgagtggctaagcagccttccagggtctgcactctcctcacaaatggaaaaattacctcttcccttctgtgagagtgcatcagcggctccatttacgagggaggtgaatggcctcaaaatcccatctccctccacctcccaggctctggccagaggcaggccatccagacctgcagggtgcctcccgggagtcccgccttctcctcagcgcagcgcagggctggacgagcaccggatgcaggattaatttagcccctatgagaagcaaaaccccagagaccagaggagaaaatgcctgggaggaagcacccgtgcctcccaaggagaccctgggccttaggtcttcctgcgggctcctgagtgttggggagttaggagtgtgttcagaggcatggatggaggactttctactgattctccgttaagagagagttacacctttaaaaataaaataaataacgcattaaacctaatggataagaccagggcagcgcacagcccagcagggtctgcgaagctgagatcttatttccaggtcgaagctccttcccacccatgggaaatcttggaggaaaacactcctcttctccttcctttttttctttttttttttttgtttttgagacagagtctcgctctgtcgcccaggctggagtgcagtggcgcgatctcggctctctgcaagctccacctcccgggttcaaacgattctcctgcctcagcctcccgagtagctgggactacaggcgcccgccaccacgcccggctagttttttgtatttttagtagagacggggtttcaccgtgttagccaggatggtcttgagctcctgaccttgtgatccacccgcctcggcctcccaaagtgctgggattacaggcgtgagccaccgcgccccaccccttcctcctttttattcattggctttttcctcttccaaggacgctcgctcccctgcgaggtggagtccaggaacatccaaccatctgtgtccttacgaaggcccatcctcacagcctgcagccgacagctaaggaatgactcctgcggcgatggaatctccaaggacgtgcatgttttactgaatctaccaaaagcacggcagaaggaggcgagttacagccagacgttttggaaagtacctaagagctgtgaacagcaggaaagaatcgactccagcggcgccgtcaggcgtgggcctcctggggcgaggggaagagccaagctctgggcaaggtcgctccatggtccccaggcggggcaagagcccttcccttcgacctcactgcccgttacccgtaactggggtcatatcacaattctcataggacgatctgatgactaaatagaggactcacgtaaaatgctgagtccagtcccgggtatggagcagggctcgggaacctacagaaaataccgagtccggtcccaggtatggagcagagctcgggaactcacataaaatactgagtccagtcccgggtatggagcagagctcgagaattcacagaaacttccgagtccagtcccaggtatgaagcagagctcggga

SEQ ID NO: 39840 - DNA, 2300 bp, Homo sapien
tgtcattgcaactgggtgatgttggcccatccttcaagtccgccctgtgagagcccctgccttgtctctgtgtgcatgtgtgctgaaagtctggtgtaaggagggctgaggttgaagggcccattgttttagttcatccccaaattcctttctcacacagctggacgctctgttctcacattactcacacatatgacgatggtctccatggaaactgtagttaattagagctgtccatcatatttctacatgaatgagaccattccagtctgtggttttatgttatacttaatgtggacatttggcagatgtatttcattagctgaaaaacgcagcttaaactatgcaaaaagtgctgttagccttgaagaaatggggttatgttaaatcatttgagctgtcttgtaagatacttaacttaattcagatagctatttcttatacatgtgtgtttttttaaaagctgtaactgggagatcccatgaaatgaactcttagttcacatttacctgagaggcgaccgtatcctcttcatcagcatctcacattccaaatctgtcatcttcctttcccaaacctctacgaacttattgaaaatggcagatgccgatttgttgaatcagagatggtgattgcagtgtaagtggctccagcatcacactctgaaataaatccgtttgcagactacagcctggctaactgcatctaacacttgggtggggggggtgggggcaaatgtgagatgtgcctcaaagcctgtccatgaatattggaaacccacatatgtgtgtgaatacatgcctagagtctgaacatgcaatcatatttatatttggggcatatatgccaaaatggtgacaaagatgtgtgtacgcacatgtgtcatcattctgataccccataaataacatgtttacatgcacatgtaacgtggtgccaaattctcccttatctgatgctccctgcccccctcctcaggccactccccacaccactcactgtggctggtgtcgggcagagcctccctgagatccagctgtgtctacactgcctctgcagccaggtagaaaccaaggcagcctggagagtcggcacctggtttcctgggcagagcctccctgagatccagctgtgtctgcactgcctctgcagccaggtagaaaccaaggcagcctggagagtcggcacctggtttcctgggcagagcctccctgagatccagctgtgtctgcactgcctctgcagcctggtagaaaccaaggcagcctggagagtcggcacctggtttcctgggcagagcccactgggaggagagctacgggatgatgctcagtccagctcctcagggaccagttaaatcaagtgacaagcttgtctgtctccccagttccctgttgccccacacatggagggaagacagtgctcagtgaccccaagaccttttacagccacatgctgatgtcattctaagaaagtgatgtctgcttttgtgttagcacagatcgaacaatggaaaatcaatgccagtgacctgggtgatctcccaacagagggaaattaaatcagcgttttggtcaaagtggacctaatatgaactaatattaagcactaagatcacaaatgcaggctttgaacattgcaaaatgaggcttcgaatggcatgaagctttctagaccggaaggaaagtctttctcatgggcgatgcagggccctcatgggactcacccagctggaaggaaccggggaaaattagagtggactgattttactcaagtctgttccaatgcaaataaggcctaataaatttgaagttaggccagagttaaagctgagaatcattgggactcactgcctatgtccgtgtctaggtgggagaaatacgtgcatctgtggtcacaatgctgctttacagaaaacactggttgttcctgaggttattggcacaaaatgctgggctctgagcggtgacgtttgaagaaatacaaaggtgtctgtcatgtttgaactgttgagtgtggagggttttgaagatgtgcagggaatgactgcagtctacaccagaaacgcattaaagagtgactttgtttctgtctttgcagaggaagaagctggagacttggtccagccgggcatcagctttccggggccggcagaggaggatctaggtagagtacagacgtcagccccgctctggcggggcccggacagaaccgggcatgctccgggcacctcccatcatgcggaccgtcccacaaacacacgttagcatgtttagaaagggagctaagaagaactaagt

SEQ ID NO: 39841 - DNA, 2300 bp, Homo sapien
tgatggatgcgtggactcattctgtaagagaccactgctggcttcctttgaatgtgtccacgtgcctgtgcgtgtttaatacagagtcatgtgcagcggacgaagccccgagctatggagcccgagcagtgtggcctcaggtggatgccaagagccctgactgaggctcttaacttgactcacctttgtctttgcagaaatgtaaacttcccgcacttctgctctccttccatgcttccttgagattgctggtttcataccctccatttctaccaatcggcactttctaccaattaccaattttcttccaatacaacagccgttccttctgattaacaccaccgttttgcattttaacattctcaaattgaagctgccttctagactgagaaaacataaaagaaggattctcgtcctctggatctggtgtccacagtttctaaccagtgcctgctacgtgaacgaagggatcacctctgagccatggctcatcactctggcagtggctgctggacagccctcacaggtggatccatgtattttgtgagtctatgtttcaaatacatattctctcaatgattctctttatttcaaaatggagtgtgacacataaatgttgccgctgaagaaagctaataattttttttaaaacatagactcacaatagctaacattttctatgcaagattacgccagaaatgctaataagtgttttgcattgtcctaacacatttaatgtttacattagtcctataaaccaggcctcttcccaaccttcctcctatgaatgcagcatcagacgcacattgctgcaaggtcattgtgcactggtgccaggtcatcacacactggtgtcaggtcatcacacactggtgccaggtcatggcacactggggccacgtcatcgcacactggtgccaggtcatcacacactggtgtcaggtcatcacgcactggtgccaggttatcacgcactggtgtcaggtcatgacgcactggtgtcaggtcatcacgcactggtgccaggtcatcgtgcactggtgtcaggtcattgcgcgctggtgtcaggtcatgatgcactggtgtcaggtcatcaagcactggtgccaggtcatcacacactggtgtcaggtcatcacgcactggttccaggtcatcacgcacaggtcttcacacactggtgccaggtcatcacacactggtgccaggtcatgcactcaggcttgggcgggatgggggcagcactcccttctgagtccaggtggcctggctctggaattcatgctttaaaatcccaaggtcactgggattttaagcactcaagatgctgagtcataggaccacagagccaaagatcccatcctctgataccacagactttttaaatagttaaaaaataacaaataaaacctcagcctcatttggcttaagaggctttttaaaaaatattataatggcttagcattttatcatatagagtcccagaaggccaggttcctcacagtcacagatcaaaactcaagaactaggactagggggagccaatcaagatggggggatgcaccctccggtggccccgccaggtgacacagggtgaagtccccagcacggctcactccacaaaatccacctgactcttccccctgaaaatccccctcctacatcccggggcattttgaagttgactttcagcccctttggttatctctctaagtggtaattcctgcggcatcccaggtgtcagaaatggaaacatattttgctatatggacttagtagctcagaatttttttttaaatagtgaaaagttttctagaataacacagaaatgtttttgttctagttttgcctttcagatgttgctccccttagattgtcatccacaaacaggcgagacggaaagctgtgcaagtgaatccataaccccaagacagaactgcaggattcctggtgttcaaccttgttctcgccctttgcgaatggttccagagctgcttgctgaatcctgggctcagaacctcctctgtgacttaggtcattatgagaacgaatatacataacaaagggtacccctgaaagggcctctgaccccagctgtttagatccatctaaacatgcttgaaaatacacaacgtaaaccatctcccttgttaccttggaaagcagtaaggattctatgcaggttgtgctaaggagatatttaagaaaatttttttccatactaaatgtgttcatttgaaatacagagatcatcttctcatttctataaatgggatctgacaggagaagctcccaaatat

SEQ ID NO: 39842 - DNA, 2300 bp, Homo sapien
ctgggagcactgaggggtcagatcagagatgaaatcgtatggatcaaagctgtcctcttggcctgagccggttgctgagtgcgggccacaagatcagatgagccagtttatccatctggatggtcccagctaattcagcaagtgcaaggtctgcaaaatatctcaagcactgttgttaggtttttcaatagtgatgttatccccaggagcaatttagggagggtcagaatcttgtaatctccagctgcatgaattctaaaccataatttctaatcttgtggctaatttgttagtcctacaaaggcagtctagtctccagacaagaaaaggatttgtttcgggaaaccataaactaagtttcttccaaagttagtttggcctacacccaggaatgaacaaggacagtttggaggttaaaagtaggatggagttggttaggtcagatctctcactgtctcagttataattttgcaatggtggtttcactggttttaagatggagtttattttattttatttttatttttttgagacagagtttcattcttgttgcccaggctagagtgccatggcgtgatctcagctcactgcaacctctgcctcctgggttcaagcaattctgcttcagcctcctgagtagctgagattacaggtgcccaccaccacacccggctaatttttttctcccaaactgctgggattacaggcttgagccaccgcgcccgccaagatgggttgttgattttaaaacgatgtcaccctggctctcctaggttcctgttcccctaacatcatgaaggctgctggcagttctctggcctccagggaggcctccacacacatttacccatgttcttagacaatcctagggactcaaggcttcaacaaacctaaatgagccagcagaaaaataaacttgaacatgaatgtcaacgttttcccacatgtactaaagggttataataattttgaaatgtttatttcaaagagcgttggtaatttaaacgtcctatttaatccccaaaacagtcctgagggggagataaggcagttatcttcatagtacaggaaaggaaaaaagcgagggtccaaggccgactataccctcagctccattagcccccgaggcctccctgacaggcggggcggacaatcccagtgcagatgctctgtatcgatcgcatgctatcggttctttcaaggaacgtgtattgatcatcaattaagtggtgagtactcctctagatgtcgattctaaagagggaacaaaacacattagacagaagaaacataagtaactcgaataacaaccttagagagaagaaacataagtaactcgaataacaaccttagcaaactgcggaaactcctacagacaaaaactcaggtgtgggcgcagaagggccggggatgcgctcggtcaagacttgaaggtccggggcttgggccctgtgtcctcaccgagccccggggaggctccggctccgtccacacccggagcgcgactcagccgcggccggggctcttctggagaacggcgcggtcaggctctgccgcagctttcaggtcccctcggccccgtccgggtgcagcgcaaccaggctgcccgcggagccccaccgcccccatgccgccgcccgccatggttcagcccggccccgcccctcccgccggccgtggttcagcgcgtccaccccgccgccccacagcgcccgccgcgccgcgccccgccccccgccgcgccccgccccccgccgcgccccgccccccgccgcgccccgccccccgccgcgccccgccccccgccgcgccccgccccccgccgcgccccgccccccgccgcgccccgccccccgccgcgccccgccccccgccgcgccccgccccccgccgcgccccgccccccgccgcgccccgccccccgccgcgccccgccccccgcgccgcgccccgccccccgccgcgcccctcccgcgcccgccgccccgcccctcccgcgcccgccgccgtcgtagcgcctaggcggggcctctcgtagcgacgcccccaggggggcagaacgcgtgcgcacgcgcgtgcgaacgcgcgtgcgcgggcggtgtttgaggccggccagtcgtgactgggcggcaatgaggtcagtgactgccgggagtcctgcaggggcggggcggcgccaagcgcagggagcccggctgagtggcagcccaggtgagcgctcagggagcccgggtgagggccgggaacccaggtgaggggcagcccaggtgagcgcgcggggtgcccgggttaggggccgg

SEQ ID NO: 39843 - DNA, 2300 bp, Homo sapien
ctaattgacatctgtagaactttatgtcagtgaaagcatgttctcagcaagtgctcatagaacatttaccaaaatagacaatgttgggccatgaagcaagtgtttgaaaatcttaaacgacaaaaataaaacagctgatgttttaaggcccggtggaattaaactttagttacaataaaaagaaaaccagaaagtccccatatatttgaaaggtgaacctaacttttctaaatatcccatgggtcaaagagggaatcacaatggaaaatcccaactcttccatatccgggcttacgaaaatagggatgtatctgtgaggaacgcctgaataaagcagacagacaggatctattggagctccaaatcaggggattttctgcccaacctgcctggaaggcattgctctgtggccctactcagtggtgtccctggcggccctgagtttaggggctcaatttcatccattgagaaaatgagttgtttattccatacacaggactatttcctcttatctctacctttttagaaaacactacaagtatcaggattttctcatcgtatttaggtaaacaagaactaatttagttgaccttcttacttctgttgatcaagaccattgatctgaccattgatctgtgcagaagatctctgaataaggtacccagagaaccctaggaatagaaacctgaaataagttttctaatcttaaggtcgctgagagcaaatacctttttcaattgattcataaaaacaactcagtctgatttcataaaattagcaagtgtgaataataaacattgaaaaaatatcaccttacctacgattattttttccagccattgtagtctttctatgttggctatgatttttacatagtccaaaattttcagggaaataacttattccagagcacacaagccttaagggcagttaatgtttagattaatttcgtgatacttagcatcccaaatagctgtttgtatttcttctataaaacaagtgaaaggggctagaaatctctaagaagtctgacagttctaaaacactgacttaaaattacttctatgattcggagatttgggtaggagaaggcatagaaataaatctagcatctgcgaacacacttgttaaatgtgctgaccaggtaaaagataacatcctttagttattttggttaaaaatgtctttgtttctcgtttttttttttctttaatagtaattataacgataatctgtttcctttttaaaagtataagacaaataaatgctcaaagtaaacaattccaataactcagaaggggccattccctggaaaggtcccgggaaaaacgagcgcttcctggcaagaagcaagcttcaaaaactgcctcggaaacgtggctgaagtcatcgcatttccaaacgcccaagccttggctggtccagggcagctggcgcggaagacccggaacgccctgtgggcagggccagctgcggacggagggacgggggctcaagggcgggtcgggtggggtcccgacgccccctcctcggctgggcgcaccccgggtgtccgcagggaggggcgatgttctgggggggggagcgtctgcccgacgccccctccctcaggtgagctcagcccgtgggggtccgcagaaagggcggtgctctgggagagggttagggtctgcccggcgcaccctccccaaggggcgcagctctgagccgggagcaggctctgcggggaggatccagatgttgggggcggggagggcactcggtctgcccagcgacccctcccgaagtgagcgcggcccggggtccgcggggcaggagatgatccgggggcgggagcctctgccgcgcgccccctcccacgcgtgcgcagcctgggccgggcgttgggcagcgggagggggcgcgggcggccacgtggcctcgaaggaatgcgcgggcgcgagggcagggcgctgccgagaaaccggcaggctctgcggccaatgggcgcccggaacggtctgggcccgccaatgacagcatggtgggtggagcaggccgtccgggcgggaggggctgggcgcatccctgtagccggcgggcgcgcgatccgggacggacggggtcgcgggggacgcgggggacgcgggggacggcggggaacggcgggggacggcggggaacagcgggggacggcggggaacagcgggggacggcggggaacagcaggggactgcgggtcgcgtcctggccgccgaggtgagtgcgggccccgcggaccgtgggtcccctcgcgggcttctggtttcctttgagagttg

SEQ ID NO: 39844 - DNA, 2300 bp, Homo sapien
acggcggggaacagcgggggacggcggggaacagcaggggactgcgggtcgcgtcctggccgccgaggtgagtgcgggccccgcggaccgtgggtcccctcgcgggcttctggtttcctttgagagttgcacttctgcccggctcccccgaaatcgctgggtcccacccggaggtggctgcgcccccgaccccctgcgcagatgtttcagggaaggggctgagaccccctccccccgagcagctcccccttccgcggcgcccccggcccctcaggataacggcgcgggcctgggcggggggagcagggactggcagcagggacccctggccccaggggcaggagcgaactccgatcggcggaaggagcccgaggggcgagctggcttcgcctggggggtcgtgcagtaacttagattttccggtaaaggagaagaatgcggtccgcctcaggatgcagagaaggaccggtgtaaggaaagccggcgtctttcccccgcaccctacctgtccccctaccccaccagttccccgcaccccgtgtaccccgcctgtccctcagcaccccctgttcactctgcactccaccagttccccgcaccccagctgtccccccgcaccccacctgtttaccctgcaccccagctgtcccccgcgccgcagctgtcccccccacaccccacctattcccccgcaccccgcctgtccccccgcaccctacctgtttattctgcaccccacctgtcccctcgcaccccacctgttccccctgcaccccacctgtcttccccacaccccacctgtttactctgcaccccagctgtccccccacaccccaccagttccccgcaccccgtgtaccccgcctgtccctcagcaccccatgttaactctgcactccaccagttccccgcaccccacctgtcccctcgcaccccacctgtcctccccacaccccacctgtttactctgcaccccagctgtccccccacaccccacctgttcacccgcactccacctgtccccccgcactccacctgtccccccgcaccccacctgtcccccctgcacctcacctgtccccccgcaccccacctgtccccccgcaccccacctgtccccccgcactccacctgtccccccgcaccccacctgtccccccgcaccccacctgtccccccgcaccccacctgtcccccgcaccccacctgttcacctgcaccccacctgtccccccgcaccccacctgtctccccgtaccccacctgttcccccgcaccccacctgtcctcgcaccccacctctctccctgaaccccacctgtcccctgcacctcaactgtcctgcaccccacctgtccccctgatccccacctgtcctctgcacctcacctgtccccctacacctcacctgtttaccctgcaccccagctgtccctcgcaccccagctgtcccccccgtactccacctgttcccctgcaccccacagcccgctggtgcccaagaagccaaggtagattctgaggaaactgccctaggtccacagacgccctgcccacctgtcccagccccactccccttccatgggcccctgggcactgaaggtgaggtctgagtacccctcccgactgtggccagtaggtcatgttcccaggcagcagtagacgaacttgctgttgtctgatattgattccagtcactaactttggctgcaagtaaaaattctcattgactcaagatgtaacgggttttaattcttttctctggttaaccataacctgagtacggactggtcagtattctagattctgtgcaggagtgacttaatgtccatatgggtggaatgctgcaaggaggaacaatttcactgttgctgattaataatatgttttgaacacctgctttatagaaaataatttttattcgaaaagagagatgattactgaggtttacacgtcatgtatttttaaaaacacactttgtccctgtctgtctctcacagcatttatttgctggctttagcagccaacatcggcagttacggatgcataactctttatagacagatgagacctccaggatttctcagcagtaagaaaagtcatttgtataaggtgctatttgtaattcattagttgtagacagttgggggtgaagtgaagttaaaagttattcagaatagctttttatgtttttaaaagttgatgcttgacttccagatgtaaccacatttgtcttctgggtgctttggtgtgctgcctttcctctgcagtttgtgtgtgcatacgtgtgcgtgtgtctt

SEQ ID NO: 39845 - DNA, 2300 bp, Homo sapien
gccccctccggagctgcctgcagccgagctgggccgtcctgcttgggtgcatctccctggcccacgggggattgtctgtgttggaggggcttggtttgggctgacccaggctctgtcccgaggtgccacctgcttctgtggattgccgggcatggcagcaggaggtttcctcaggaacgtgtgctgggaagaaatcccagcccttgggaaaggctggcaggggctgggttcctctcgctcctgggtgtgccgggtggtgttgtcccagcacatgggtctcctctggaaaaaggagaagcacctgtctgctctgatggtggcacacagtcctagcacgccgtctctgcaaatgatgcacacggcaggctgcgccatcagccgtaaccccggtccaaggagacctgtgactcgcctcctgcaaaatgtttcttatcaagcacttacttggaacagttattaaccatgctctttaataattatggaggtttgtattttaagctatatatcggtgttcatatttgacactgattttctaaccatcagagatatttaattaaaattgtaaataagagaggcaaaatgaaaataaaaggagaagaattctagggagagatgcaaggtgtcagaagttatttctaaaagtaaagtggatgatactgaattctcttccagaccatcagcccagccgggtgatgttcatctgctgggtgcacagatttaaaatgtgaaaagctcttttttccccttactttctcttgttttcttttctttttttttttttttgagacagagttttgccctgtcacccaggctggagtgcaatggtgcaatctcggttcactgcaacctccgcctctcgggttcaagccattctcctgccccaccttcctgagaagctgggattacaggtgcccgccaacacgcctggctaatttttttatttttagtagagatggggtttcaccatgttggccaggctggtctcaagcttcttaccttgtgatctgcccaccttggcctcccaaagtgctgggattacagatgtgagctaccacccccagcctcttgtttcttctctgtgagttgtagatcctattaaaagaaaataaaaaccagtgactcagaattctaatgatacttattttgccccttaaaaaggttaactacaagcgcagtacagcacagaggaacttagtcagtgtctctggctaacatagatcgatcgatctatctatctatctatctatctatctatctatctatctatctatctctccttgatgtggttttggtttttctttttagaaaatgaaatgaaatatgataccaataataatgaagaggaagagggagaacagttcgattttgacagtggagatgaaatcccagaagcggacagacaggccccatccgcccctgagacaggaggtgctggagccagtgaagcccctgcacccacaggtgagtttccaggagggtccccaggtgagtccccaggtgggtccccaggtgagtccccaggtgggtccccatgtgagtcaccaggtgagttcccaggtgagtccccaggtgagtccccaggtgggtccccaggtgagtcccctggggggttcccaggtgagtccgcagatcaccggcatcagggtcacctgtgctcagccatcggactcgccgattttctccccattcttacggcccaattggaacattgtagggaaaggatgatttctaggagccagagagttatgatttcttcatgatgtacctgaaaggacttaatttaagattggctaagtttcttctctttgtactattttccataattttcaaccttttcactctacctttgtattttgcaaagaaaaagtattgctatttcccaataagaatgacctcatcattgtatcactagattaaaagaaatattcagaacatgtgggatgaagtagctgtagaggtttcgctttctaagtttggaggtgggttgggtgctttcattcgctgaccagagggactgctcaggtcaggcagtggtgggagagcctgcacagtgtttcttcctgtgtagcacccgcctctcagctcgcacggtgtttcttcaggtgtagtaccagcctctcagtttggcagcgttcctcttggctcgcacggtgtttcttcaggtgtagtaccagcctgtcagtttgcacagtgtttctctctgcttgcacggcatttctttgggtgcagcaccagcctctcggttgtttgcatgccgtttctttgtgcatagcacccacctcttggcttgtaccgtgttt

SEQ ID NO: 39846 - DNA, 2300 bp, Homo sapien
gtacagccaatgcctccataggccactttttaaatacgcggggctaagggccaacgacaagattgtcatcgaggacaataagtcgatggcgctgcctggtcactggcttggtcagaaaacacatgccagggtgactggatttaacgttcaattttagaaccacaaatctgccagcccaggcattcaagaggaagtgagtaattcactgaattgatggttagcaagacccttcaaagtccttggaagttccgtgtttgctgggggtcacaacagcaattgcgtttctaaaacattgaaaaccacccgtttttcacacatctgaatagcctgagttctaacagacctaagtaaaggcgtccaaacgtgcctgatcctgtggctgggtcccaggagccttaacaaggcattgagagagctggattgattgattagactcttgccaactgctgtgcggaatacagaaaatgcagctccagctctcaaagggctgaaaatctaattgaggtgaaaaaggtaacatgtgtgaaaaccatgtctgtgtagacttgttttgtatggaccagaaaagttggaagtccagagatggatgcgaggaaataggggatggagtttccttataacctctggagggacagtccagatacataccggggtgtgtagcgggtggaggttctaagacaggctggaggaacagtgcagacacacaccagggtgtgtagggggtagaggttctaagacagtctggagggagagtgcagacacacaccggggtgtgtaagcagtggaggttctaagacaggctggaggaacagtggagacacacaccagggcgtgtagggggtagaggttctaagacaggctggaggaacagtggagacacacaccacggcgtgtagggggtagaggttctaagacagtctggtgggagagtgcagacacacccggggccgtgtagggggtacaggttctaagacagtctggtgggagagtgcagacacacacggggctgtgtcggggatagaggttctaagacagtctggtgggagagtgcagacacacaccagggcgtgtagggggtagaggttctaagacaggctggaggaacagtggagacacacaccacggcgtgtagggggtagaggttctaagacagtctggtgggagagtgcagacacacccggggccgtgtagggggtacaggttctaagacagtctggtgggagagtgcagacacacacggggctgtgtcggggatagaggttctaagacagtctggtgggagagtgcagacacacaccagggcgtgtagggggtggaggttctaagacaggctggaggaacagtggagacacacactggggagcgtaggggtgcttttctctgagtcccctagtacatggtagaggctgtagaccctccgctcttgggcacgtgggtaggctctcaggatgactcttggctcttgggcatgtgggtgagctctcaggatgatgcccagccccaaatttcaggcaattgtgcaaggacttgacccattcatccgctgagctgagttgctgagactgctgggtgcccgggtggtgatcattgtccgtggcacacagaacacactgcagcttctgcaaagtgagctcatttcacgcattttatggctttgccaggctgctgttgacctgccagaacttttaatcagacatttggaggacctgttttgtagtcagtggagaaatattacaaggatagggtaatttgaaatatctaaggattgtaagtgacaagttcatgtctaattttgcatttccagtgaaagcaagtgttggctttgaatgttacttatgtgctgagatgtgtatattcctcagtgcttaattactaaggatttttaaggccaagttttgttacagtgaatgactgtggatgcataaagaataaatttaatatttttaaggcatggagattatttgtatctaagaaaccaggtaaaataaagaaacatttatgcttgtgtgactgataaaagagttagagagacactcatattctgggagtttgaagaatgtcattttcattctctaaaagtcttgttagtgtcacagcattgaaaatttaaaaatccgtgtgtattttcttgctagtgctggtacttgaatatctgtatcatccacctatccatccacctacccatatttctataatccaccgtccatcgacatgcctatcatctgtccaccatttctctctgtctaattttcaaaacatcctgtaagtttatataaaggaagatttttcttcttgtgaag

SEQ ID NO: 39847 - DNA, 2300 bp, Homo sapien
atatttgcatgcttcgagtctaccatgcatgatcaggctgtccctgaccaggggaaaatttacatagtaaaatagtattacccttgaaatagatttaagataggtcctcctttttcttgacagtattacaacccagttcaatttcaggaactctagaggtccctgcagttatgaagaactaattaaaggcatgaaatgttcctctgcaagtttcattgaccatattgggcctacagtccatttccaaataaatatctaaggtaagaaaaatatgggactccccacagactacttatctaccagatggtgtggggtttggatggatgttttcagttacttcagcaattttttcattaattcagtatttattgagaacctaatgtatgccaagcttgtaaaatgcagtggggggtatgacctattcccaggtctctggactctggcagaatggtagagaagatgctgtcgggcttgcatgttcagaacaccgtgtcttaggtgacctcccgggcctttggaggcccaaccccagggtggcgggatagccaggtgaggctttgtttggcctgttcacgtttctctggaaaagaatgggggtagttaggccaggcgcggtggctcatgcctgtaatcccagcactttgggaggccaagacaggtggatcacttgaggtcaggagatcgagaccagcctggccaatgtacagtgaaaccctgtctctactaaaaatacaaaatttagctgggtgtggtggtgcatgcctgtagtcacagctacttgggaggctgaggcaggagaattgcttgaacccaggacgcagagatcgcagtgagccgagattgcaccactgcattccagcctgggcgacagagtgagactccatctctaaaaaaaaacaaaagagaaaaagaagtattattctgcagccgaaaggaagtagagatgcactaagaagatcacagtagagtttggaacatttttggagtaaactgaacaaaataaaaacggagcagcatgggaattattttagcttccaccaaaagggtctgtttctgctatagttaacggaagttttcaattttcaaaaaatcccagtagctcgctgagtttcagcctcctgtaattcaagtactgacagcaggtactactcttcttggcaacagagtgaaaaaggttttaaagatgttcccggggcgttagctttggtgctggagttgtaacggctcattatgtgtatacagcatggaactggcaaagactgtcacaagcaaaaagaacacaaaaagagaaagtaaaggctctggctctcggtacttatggaaatctcatcgtcattaatttgcacaaagccattaaaaatagcatttaccagcaggggtccagcgttaattagaacccagcctgggagcagctggaactctcggcgctcctggctcagtcctcgccgccctgaacccgtctgcaccgcagggcccgagtgggaggcagaggccacatttctggatatgagcaaaagctccgacatttcgtccactctcgtgttgtgaactttaaaaaattctggaatctgttgagaatttggcaataagtttttaaccactaaatatgtcaacaacgcatcgcctctacttttaccaaaaaataggcgcacgaaactccgctgtttgcgcccgcggacacctgtccccgcctcctcgcaggaagcggcccccgcgcgtgggcgcgggctcgggctcgggctcgagtggcgacgtgggccgcggtcctggagggggagaagcgcccggcgggcaggcgcggggcagggaagccccggggaacccacagcccctccgcagacccagccagggggcgcgcgcccgaaaacgccccgtgtgcacgcgcccgcccccctccccgcgccccgcgcgcgcccctcgcagcctggagccggagcgctggctccgcgcggcctggagaggcggagaggcctgtccaccgccccctctgccgcccacgccccgctgcgggtcggaggagcagctcccgctcgcaggtgctcggagaggccgggccgcggctcccacaggtgccgggaagcggccgcgcgcatgcgccggagcccacccgcctggctgcgcgtcccgggcccggcggctgaagaggagccgcggcgaggtagggcggaccccggggaggcagcggcggggcctggcgggcggagcgggaagcagcccgaggcgcgggtcggagggggcggcgggtgggaggtggtcggcgagagcggcagtaggcgggaggggagaaaaggggaggccgg

SEQ ID NO: 39848 - DNA, 2300 bp, Homo sapien
gcaggggcaagcatggctcagggagatgggggtctacgaggagggtggggaggggtctcctgtccccagcagaaggcgaagctctgtccccatcaggagcctatctgtgtcccgggtcacactctgctctctgggtggtgtggctgaaagatccaggctttcttagacgcagcactggatttctatatcacagaaggagggcacagccaccgtgaaatgtcagaaaaggaggaggagtgtgctggcctttccttctctcaggagaggcccctccccgggatgagattgtcccctcctgagatgctaggactgggacccaggcgactgagatgccaggactgggactcagaggactgagatgccacctgaggggacgaggcaccatcactgcccctccagtgtcggccacactcagaggcaggggggcagaagggctgaagggaagtcccccaggtccctgagaaatggattcgctagagaaggagatgctgataaaccggaagtaaacattgcttgctctggtcttgctgtttgcaacccccccaaaatatgtgggttaaaaccctaacccccaaaacgatggtgtgaggaggtggggccttagggaagtgacaaggtcatggaggtggaacctcccgagtgggatcagtatcctcatacagaggccccaagagcggcctggccccttgacgtggtgaggactcagggaccgcgccgtcccagaaccagaaggctctccccaggcagtgtctgctggtacctggatcttggacttccagcccccagaactgtgggaaagaagctcctgtgttttatgagctacacggtctatggtgttttgctaaagcagcctgaatagactaagaaatcactcaacaaacactaattaaattaaatgctaggccatcagaatacgaaggggaagaagacagaaacactcgcctcctgatccagcatccagaacgctctggggcccagcaagaggctgtgctcgcgtctttctcgtatctgatcttcgcctccatccacctgctcgctggtccttggctgtgcctctgataccccagtgtgagaacgtggagtttcttaaggcaattctcatatcatattttctctacttgtcacaacaaacttacaggaaagttgttattccatgcgttttagagctggggagcatagcccccgtgggctgagcagctggccgaagtcctcagcccctgtggtgaggtgcagctggagtgtgattctccgggtcctcagatgggggcatccccttgaggccccgcctcttggccaggctgcagcccaggaccgtgccaggtgtgtgttatctatatttggacacacgctgtgcgaaacgacgggcaccctgcaattatccgtgtggtgtagacgcagtgtacgtctgtggtaatggctataaataagccccgacttgccgactaggcaccgctcctcttttgggtaggcagttcttgctaaaatagccctaagatacaatcgagtgaagacctgagtcgttcttgaaataaaaaaaaaaaacgaacaaacacacgaacatgcacacacacgctcacaaacccaggggcttgtgcacctccctccctccacagccgacctcaactcgggtgtccaggcctgcgaatggcacaaatgctcactgaaatccatgtcattattaaagactcattcaggagttgcaatttatgagccagggaacctgtagctcgaaaggattgaagatatgtctgagaattcacacgtaaggattagaactcatggaggagagttgcggggagggagcgtgggaagtcagtgccctgccctctctttctgggtcgggggctgaagtgtcacacccggtttcctgggaaaagtgcagtttgggactcagaaaggacacgttccagttttgaatcgtgatttcccccgccctcagtttgaacaagaagcttttcctcctgaggtcaggctggtgatttacgatgtgggtattgatgtggggagaggcaggcccaggcgtctatatatagcagctcctcagaccttaaacgggagggaggcacaggcgcttgctttgcaggagtcagctctgccttcctcggctggagtgtgggtggcttggtgagccggtggtcaggaattctctctcctccttgcaattttcctttctgtctgggtaagtgtctttctcttcttgccttttctaatttgtggctttaaggggaggaccggtaacttctgcactcacattttctaagtacctctacttcagggtcaagaagagagagccagtgcac

SEQ ID NO: 39849 - DNA, 2300 bp, Homo sapien
atcattttacctgtaggatcatgaccatattttttaaagggggcatatttaaaaggtatattgaaggggaataataaaagggaatattaaaaaggtacattaaaatgaaaattaaaataaaagatcccaaactgattgaactttatgacaccaaaagaaacacccagcccctcactgcctctgcactgctttaattctttgcttccactctggttcatcattcacattccttcatatctgcttttatgttactaagatgtgagtctgcttctcagtaacacaaacataatttcttttaatatattgctgtcaaaaagcaatgaacccggagtgtaccaggaagaacacagaatccagctttggtcctggctctgttggaggcttggctgtgcacctgacagggttcagctttgtgtccccacccaaatctcatcttgaactgtcatccccagaatccccacagtccccacatgtcaaggcagggaccaggtggaggtgattgaatcatggggttggtttcccccatgctgttctcctgatagtgagttctcatgagatctgatgattttacaaggggctcttcccccttcactcagcacttctccttcctgctgccttgtgaagaaggcaccttgcttcccctttcccttccgccatgattgtaagtgtcctgaggcttccccagccatgatgaactgtgaggcaattaaacctttttcctttataaattacccagtctcaggcagtcctcatagcagtatgaaaacagacaaataccacacccttggacaaactgcttttctttttctgtgcctcagttttcttctctgtaaaagttgggtcagcagttctcaaatcgagctccattcatgtgcccaaggggactctgctttcccccgctgtagcccccaacccccgatcacacctcttggtcacactccccactcacagcccccggtcacacccctcggtcacactccccagtcacagcccccggtcacaccccttggtcacaggctcgggtttcgtcttgtatgttgctctttcccacaagagtcctctcccaaaggttctcgggtttttgtttttcaggtagaatcatgtagttcaaaggttttctaagctacttctcagatctaaaattttaagaaattataatttgtctttctcattttgatgactagctaattcaaaatctctgctcctaacctttagatgtgctgagggctgaacgcagcggtgcctatcaggtgggtgtctgggaataaacacagcccatgcccttggccttctgcactgaccactcatggctccttgcccaaatcagtttgcagaactctcaagtccattagagatcttctcttggttcagtggtaacagaggctgcaccatcagttcagacacacggctgtaacagcagccctcaccatttgtctgtttcctcttcattcccacatcctagtcaaaccattaacaacgtttaaagaaacaggtcaccatactaatgaggatggctggtctcagagtctccactcagtgagaaactaagaagcaggtggtatttgagcaggtaaatcctgatattgcaggactcacctgcagccggcagaaatcaggcccagacaggagggagcagcgcccaggacccagcccaggtgagctcgctaatgaggcagagagtgcctcctagccaggtgctgaggaagtgccagactggatgtcaggacagtggggacagcaacagggtgtagacctaggagcaaaataagactaaatcttctggagctctggcaccagagacctcaaagcttctgggagcctgggcccagaacagaccttcttgctgggaaagggatcgtatgctggttgtggtagcctaaggcaggctgcagccagccagagggacagggaacctagggacttgcttcagcgggtgggcgtggccctctgttgggtgggcgtgacaagctccaccaggtgggtggggcctgcatcagcacagcctgctccatcaaatgggcagagcctgctccagaagtgggaaccttccaaccccacttccaggctgccgtttgctgtcacagagtgacgttttcagcatggcttcagttcttttgcccaaacagaggaaaacttgcaggtatgtatttccgtgtttttcttttaaagattgcaacaaaaagaaaaaacccaagtccttctattcatctgtcaactaggctacctgagtacaaggaggcttttatttttatatttatttatttattttgagacagagtctccctctgtcgcccaggctg

SEQ ID NO: 39850 - DNA, 2300 bp, Homo sapien
gtatctatatctatatctatctttatctatctatatatacctatctatctttatctatatccatacctgtttgtatctatatctacacctgtctgtatctgtatctatctctgtctgcatcgatacctatctgtatctgtatctatatctatacctatctgtatatctatttataactatctgtatctatgcctattatctgtatctatatctatacgtatctgtatctgtatctatatatctaaagagatttattacaaggaatttgctcacctgattatggaggctgacacatcctgagacctgcagtcaatgggctgggctggagaccggggaggtgaaggtgtgagtttcagtctgaaggctggcaggcaccagacccaggaagagccaacacttcagttcaaatcaaaaggcagaaaagccccagtgtcccagctcacagtatcaagtaggaggaattccctggctggctctggggttgcacaagcagcttattcgttgggatttgctttgttttatttttaaattaagtttttttttgagacagggtcttactctgtcatccagactggagtgcagtggcacaatcttggctcaatgcagcctcggcttcctgggctcaagtgatccctctgcctcagcctcccaagttgctgggaccacaggcacctgcctttacgcccttcttgtgctgggatttcgggtgtgagcctccacactggccctgtttctcacgatgggatttcagctatgagcctccacgcctggccctgtttctcacgctgggattttgggtgtgagtccccttgcccggccctgtttcttgtgctgggatttcgggtgtaagccccggcgcccagccctgtttcttgtgctgggatttcgggtctgagcccctgcacctggccttgtttctctggctgcctccctttctcagactcctgtagtggtgtttccgtccaacacctgtgttttacagcatgtgggtttttttctcctctctgctatcaatatgcaaagtgctgaggttgcactcttaagccctgtgaaaaggactttgctattgttactggacaatttttcttcatgttacttccaatttcttggaaatcggtaggtgcttttcctcacccaactggggttttccatttccgtctcctggatctagatggctctgctcttttatcagcagagagcactggttcccgcgccttcagaggggactgttttagagcctccagctctgtcgtgtggctgtgccagtaaccccggaaaggcttacaccctagtgtagtaatagaacacggatccgttatgtgtctcactacacatgcattaactggaaaatccaaaggcattttacataatctgaagttcagtcaagtcagcggggtgtttgagaagaggaaggcgacttcctgacgcctgtcatgatatgaaccaagtagtttcatccggagtggaatctggcttggttctggcctttgaatttttccaagccagatcactagtatacctaactataaccctgcatagtaacttttggctgaatggatggtttccggtgcagtaatagctgagtttctgtcaatatgcactgtctattctgtgagaatgttaaagtatctgaatttcaaaggcacgtgcagaggtacaagggccgcgcctgtgagaacaccgagcagcactgcatgatggctggaggctggggagccactttccttccctcacgcatccgcctccacgcaagcctgctctccgccgtgggaaatcagacagctgggctgacagcctgcattcgggatgcagtggaggtgatggacagccggccccgggaggggtgaatactctgtccactgtgcccccaggccagagcctcgcatggtgatgaatagagtcgtactgacgtggaaaatcagatactcagcacctttccttcaagacagataggggaaaagctgaggaaacagaaaaaaaaaaaatggaaaagaagaagtggtcaagaaagggctgcaaacacacaaagagatgattttttaaagagaaaaggaaaataacaaaccagatgctgacatggtactccagttccaatatcctatttattatcatgcattcaactcctcaggtatttaatgacaagctactcatagcttgtctcagagcaccaggaattctgagtcacagtcggggtgtaaagcggggccctgcattcagggagctgagtctgactgggaactggaaaggctcccctacctcccatgaccgtctgtgagcttcacctgtgagtggcaggtgcg

SEQ ID NO: 39851 - DNA, 2300 bp, Homo sapien
attgccaatcagaaaatctttgcaactgcctatgacctggagccccccatctcccccactcccatttgcagtcatccccctttccagaccaaaccaatgtagatcttacacatattgattgatgtcctaagtctccctaaaatgtataaaacaaggctgtagcctggccaccttgggcacatgttctcaggatctcctggggctctgccatgagccaatggtcgttcatatttggctcagaataaatcccttcagatattttggagagtttgactcttttcatcaacaaatctgaaaagtgacttgaaagccagaaacaagaacaaaacagagataccttgaagagagagcaaaagcaggatttcataagataattgctatgaagcaggcaggaatgacccccgctttctaaaattttattgttaatcagccattgctcacatgctaaataagttgggtcaggaaagatttaaagccaaaagctgaagcaaaaattatagatttaccaaaactaaaagaaagccaagaaagaaaaataaaggcaggaagaaagaaagggagggaggtggaaaattttaatgttgattataagagaaacaagttgggaaactcattcatatctttccaattctataattgacccgtatttattgatgtgaactgaagatatgtgacatggtttggctgtgtccccacccaaatctcatcttgaattttagctcctataatccccctgtgtcataggagggacctggtgaaagataattgaatcatccgggcaggttttttcacatgctattctcgtgataaagagtaagtcccacaagatctgatggttttataaagggtagttcccctgcacacgctcttttgccactgccatgtaagatgtgagtttagtccttcaccttctgccatgattgtgaggcctcctcagccacgtgtaactgtgagtccattaaacctcttttcttttataaattaccctatttcaggctgggcacggtggctcacacctgtaatcccagcactttgggaggccgaggtgggtggatcacaaggtcaggagatcaagaccatcctggctaacatggtgaaaccccgtctctactaaaatacaaaaaattagccaggtgtggttgagggagcctgtagacccagctactcgggaggctgaggcaggataatggcgtgaacccaggaggcagagcttgcagtgagccgagatcgttccactgcactccagcctgggtgacagagtaggactctgactcagaaataaataaataaataaataaaataaataaataaaatgaattaccctatttcaggtatttcttacagcagtgtgagaacagactaatacaatgtccaatgtgatttcaatcacagccaataacagtaagtttatgcattgggacattggattttccacttatgggtggatgtttttgagataatttatattttattatttttattccctgactttactcaggacatcttaatttcttgcctctgggatttccatggttataactcagtgtttctggcagtcagagtctcaccaccaagcatcagcttacctcattgtcccacttaggttttaggggtagagcctttgagcaacacaaggagagaggagggcccaggggagagggtctgtgcgtcgtgcctgggataggctgatattgtcaccttctggggctgctgctgagaaactgtgccttggcttccacagaaacagcagcagaagccactgaggacaagtgattgtaggagccaagggagaacttccccttcaccctctgaaggttagctgaaaaatcaacttacaaaaggcaggttaatcagagaaaattaacctgggcaacacacaaattagtgtgtagacacgggagccttcagaatgaaggcccaaagatataggggaaattgtcgatctctatgcttaggttcagtgaggtatggacagccatatagaaatgtgattggacagccggacacagtggctcatacctgtaatcccagcaccttgggatgccaaggtgagtggatcacctgaggtcagcagttcgagaccatcctggccaacatggtgaaaccttgtctctactacaaatacaaaaattagctgggattacaggtggtgggtgcctgtaatcccagctacccgggaggctgaggcaggagaattgcttgaacccgggaggcagaggttgcagtgagctgagatggtgccactgcactccaacccgggcaacagagcaagactccatctcaaaaaaaaaaaaaaaaga

SEQ ID NO: 39852 - DNA, 2300 bp, Homo sapien
ctcctttattttttcttttattttttagttgagatgtaataattgcacataatgcatgggattcagagtaaggttgtcataaatgcatacaatgtgtaaaaatcaaaccaggatgattagtatatacatcgcaccaaatacttatcatttccttggactgggaatactcaaaatcgtctcttctagctaattgaaaactcacaattagttacttttaactatggttatcctacaggactatagcacactagcacttattgtttcggtctagctgtaattttgtatccgttaacaaactactctctaacctcccctcaaccctaccccttctagcttctaatgaccaaaattttactttctatatccatgagctccaccttttttttgaaatctccaacatatgagtgaaaaagtagtatttatctttctgtgtctggctcattccatttaacccagcatcctccaggcttatcattgttgccataaatgacagaatttcatttcgttttatgggtgaatagtgttccattgtgaatatatactacattttctttctccattcacatattggtgggtgttgaggttgactgtatatcttggttattgtgaatactgttgtaataaacatggggaagaagatattatttttgatatgctgatatatctttctttggataattacccagcagtggtattgctggatcacacggtagatgtaatttcagttttttgagcaacctccatactgttttcacaatggctgtactaatttacattcccaccaacattgtataagagttcccttttctccacatctccacaagcctttatctctgtgtgtgtctgtgtgtgtgtgtttgataatagccattctgagtgagattatatctcattgtggttttaattttaatttacctgattagtgatattcagcattttttcatgtttgttggccatttctatatcttctcttgagagatatttataccaattatttgcccatttttaacagaattactgttctgctgtggagttgttgggtcccttacatattctggatgttagccccacggcagtgaacagtttgcagatatgttctcccattctgcaggttttctctttattctgttgattgtttcttttgcggtgtagaagctacttagcttaatatagtccctatttctatttgtttgtgttgcctgtgtttttgaagtctcacccataaaatatttgtccagaaacaacgtcctaacgtgtttcccctgtttacttctagcagtttcataggttcagggttgagtggactcaggaggatgctgtccggcccgggatgtggagaggcaggggctgtggggccccggggccagatgcagtgatgcggacccccaccgccagatggcactgcgctgggggtggagaggaacagagacggttccctctggaacgaggctggcatctccctgctctgggctcgtagactgtgagggccaagaggcactcctgcagccaacttgtagatgtccctggtgggagcgtggactgcatgggacttctcacttacctttccccacaatgggtagtcgttgttgccccgagtcagtcccgtcccgttgttttgcttcctactctcggccgccacctcgagtctccacgcctcagcgctctcctggcgcctcagcgctctcctggcgcctcagcgctctcctggcgcctcagcgctctcctggcgcctcagcgctctcctggcgcctcagcgctctcctggcgcctcagcgctctcctggcgcctcagcgctctcctggcgcctcagcgctctcctggcgcctcagcgctctcctggcgcctcagcgctctcctggcgcctcagcgctctcctggcgcctcagcgctctcctggcgcctcagcgctctcctggcgcctcagcgctctcctggcgcctcagcgctctcctggcgcctcagcgctctcctggcgcctcagcgctctcctggcgcctcagcgctctcctggcgcctcagcgctctcctggcgcctcagcgctctcctggcgcctcagcgctctcctggcgcctcagcgctctcctggcgcctcagcgctctcctggcgcctccctcctcgctgaacgccaacagtgctcttcctcagatgctcgatttgactggtgtgaggtcagtatgaacccatttatatgaaggtttacaacagacaaaattaagctgtgtattttagagatgaatatgtaggcggcaaaagtgtctttataacaaggaagtgtttgtagtattcagggttatggt

SEQ ID NO: 39853 - DNA, 2300 bp, Homo sapien
ctcattaattcccaactttactccatagaaacaactgctgtcaagcattgtttgtgctcttcagaaattatctgtattcttctctctcactgtctctctctgcccctctctctcttccctccttcctggctttttcttctcctcctctccccattctttctctttatcctcctttttcttcttattattcttcctcttttcccctctcctaaacatcttttgtttctaattttctgcatataagaagcctcctcatttgaacgcctttatccaccttttaaattaaaactgaactacattccaacatatttgcagttgttcacttttctgttttctcctttctatttcaaaattatttttccattgttgctatgatcatactgacttcgttgaacaaattattctgtgtcctatgcatttatttcataatttgagacacacaacttgaaatatttatttttttaattgagccaaaacatatataagggatcttcaaaaagctgttggaaaatgaatgttacgaaaacctatgcatgaattttacactttttcaaaataaacttgaactaacttgttatgatatatgtgaaaaagatctagattgaggcactaagaaaagcaaggtatcagtttaaaaagagcccctgtcggagcaatatgaattctggtaaaactgaagcaaaaactaacatcaagtttatagtaaaactttggtagagaaatagtgaaatcattgatggtttacaacaagtttatggaaacaatgccccaaataaaccagccatttacaaatggataacttgttataaggaggcatgaaatgttgctgaagtgaagactgaagcagcagtcttcagtcttgtgaagaaaaccttattcacttgtgagaaaaatcttagttttgtttgtacactaatgaatgggacagatgattaacagcacaaacaatagccaacatcatagacatctcaactggctcagctttcacaattcttttaaaaactaaagtatgctcaactcttcgcttgagtgccaaaaccactgtgccaagatccgttgcagatgagggcagaactttcgatggaaatttaaaagaagtgaaatcaagatcctgaagcacagctttcaagaactgtaacaggatacgaagcacggctttaccagtaagatcctgaagataaagcacaatcaaagcaatggctacccacaggtggaagtggtccagccaaagcaaaagtgggtgggtccagagcagaggtcatggcaacagtttttggggatgcccaaggcattttgattgttgattttctggagggccaaagaatggtaacatctgcttattatgagagtgttttaaaaaagttagccaaagctcttgcagacaaacatgccagaaagcttccccacagattccttctccaccaaggtagtgattctgctcattcctctcattaaacaagggcaatttggtgaacgtttcagagggaaatcattaggcatccatcttagagaactgacgtggctccttctgggctctttttgtttcctactcttaaaaaatatttaaatggcacccatttttctttagatgataatgtaaaaaagactgcattgatttggttaaattctcaggaccctcatttctttacgaatagactaaataatggtatcacaacatacaaaagtgtcttgagcttgatggagtttacgttgataaatacagtttatttttaaatacttttatctttacattacgtttttcatgcatcttttgaaatctcctcagatgcattttccaaagtgacatatttctttcactgtttgcttacaacgttgcataaggtgcaaaggctgttaaatagctcaaaataagatctgatggagcttacaaaatggcaaatacactttaaggtgctaacaggaagtccaagagggagtttgatctgggcttggcagaaactgtgtccggaattggtgggctcttggtctcactgacttcaagaatgaagccccagaccctcgcggtgtgttacagttcttaaagggggcgggtccggtgagtgttacagttcttaacggccgcgcgtccagagtctgttccttctgatgttcggatgtgttcggagtttcttccttctggtgggttcgtggtctcgctggctcgggagtgaagctgcagacgtttgcggtgagtgttacagctcgtaaaggccgtgtggacccaaagagtgagcagcagcaacgtttattgcaaagagtgaaagaacaaagcttccacagtgtggaaggtgacccaagcg

SEQ ID NO: 39854 - DNA, 2300 bp, Homo sapien
ttccccagtgtctatatattaatttcagatatatggccctgcctggagtacgtgcccaatgtcagagccatgatgtaaccatgaggtacgttattatgattggccagacctagcccatgctattccctttgtctcttccgtagggatctaattcaaaaaacagaaaagtggctgggcatggtgactcacacctgtaatcccagcactctgggaggcctaggcaggcagatcacctcaggtcagaattttgagaccaggcttgacaatatggtgaaacccccatctctactatacaaaaattatccagccatggtggtatgtacctgtaatcccagctacctgggaagctgaggcaggagaatcacttgaagctgggaggcggaggttgcagtgagctgagattgagccactgcattccagcctgggtgacagcaagactccgtctcaaaaataaaataaagtaaaataaaaataaaaaacaacaacagtaaacagaaaaaaaatgtgagaaaaaattctgtatgccacagtccactgcaaacaaggtttcttctcactgaaactcagcagtttgttaagagctaccataagtagatacaatatatttttggaataagcataagaaatatgctggatgttggaaaaaaacgataaatagatatgcacacgaactcctcttgctttaaaaaaagacagccaatttttcctgttttccaacataatgcaatgttttaaataaagattattccataaatctgctgcatctcatttctttccttggtggttttaaagtcttaccgttcaatgtcttacgtttcctttctttaaatactttttatttccagcatttgggcatgctttgatatttttactgcctttgttatttacatttaggtattcaactagctagagctggctttcagcaggagtctggaacgagtttctaccaagagcctttgtgagcttagatactaagtattgagattgtcttttatacgggaggggctatgattcattaattttcttgtcttccctctcttatatctgccccctcctcaaaaacacactaacacacatattcacaaacatatagacacacacacaaatctacccacttgcatatactcaacactcatcttgatttacctacagagaagctgttcactctttcagctgatgatttttctttctaatctgtgggggtaaaatcatccttatcagccgggtgcagtggctcacgcctgtaatcccagcactttgggaggccaaggcgggcggatcacctgaggtcaggagtttgagacgagcctggccaaaatggtgaaactccgtctctactaaaagtacaaaaattagccgggcttggtggcgggcacctgtaatcctagctactcaagaggctgaggcaggagaatcactggaacctgggaggcacaggttgtagtgagctgccgagatcgcgccactgcactccagcctgggctacaagagctatactctgtttcaaaaaaaaaaaaatcatccttatcatctacatcccttttacattaactgtatgtcccagtgatctccattatgtctattcataacacaatccaagatttcattctgcaattaatattgaatctgttgtgttgggctgactcatgtatgaatagtcacgtatattgtaaattacacggaaacctaccgagtagaaagatctcatattgaacctcatttacatggagatcagttatcagagattacagaaaagagccgctggccaggtaggtgttcaaaccatgctaatttcctccctcctttgggtttaagctggcaaaaaacacttgtccacatagactgcagatatcctgccctcaccatcagtatcaacaacctatcatgactttcttcttggtccacttaacccaacctgttcctactcaagtcctcaactccatttggagtttgtcaatattgaagattccatttgtttccttgatatggttcagctgtgtccccacccaaatctcatcttgaataatagctcccataattcccatgtgctgtgggagggacctggtgggaggaaatgaatcataggggtgagtctttcttgtgctgtttttgtggtagtgagtaagtctcacaagatccgatggttttataaagggcagttcccctgcacaagctctcttctctgccaccacgcgtttgctgttcattcacctttcaccatgattgtgaggcctcccagccatgtggaactgtgagtccattaaacctctttcctttataaattacccagtctcgggtat

SEQ ID NO: 39855 - DNA, 2300 bp, Homo sapien
aagttaatttacttaattattatgaggtatgtaatttcattatcaccatattgtatagaggaaaaccaaaagaaggcatgagttgagtaatttggtgaaggtcatggatacagtaagtagcaaagtccagaaaatcggagaagagaatctgtcttcctaatttctaggatatattgcttctaggaacttactagctctcatgatttttaaatctgatgcattataaaactgagaacacaagcaggaaacaggtgccactttaacattgcatgtggtttattctgagaagtattaagtaggtgatggggtcaccataggtaatagaccagtggctttaaggacaaggcctaattttctctaaaatcttctggaaaaatcaggaataaggggtctcttgcagttcacaggtaaatgtatcaatcaatagaacggttttgtgcctatgtaaaacatatgacagggcttaaggtagcttcacttatacctatttttttttgttttaaaatacatatctagatgtacaattgctttaaagaagttacaatgacaacaattaacaaaattgcttctcattgtaaagaagttattgcaggttccattaaatggttgttaaacagcaaaaagtcaatttgcatcgtgagtactcttttgataccaactatgatatgttcagtaacatgaggaaataaatgtaacgtttataataaaatggaaatccatgttaacattttctaagcatcatctgaaactttcaagtaagcatttcctcccgtcgttctttaaagtttgtaaaaaagagatgtggctgttttgttaaaattccttggtattcaagggctggaaaaccgatttaatttttattcgggggattgtttttgttcacttaatttaaatggaaaaaatctggcagagtaagcataaaactttacctcttagccagaaaaatttggttaccattaaatgtccaagtatgtatttccccagggctcattcctttgtatgatatgatggtatgaaacagtttttaagtttctttagcaattgcagtaatatgtagatcagtacactgaatctcaagagataaatacttcagctttgataaatagtaaatgcaaatggtaaatacaattagttcgtttcaccctcaggtttttagtaaaatgaaggttataataaggaattatgcttccatttgccgccttcttgcagtggtgcagatctccgaggcagatgtttgaggtcccttttttttttcatttcagttatttactgagactggatttggatcatcgaagacacgattcatgctaatgacatgatgaaagaagtgagggctattggtattaacggactgggtttaacagtctgacaaaatgatgaaagatgtgtatcatatactgtgtatttaggagaaaacaaaaccattaagctagccttccagtgaaaaactaaattgtttatttctctggtgtaagtgagcaaagtcactacaggattaaaatgtcttttctgggacaaagtaaagaacaacgtatacacatcttaaatgtggtaggtcacaaaagttagaatgcaatcaccttttcatgcaacaagaaaataaataaataaaaattaaatgctttacccaacatttggcattgattgacacatcagtagtgtcagcttcacatatgaaggacagtacagtctggttatttacaaatgctcactatgacatggtatttgggctaaagatacttagaatattataagtgtttcctttttgattaaaagaatataacataatcaacatcaagctgctatcataactcatctttagctgtggtacaccagagaaataaacagcttgcaatggaagaggattttagtgcttttttttcccctgaagtagacattaagctgctgttgtagagtgtttgcagctctttccaatatgtggagacatttttatttatgaatatttatacaaaaaaggaattctgtcaagatgacagctctatatcacttgagaatgacattatttaattagagaacaaattgcatttttttggtagtgcctgtccatacctcttgtcactgtttgccttataatgtgttttttgaattcactttgagctgacggttttgtccaaggtgttggatgaagagcacttgaaaataaactggtatgttgtttttcagttaataatatgtttaataaatgtgtgatttttgcatgaaaaaaacccctaagttctaatcacaatatgtgggtattgtttctttagctaaaactactactagtcagtgaagcaaag

SEQ ID NO: 39856 - DNA, 2300 bp, Homo sapien
aatttttgcaatctactcatctgacaaagggctaataaccagaatctacaatgaactctaacaaatttacaagaaaaaaacaaccccttcaataagtgggtgaaggatatgaacagacacttctcaaaagaagacatttatgcagccaaaaaacatatgaaaaaatgctcattatcaccggccatcagagaaatgcaaatcaaaaccacaatgagataccatctcacaccagttagaatggcgatcattaacaagtcaggaaaaaacaggtgctggagaggatgtggagaaataggaacactttcacactcttggtgggactgtaaactagttcaaccattgtggaagtcagtgtggccattcctcagggatctagaactggaaataccatttgacccagccatcccattactgggtatatacccaaaggattataaatcatgctgctataaagacacatgcacacgtatgtttatagcggcactattcacaatagcaaagacttggaaccaacccaaatgtccaacaatgatagactggattaagaaattgtagcacatatacgccatggaatgctatgcagccataaagaagtatgagttcatgtcctttgtagggacatggatgaagctggaaaccatgattctcagcaaactatctcaaggacaaaaaaccaaacgcctcatgttctcactcataggtgggagttgaacagtgagaacacatggacacaggaaggggaacatcacacactggggcctgttgtgggaagtggggagggatagcattaggaaatttatctaatgttaaatggtgagttaatgggtgcagcagaccaacatggcacatgtatacacatgtaacaaacctgcacgttgtgcacatttaccttaaaatttaaagtataataataataaaatatatatatatatacacaaatggggatattacattacaacttcagagtgtgtgataagagaaagaaccaatgatttggtggagtggaggcaaaaaattgttgcatgtataagattttttgttttataaaaagttctggtctgggcgtggtggctcatgcctgtaatcacagcactttgggaggccgaggcaggtggatcacctgaggtgaggagttcaagaccagcctggtcaacttggtgaaaccccatgtctactataaatacaaataataatactaataataactgaacatgacagctcatgcttgtagtcctagcttcttgggaggctgaggcaggagaatcacttgaacccaggaagtagaggttgcagtgagccaagatcatgacactgcactccagcctaggagagggagcgacatcccatctctagaaaaaaaaaaaaagttctgacaaaaatagggcaaaatgtaggaaaataaagatctactatctgctatacttttctctatatttaaggatttatcttgattattttaaaaatacaccacacattccataccttacacagggtgacataagtgttttctttaaacatgtaatatatgcaaaacaaagcagttgagactcgtgggtagtttttttgtttgtcgtccactgtgactttacctcccttgtaatcggtgtgcaatacgcaggaaataaaaaactgtaaatcagacccattcagggctgctaatttttgttggtgtttcaactaaacccttcttgcttcaatggccctaaataggactacatagatcctgctgcctctgaatgtgagtccttaggcatagagatttttaagtcactctgaaaaatacctggaagtctaatagaagtatggtaaaattttataaagaagggagtttatgttacccatttttgcctttctgttggtattttaaatgatgaagttttaaaatataatttttagaaagaagtacaacacaagagcagaccattcagacacaggtagaaaaggtcgtaatggagtaagctcttttctcctgctgtggctgctgccacctagcggggcatttcgtgaacaacactgactgcaccgaagctgccttccatctgcttcaaacacatctgtcaatgccaagcttatatttggtttgtgtgccgtagaaagcttaaattatacagagatctggaagtctcaaaagcaatccttttatcctaaaatggatagctcagcatctagctcacctatctctctgcgtccatgacagactgaggtcctgtgtgctttatcctaatttacactcctgaattatcttcggtgagcctcattttcctcatccttcattgtcagacagtaagtaccgaggcaca

SEQ ID NO: 39857 - DNA, 2300 bp, Homo sapien
gaaaagagagacctctcattcaagaagacgtataaatggcaaataaacccatgagacaatgttgtacatcattacccattagttaaatgcacgtagctgttaaagtgtggaaaaatgccgacaacaccgaatgcctattgagaatacaaagaatctggggtgctcacacactgctggtgggaatgtacaaacagtctggggaaaaatttggtagtttctttaaatactcaacatgatttcacaatgcagctattgccctcttgcgcttttatctcaggtaaatgaagatttatgctcacacagaaacctgcacacacatattcaaagcagctttaggtgtcatctgccaaaactagtatcagtccaaataccctttaccaggtggttaattaagcaagctgtggtatatccacaacatgacatactacccagcgataaaagggaacaaactattggtataaacaacaactgggataaatcttccaggaattaagctaagtaaaatccaatcccaggttgttaaacactgtgatttcatttgtatgatttttttaaataaataatttagagatggatactgattagtggttgccaggggttagggacagtgaagggggtgtagcaagaggggcatgagtgtgattttaagggaagagcaccagagaatttggaaggaatggagctgccctgcattgactatggcggtggattcaggagccgagacatgtgacgtatttgtgcagagctacatgcacaaatgtacatacaaaatacgaataaaacagggaaagttttaacgaggctggtaggttgtatccatgtcaatgtcctgattgttatagttttgcaagatgttaccactcggggaaactaggtaaataatacatgtaatctctttatattattttgtactacctaccacatgtgtatccacaattatcttaataaaaatttcaagaatttagaaatgttaatcatcccctacttgtgtttatacactataaattctatgtagaaattgaagtaaatgaaacaatactacaaacaataacatgaatacatttcaccaaaatcatgttgaacaaaatgttatatatagtatgatttcatttacaaaaaaactttaaagaagatgtaaaactgatagtttggcaagatgggaggagaggatggtgactgggagaaggtacaagaaggctttggggtgttggtaattgtctaagtgttgatctgtgtggcggttcactttgtaaaaattcatagagttagacattcacgatctgtgcgctttttggcttgttacacttcaataaatgtatgaataagaaagaaagaaaaaaatctctcttcaaacaagccaacaaaacaagcaaatgaaaaagaacaatgttgccaacgaagacaaatcttcagaaagaaatacatatttagttaaccacacagcattcacagaaatagtttcctcttttcaatttgtgtgtaacattgcatgagttacttcacatataatgacagttgttcttcttcctttgaagaatccggtgctctgtactgcctaaggtgaggatgtagggttgatagacagatgatatgattgatggggcaaatcatatgctcatattcctgaaactactttgctgaaagtcaagcttcctatttgattagggacatttgttttggttgaattgattttcttcttacactttttctatttcaacatgcttttctgtcagcatgttgagttcaatcaatggatttagtgtttcttttcactggctgacagcagcccctatgtgactgttttgttaatgcacaatgaatgcttcattgaaactcacatttggtgtgacccagacattaatatgcggggggagtgttcaataaatgctgccaaatctatttcagctatgcatgttgttcttttcaaaattctcttaatgtataattacctataatatattttaaaaggagagtttgtgataaagttacatactagttctagacaatgaaaaccttttgtgaatgaacccatacaatttgttgtgatagagatgctttgtctttcatggctggtgttgtgcaatcctacagcaactgtgcacatctctagtcacctcacatgaacaactgtgccatattttttccaggactgtcccagttgtaacattgtaattcctgcacctggggaagcctctcggttccaggaaaatgggatggttgattgccctaaattgattttttaaaagaaaattcacgaattggcagccatagaatagagtaatttctgtaaagcaccagtg

SEQ ID NO: 39858 - DNA, 2300 bp, Homo sapien
ttgtatcagatagattctttgctctctggggaaaggaggtggcatgggacgtttttcaacagaacacaggaaaagggaagttcagcccggagcctgtcacaattatgtggaaaggtgttccatctctcaggtgacactcaccgtcgttcctgattgggatcctaatcaagtgaaaatcatctatgagtcctagcctaggatggttagatgttggaaacgttttttaatggcagaaatccttcttggtgacacgagccattaggaatggcagtgtagagacagggcaccgtttctcaagaagaagtcagctcttaagctcctgaaaagagatccgtttttccggatgaggcgcttgaaatgaactattggagcacttaatgggtcttggaaagcatttttgttcactcgctgactcacagatactatctgaggtctgatttaaaatcccagagggggcgaccctctgctccacaggcccggttcagcctgaagaatagaactcaggggttctatgggaattcccccgtgactgaggcattctgtcttccgagtgtccctccagggatacatgaggcaagacgggactctgcgctgaggaaaatccaagtcatgttcaggactgcaactccaagagcacgcattctctccctccccacccaccccatatttaaatctcatatatctgcgaggagaaaagggttgtggaggtggccccaattgtggccacctgcaccttaggctgcagggagactaagaaagtcaggcttcggtgtttccatgccaaggttgcagtccttcctggatccattatgcctttctagggtagactaggtcacagaggcaggagcaatctaagaaaattgaaggagggatataaaactttatcaaactgtcaacccatttaatctcaaagactgacagaggaagtgcaggtgggatgaagcggtgggctgtccctcccaccacaggcattcggtgctgtggggataccgcaggtagatggttgtatactctaatggttccaggcctggaggctaattctctcttactagggtatgggatttccacgttctgtcctctgaaagggctaaacctttttggtcaaggatgtcgaatcctttaaatgtccttctatggaaaccagccctcactcgtggtgtttctattaactgaccaccttctcctaaaatgtctctccttacacgttccccaggaactgcaggaatgcctcctctatttggggagctgggtgaaatccagtttactgtatcaagtactgctattctaaagcactgttctctctctgcgggcttcatccttttgcagaatcagggagaacctgtctcttctcttttaaggtcccttcccaacccacagaattttatatatagtttcatcagaagctgtgccaacatgccggctctcacaaccagaccataatattaattctagagacttcctcatgtcacgttttatctgaagctgaagtttgggcatggctaaatctaacacaatccaaagtcaggaaatgtgtaaatttgtgtaactccttgcaaatagtccatcttgcaaaacattatacatatcatcatatatatatatatataaatgtataaatatattcctcccttggagttgaagcttgtgccctttccacctgcatttctgatctaagttaggtagggggctgctctctggtcagcaaggaagggagatcaaaggatggaggcgggactctgcccctgcagaaaccctccagtttgctggagttgccggattacattgttcctccccggtgtgcggcgtgagcttcccccacccgagcgcccaacaagtctcctttctccagcctgcgcgctgctgcgctgaggccgaatgaagcgcagcacggtgcgggcagcccgaggccccgaggctgggctctgtctgtctgggactgcgccgtgcccagcctcggtcccctctctgtgggtaaggatggttgagtccagcctccacggcagcggctccttgtgccactagcagcccttcttctgcgctctccgccttttctctctagactggatctctcctcccccccgcgcccccctccccgcatctcccactcgctggctctctctccagctgcctcctctccaggtctctcctggctgcgcgcgctcctctccccgcttctccccctcccgcagcctcgccgccttggtgccttcctgcccggctcggccggcgctcgtccccggccccggccccgccagcccgggtctccgcgctcggagcagctcagccctgcagtggctcgg

SEQ ID NO: 39859 - DNA, 2300 bp, Homo sapien
caaagtggcaggcgtgagccactgcgtctggccagagaaattttaaaagacctaaatgttaatgggtcagaagattcaatatggttaaaatgtcaattctccccaaattcatctgtagagtcaacacaatctcaatcaaaatcccagcagtatttttttgtgcaaaatgagaagtcgactctaagatttaaaaggaaatctgaagaatctagaagatacaaaataaccttgaaaaataaagttgtaggacataaactatctgatttcatcacttatttatatagctacaataatcaaaacagcatggtgctggcagcaaaaagacaaatagctcaatggaacacaataggaagcctaaaatgaaacacatacatatgcaacacagattttgatgtaagcacaaaggaaatgcagtagagacaaaaataactttttaataaatgatgctggaacatttggatatgtatacatgcaaaaaaatgaactttggtccctatcccataccgtatacaaaaattaattaaaagcagatcttatcctttgagtccagtaggttgaggctgcagtgagctgtgattacaccactgcattccagcctgggcaacggagtgagaaactgcctggagaaaaaaaaaaaaaaaagtagaacctagacctgatatacaacctaaagcagtaatatttctagaagaaatcctaggagaaaatatttgtgatcgtggagatgaagaatctatcaaatactaaactttttttaccaccttgaccaaaagtaattggtttatatacttcatcatatcatttaattcaaaatctacagagatcaatgtcactttctcagtaaaagtacgtgagtcttcaatgatgccctgaactcacactcccaagtaaaccataacaccatatttccagagtagagtttattagaacaataactggtgataatgataaatattgatcaaagactgagcctaggaagtgggttttttgaggctgcatatactcaaggcaattcttcagaaccacagagggctcattggatcctattaaaagctgagagtgaatgaataaacagataaaacagagacctgagtagacggtagtcgatattcttttacatgtattctacctctagattccatagaaagaactaaaagtacatgaatttcactaccaacatctccatcagttaccagctgtatcaccttggatcagtcaggtaacctcccgcgaatctggttgcttccggggcaggggatccgcgggctgcaggtttgagcctggttgccggcagggtggagcagctggagggccaagcctttgagctccagggggggtggccgggacagtgggtagtgccagccgatcggcgtcctggggattgcctgaatgtgaggtctgggttcaccccgcggtgacctgagtcctgggatgcccctacagggatttgctgcctcagggatccgaagtctctttcattcccttactggggatttgaggtctggaggtactcctgcgggggtctgagatctcggggtcaccctgtgggggtctgaagcctcggggtccccgcgtggggtctgaggtatcagagtcccctccgttgggtctgaggtctcggggtcccccatccccgggatcggaggtccggctccccggagcaggcagggcggtgcgtctggccctgaacagtaacgtggcgcgccagccccaggtggtgtcgggctaggggggcataacggtgccgaaagtccgcacaaagccgtccgctggggtcccgccgcgtccgcgagggaatgactgtgccccctccccttcctgatcctcagctcaggtgagcccagatgaggcgccgggtagcttctaagtcactaatggaaatagaaggctaattcaggggttaggggccgtcgtcctccttactcccaggagaagagaaaaacccacggcccagcagccagaggcgcggcgaggcggaatcgggccccctccccgggggctcagctccctccagcctcccgcctcacctacagagaaatcccggaaacgcggattcagcggagcgcggtgacggcggcgcgctcaccccgcgcatgcccagtgcccgcgcgcgccgccaggctcgcaagcaccgcgtaggccagctggccggatcccgccgtctgtcatggcggcccccatcctgaaaggtgaggtacttcctgctgcctgctccagcagcgggagtttgaggaccggcacccctcgtcgcgggcgcactcgggggatcccgtgggaggagccccgctcgcccctccctc

SEQ ID NO: 39860 - DNA, 2300 bp, Homo sapien
aggtgggagaatccctagagcccaggaggtagaagctgagttatgatcgcaccattgcactccagcctgggcagcagagaaagaccttgcctcaaaaataagaaaagtaaatgaagtttcttctactggctgaacaaagtagctcatgcctgtaatcccagcattttgcaaggtggaggcgggaggattgcttgaggctaggaattcaagaccagcctaggcaacatagtgagaccctggctctacaaaaaaataataaattaaaaaataaaaataaaaataaccgggcgtggtagtgcctgtagtcccaagttactcaggaggctgaagcagaattgcttgagctattatgtgatcacatcactgcgctccagcctgggcaagagagtaagactctgtctcataaataaatttctactgaaagccttttcaaaatagcttcagtggaatttattaaaattttaagcaaagaacaactgtacccatacaatacatgagagtttacatttgtaaaattagttgctttccccaaattcttacgcttaatttttccagtgcagaaacctattttctgtaaagagacagatggtaaatatttcaggctttgtggccaatacagtatttgccacaactactcaacttcacggttgtggcacaaacataaccataggtaatatattaacgggccggcctgtgttccaataaaactttatttatggagaaggaaatgtgaatgtgatataatttttcatttgacctttttttaaaatcacttaaaaatgtaaaagacattcttagctcgtagacccttacaaaaacaggcagcaggctagatatggcctggggggcatagtgagtggacccctgttctagtggatatcctcttctcaaaacctgatgtttaaaagcattttccaggtgtgccgttggtcaatgattgggggtaacgctaaaagaaaaccaggttaatttaacaaaatactaacattagaaaaatagccacatctgattacagactttgtataaagcctctagtctttacttttggctatgaggttttatgactccaggccccacaatacaggccccttttttctcacggtcaaactctacaagacacgtgtccgctattcccctctcctgggctcttccaggtgcacagagggtgggactgcgtgcggtatcatatactggttaggacagcagctccggtctaaggccctgtcagcactgactagccacacacagggagagtcacctaaacgtccgatgccttagtttctgcctgtaaaatgatataagagagttgatagagcggttaaaaaaatcagacaataccatactagcctaagcacagcgcctggcacacaaagactccgcagtaaaaggcggctcctattattggaacaattagcatagaaactcaactgccgctcctccaggtgggcctcagagggggtcgaacaggaccagacccaggagggccccacaccaacttccggagggcaggactctgcctgccagtgagccccagatccagggactaaggcagcaggggtgaaagcaggtagggggaaaggcgggatttgggggacaggcagcatgggggagggagcaggcagcgggggattgaggggaactagcagcacgggggttggggcacaagcagtacgggggaggaagcaggcagtcgggggtttggggggacagggagcacgggagacgaagcaggcagccgggggttttggggggacaggcagcgggggagagagcaggagcagggggttttggtgggacaggcagcgggggaggaaggaggcggcagggggtctgggggagacaggcagcgagggaggggcgagcggggctcctcccacgggatcccccgagtgcgcccgcgacgaggggtgccggtcctcaaactcccgctgctggagcaggcagcaggaagtacctcacctttcaggatgggggccgccatgacagacggcgggatccggccagctggcctacgcggtgcttgcgagcctggcggcgcgcgcgggcactgggcatgcgcggggtgagcgcgccgccgtcaccgcgctccgctgaatccgcgtttccgggatttctctgtaggtgaggcgggaggctggagggagctgagcccccggggagggggcccgattccgcctcgccgcgcctctggctgctgggccgtgggtttttctcttctcctgggagtaaggaggacgacggcccctaacccctgaattagccttctatttccattagtgacttagaagctacccggcgcc

SEQ ID NO: 39861 - DNA, 2300 bp, Homo sapien
cttgaggggttctgagctccaggttctgagctccagatggactcctcccccgccccagctgccaggcttgggtttccctttttttttttatttgtttgatttcatttccccagacagctcttatctactctttatttttgttggtttatgtctttttgttttcctttactatcattttattggggttttgggggtcaagagaaaagcatgtgctaagtccaccagatttaaccagaggtcaaaaaccttccatttttattgtctaaatattattcagttaaggattccccctccccatcttagtccccaactgcctttgctgaatctttagcgtctcctgccacagttattgcagtattccctgactggcctcctcctcctggaccagtgatctgcccacgacccctccctcacacctgtccccatgccccagacccacaggacagggtccaagctcattagcttagaaagtacaacccttggaatcacatgaattctttttttgttgctagtctcctaagttgcattcattcactcagtcatacaaatggtgtatgttttccccacaatgtcaccctgtttgctgcactgtgcttgagtctatgctctgcttccagatggaagatctgtgtcctcccacatctgcctccttgtcagagttgagtctggtgatcatctctgacctgaagctttctctgaaccatactcgttatgcaacctgttgctgcttttctgcctggttgtacttctcttgttacaattactgcactgtgttcttttttaaatttgtacatttttgcagatttctctgatgcctggcttaatagaagacagttgccttctcatatctgcctctgcattcagtgtattggggtggcacatgtcgttttgcttcggaaaattccactgcattgtatactgaggggataatgcgagatgagaaaggaaaatcacacgttagtgttgttataaagatagtattgactttacacaccctcagaagggggtcagggatgccaggatgacattcactaccctagtgtcacttaccacattgcatagaccatactgtgccgtacagaggcacatatttctgaaacttcctttattcctaatatattttgtagaaatttctatatcaatatggatatgtgttttttattgcagtgtactttattttttcaaataactgttcgtgtgttagatgttgaacggtgataggcctgtgagggatagttggagaggtgagtagaggccttataaaaacacttaaacagcagatgagtgagaatatgctctaaacatgggagtgacagaaggtttttatctaggttgggaagaaatttaagattaatatttcaggaatgtatgagtgaattagaagaggagaaacaaatagtagggcaggagatcatttagaaaatcataattatttagacttgagtgacagaatgctaagaaggagataagggtcacaggaatccagagatacgaaggtggacaggagaaatggcaggtgtgtccacagggcaggaggaggaggcttggcaatgcggagcattggttgcacacctgggccttggggctgatggtggtgtctggacagaaacacaaaaaggacaacccaattttggaggaaagagatgtcctctgacttcaatttctttacgtcccttctacctctgaattatctgttttatggcctgtttactattaaatgatccatttaatagcatttacccttagctttatgagtaccatgcactaataattttgaagtatgctacaagtcaaaaattgttgtgtaaaaattgtacttcctttacctgcctcttgcttctgttatacttaaataccagatagagatgattttgggaagtttgatttatactgacttttgtatttgcagttgtatttattttttaaaagtctgttaaaatgacctagctatggatttcttaaattgctaatacatgtgcagatttagtgctgtgtcaatgtataatagaagcaaatactcattagactaccttaatttaattatacagatgcaggacagctggagcacacattgatgaatcattgttccctgcagctaatatgaatgaacacttatcaagcctaattaaaaaaaaagtaagtacatgatttcaatgtagataatggcaattaggaatttattcgtttttattttttatttctagaaaataaaacttctagaaatatattcaagagttgtcttaaatatgctattgatgatattgttcttttcacatagcatttttaagtgaattacagag

SEQ ID NO: 39862 - DNA, 2300 bp, Homo sapien
gcaagaggatcattggatgccaggagttcaagaccagcctgggcaacaagagtgagaccccgtctctacaaaaaataatcttgaaaaaaggtaaaaccacatatgtgatattaataccttacaatatgctttttcaaacaggaaataaaaaaattgtaccctatgccactgccactgctttgcattcagagaatagcagagttatactatttgatggtggaagaactgatccccatttaatggagcatgcctgtaaagaaaaggaacaaatatttctaaacatacaattatatcttaatcctaaaaaccctacagagaaaaaatgatctccatcttatgactagggagactgaggctccaagaatggaagcatttgctggaggtcacacagaagcagggttctaacacaggtctcatctttaagacctatatgctttcttcgacggtgcactgtccggatgggtatagcatctttaattggttcccttagtggaaaccatgtccagaaccttggtggaatcatactacctcttctactaatgagatccttccagagcatgtcttccagcttttctgtgtgacagaaccctttggttgtctggtgaagcctataaacaccttctcaaaagaagacacatgctactttattccaatgttcagtagcaagatctagggctgggtttaataaaaatgtagttctgagtattgtggcagcaaataaaaagagctgatttctgaggatgagaaagtcacagatattcacactgttgttcgttaactattcattgataagggaaaggctgtctttcggttagagcttagtaaaaaataaagatcttttatgggtagatgtggtctgttaagtcagtgtaccagctattcagcgctcactgggaataataaaccttgtaccttgagagataaaccgcagcaaaggcagggggctttttccctatgtacacttgggctgctgagttaacatattattaatctctgaagtattaagttttagttgttaaaggaagtgacttgcagaacttacagagccataggattgaaggtgaaaaatcttgtgagtgcaccccttgaattgcacagatgaggacattagagcttaattaaaacagggaagtgacttgcccgagtctaataccaagggggactaatgtaattgataatgtgttacaaaatgctgagatgtcaacaaattctgacacaataaagaagtttgtgggccaggcatggtgactcacacctgtaatctcagcactttgggaggccaaaggcgagtcgatcacaaggtcatgagtttgagaccagcctaacatggtgaaaccctgtctctactaaaaatacaaaaattagccgggtgtggtggcgtttgcctgtaatcccagctgctcaggagcctgaggcaagagaatcacttgaacccggaaggcggaggttgcagtgagccaacattgccccactgcactctagcctggtcgacagagcgagactccgtctcaaaaaaaaaaaaaaaaaaaaaaagtttgtattcctctttctacacaggcacttaaattctaatttctctattgtaatgtaatgaacttaatcagtacagtgtatttttagagtgaatatccaagtggagtttttttaaagaataaaggtcagagctcagaaactgatgtttctaacgtgacttaataacagatctttctatccaactgttcggaaatgaaaatcttttgtaacttggctagtggttcaagaatcaactaaaatcaatgaatctatttttccctctgaaaaggcacacgtttacaggagccaaacttcttcctctttatttgtaataacaaaaataaaccgaagtcctgacctatttgtaatatttttattcctaaaggaaaaaacaggaactttcattgtacttcaacattaaagttattacctcagatattttgccagcttagcacggcaaaaatcagtttcagacaaaagagatcaactgctctctctaggaaatacttaattggggtggtgcctaggaaatgcccaggggtcctgtaacagatcggtttttcccagagggtttctgcagcatgggtcctggttggagggcaggcattctgctctgatttttcctgttgcctggctagtgaccccctacaggaagataacggctaagccaggagggcggagcagcccactacacatgtctggctgctcttatcaacttatcatataaggaaaggaaagtgattgattcggatactgacactgtaggatctggggagagaggaacaaag

SEQ ID NO: 39863 - DNA, 2300 bp, Homo sapien
ccatcttgaaagaaagaagagagagagaagacagagaagagacagaaggaaggaggagagagagaaggaaggaggagaggagaggagaggggagaggaggggaggggaggggaggggagagaaacgcagcctttctggccccagatgtgctgaagtagaatctgccagttaacaatatccccaggtgatttgaatttgtattaaagtttgagatgcagttgtccaaatcctttattaaataggtatgcttagatttttctcatataatctcaaatgaaattataaggggcatggttataaacaattatctagaaatgatctctcaagtccttgaatggcatttccaaaaacatgagatgataacatttactgtaactcaaggtgaaaaatgtttcatcaaagactgtcaatgtctgcccaaaataatgggagcagctacatggaacacaaagacgctctcagggaccatcaagggaagtctcatttgtgacatctctgcaatgtgccatgtttcattttcaaagacgttttctgagtgtgatcaaagttctctgtcgtgcatagaccatttcagtttgggacatcttggatgcacagagaaagccttgtgggtcaggagttctggtatttagattctttgcactgagttactgctcatgggtggcgtgtctttcgagatctcagcttctttgtcagtgataggagggactgggccagaccggcagttttcaagcaatctcggaagtatctacaaaggcgctgtgcagcctacccttgtgcagagaaagatgagatccttgggtgaggatctgaaaccctcgtgtgaccaccccctacccagcttaatgagagcggtcctgataacatgtttttacgtattgtatttctttatgcatcctcatgtgaacaaaggatgttgctattgaaagaaggctgagaacaaacgtctattaaggaaggtctcatggaaatactttagattgtaagtttaaggaccatgtagttaccctgaagtctatgggacacagaacacgtatagcactgaggatagtgacctcagtaaacattgcaagattgattattaattgtcatctgtaggaaacaataaattcctcttcgaagtttagcctgttaatgtcttttaaaattcaagagggagaaaattgttaagtacgctgagttctgagttcctctccaaagaaccaatgtgtcagtatattcagcttccctgttctttgttctccattttaaagtttaactttctcattctttacatctctttacccctagtttcagtaaacagcccgctcctagcctctatcacctgctctgtccttagtcacctgttctgtccttagtcacctgttctgtcctaagtcatacgtagtcacctgttctgtccttagtcatccatagtcactgttctgtccttagtcacctgctctgtccttagtcatccatagtctcctgttctgtccttagtcatccgtagtcacctgtccttagtcacctgctctgtccttagtcacccttagtcacctgttctgtccttattcatcctcagtcacctgttctgtacttagtcacctgttctgtacttagtcatctgctctgtccttagtcatccttagtcacctgctctgtacttagtcacccactctgtacttagtcacccttagtcacctgttctgtacttagtcacctgctctgtccttagtcattcttagtcacctggtctgtacttagtcacccgctctgtacttagtcacccttagtcacctgttctatccttagtcacccttagtcacctgttctatccttagtcatccttagtcacctgttctgtccttactcacctgttctgtccttagtcatccttagtcacctgttctgtccttagtcacctgctctgtccttagtcaaccttagtcacttgctctgtccttaatcacctgttctgtccttcgtcatccttagtcacctgttctgtccttagtcatccttagtcacctgttctgtaactgtcctgccagtgtggcttgtacctctgctgtctttaaaatagccaattggaattagcttagactgtgcggtccaaccctagtcagtgggggaaagatatagcagtagggctagctgcattagaaataaggcccccttcccctcccttgtccagtgtgctctcgccattgttccatccgcgagatgcacccttctataaaagtaaattgccttggtgagaagacttctgcctgagtgctattttcacttggcagcactgagcatttacttccaacatc

SEQ ID NO: 39864 - DNA, 2300 bp, Homo sapien
agctactcaggagcctgaggtgggagaattgcttgaacccacgaggcagaagtttcagtgagccaagattgtaccactgcgccctggcctgggcgacaagagccttgagactccatctcaaaaaaaataaaatcaaaaaaagcatcatccaactggccatttgagtttttcatattttgtatgacttctgtgcctgaatgcatgttaataaacatgcttttttttccttgatctgtctattcccagcggtgtttttgtttttgttttgagacggagtctcgctctgtcaccaggctggagtacagtggcgcgatctcagctcactgcaatctccgcctcccgggttcaagcgattcccctgcctcagcctcccaagtagctgggattacaggcacgtgccatcatgcctggctaattttttgtattttagtcgagacggggtttcaccatgttggccaagatggtcttgatctcctgaccttgtgatccgcctgcctcagcctcccaatccagttggctttataggatcaaatcagtgaagtctgagggggaaaaataaaccctatagagggaaggatctgttccaggcctctctccttggcttgtggacagcccccttctccctgcaactcttcacaccatcttccccctacatgtctgtgtctaaatgtcctcttctcagaaggattacggcccatcctaatgacctaatgacctaattttaattgggtacctctgtggagaccatagccaaataaggtcatgtgctaaggcaaggcagggggctagtccttcaccatgagtttgggctttataacattgtgccattgtgcttaaaatactattttcaaaaacaataaaaaatttaggaaaggtagcattgttttacttattttttcacatctttcagttagattcccatacctgcttctgcattcaatctgctgccatgttttgtgctttgctgttgttgttgtcatttttggctgaagtatataaagaaaatccagccttatatagatttgtaattggaaaaagggagggtttttttggggggtgcaggggaaccgggtctcactctgtcctccaggctggagtacagtggtgtgatctcagctcactgcaacctcctgggctcaggggaccctcctaccttagcctcctgagtagctagatgagactacgggtatgcaccaccacacatggctaatttttgtattttttgtggtgaaacatggggtttcgtcatgttacctaaggtggtctcaaactcctgggttcaaacaatctgcccactttggcctcacacagtgctgcgattataggcatgagctacctgtagtgcccagcctggaaggggtatttttaaagccttttcagataatgtgactattcttctttcatattacactaaaactcaggaactggtaattgcttaaaggttagtagccatgtaaagtctgaaattatatcaatgaaatttttgtagttaaattaaaacctattggtatatcttgtgcttgcaagagccatttacccattcatcattttaaaatatcatgcattatttaaaaaacattggtttggtttactgcattgtgccaaccttccaaattctgacacattgcatcatacagtattgaaaaatcacaatggttgctattaccacagtcctcatgaaaaaggtcttcaagaactgagaaggtgtcaagctcatagagcaatataagttttccaagattcaagttttcacttgaaagcttcaattttattgttggcaacattacccactgttttcttttgaagtgaatttgtttttgaaaaaagtgtctgccagactcaccactttatctgctagttattctttcaagcaaaagtgatgttccacgaaaaaagtagctctcagcttgcagctcagaggttgtttcctacaggggagctattgagctttggtatgcttcccatgtgcttcatgcaagttccatttagtcacatggagtattcataagatgtgtactccacagttgacatttaataaaattgactttttttttttttttttttttttgctatcacattcaggctattcttaagcgtttttctgccatgatcacattgtgatgaagaacatgatggtcactagtaggtaactttctgtgtcattgccttactctcagtgaggtgctagtggatttacctacccctgcttttgcatcaccactgtaaatctaatagtgaaaaggcaaatgatgtctcagtatcactgtgaaaacatttttcccttggaccagctgaaagca

SEQ ID NO: 39865 - DNA, 2300 bp, Homo sapien
aagtccctcaagcttcacctgaaataccatttcactgagaagtcttccttgtctccagactaaattagattgccttgatatatgctcccagagaaccaagaatgtccccttttcatcccacaggtaactccttgttaaatgttgtacaaggaaggcatagacagaattcacctttcactgttccactggtgcccagcagggtatgcaaaggaggaaatcagctgtgctctgaaagaagcaccattccagtaaaggggaggaaaaggtcatcagactgcaagggctcaacaaaagtacaaggtaaggaggcagagggtgtgggctgattatcaactaagaggtttgcacggaaaaagggaaaaaaaaaaaaacagaaaaacagggccgggtagtggcagaaagagagggtggatctgtgactgttcgcaggaagagaggagcgggagcaggacagacaataactgatagtcaggagctgggtttggagataaagagggaacaagagaaagttaagttctgtgttttcatggcaaacattgcacaaaagtttacaacttcgtgactaacagtaatctggggtgattcacaacaaatttacacataaacacatatttactgactttatacacagcaatcctaacgtgaacacagaacctgctttatcttttcgcacactgttctagtgtagagatgtctggtctcagttaaagaaagcataaggagcattagttgtgcacactgtccacacctgtgacttttttccaccagtactaaacctagtgcttcttacagtacaggacaatgacagccacagaaagagagaagctccttttactgtgtaatgcttcctgctggccttcaaatacttgttacttgagagatctccattcacctggctttgtccccaaaggtcatcatctaccaatgatgttgttatttgatgttaatcatgtataaagaaagtagctaccatcctggccctgattagaacttcccactgaaataccgtcctgcctaaaggtagcacaggctcccattatggtggtggtggggagggggcgggaatatatatatatatatatatatatatatatatatatatatggtaaagcattcggcattcttttaaagtacaactatccttgaaaagggttacatattaaaccatttttaccacagccaaaggggaggagaaagatccaaaagtcctgtggatctgctttaacatcaataaaacagttatccacccttcgtagcttttagtgaaggctacaaaagtatgctttttatggattacacatgtgcacgcaactactttaattactacagaaaaaaacgaggctccttattaaaaaaaaatcagaaacaagtccaacagactctgaggaaatgaagcaagagtgaattctgaaaaggtctaataaacagtatggaaatatccttgtgggattgttcttcagctatgcataaacatgtaattatcatcattactgtgatggggaaaaacacggaccctaattctgaaacaccctggtagcgagagacgggcaggaggggctgctgcgcactcagagcggaggctgaggaggcggcgtccccttgcaaaggactggcagtgagcagatggggacactcgagctgccccgcgacctgggccgagctgcctacaacctgggcccaggtgcctgcaagaattagacctccgataacgttaacacccactttctcactgctctaattgtgtgcatcccggcgcccaggggcttgtgagcagcaggtgcgcgttccaggcagctccagcgacccttaaacctgaccgcgcgcacgtccggcccgagggagcagaacaagaggcacccggaccctcctccggccagcacccaccttcacccagttccgtcagtcgccaccacctcccttcccgcgtccgcagccggcccagctggggagcatgcgcagtggccggagccgggttgcccgcgccccagcaggtagctgtactgcaactgtcggcccaaaccaaccaatcaagagacgtgttattgccgccgaggtggaactatggcaacgggcgaccaatcagaaggcgcgttgttgccgcggagccccctgccccggcagggggatgtggcgatgggtgagggtcatggggtgtgagcatccctgagccatcgatccgggagggccgcgggttcccttgctttgccgccgggagcggcgcacgcagccccgcactcgcctacccggccccgggcggcggcgcggcccatgcggctgggggcggaggctgggagcgggtg

SEQ ID NO: 39866 - DNA, 2300 bp, Homo sapien
caattgtgctccagaggtgaaagaggcagctgttcttaccgcttccaaacaccaagctgtaggaggtgcagcatcatcaaggagcaatgccctggatgcccgtctgctcggaaccacaggtagctcagggcctggaccaagaacccgggcaggaggacagcaagggccagccacccccacagaagccgtcctgtggtgaagtagtaagccacggtgtaaaggcctgggtgagaaggggaaaggcaagcaggttgttggaaggctggagtgagactgggtacctgcattttaaacaactgaacattttctggatgttatgatgttctgacctcttaaaatctttctggctggggagtgactgtccctcccaaggctagcaattatttcagctagcaaagggcccagccaggagcttgcctttgacatgcgaactaaatctagccagagccagacctcccctacctggcccatacccccgcagaaggcaatcttcttttgccttaatcatcccagggcccagtgccaggaaactagggaccacccttataccccaaagccacagaaattattcaaagggctaatctgaagctggtgctctgccctagcaaagcgtctggcctcaacttcccctggttcctgtctcctgcctcctgaccaccctggtgacattcccctgtggcccggcatggtgtgccatgtctcctgtcctaggacctgtgagtacagcaaactttgctttccagagtctctcctgtgtctcatcttgtggccacacctaattatctcattaaaaacaaaaccaaagcactttgggaggccgaggtgggcagattgctcgacgtcaggagttcaagaccagtctgggcctctctactaaaaatacaaaaatgagcaagtttgctggctgcgtgcctgtaataccagctactcgggatggatgaggcaccagaatggcttcaactcaggaggcggagtttgcagtgagtcgagattgggccactgcattccagcctgggccacagagcaagactcttgtctcaaaacaaaacaaaacagtaaccaaccaacacagtgtccccatcaccagcaagagtctcctaggagcaggctgggagccagcagagcctctggcaacagggacaggcattcactaaatgacattgtcagggctttccagagctgttgggcaatatacgacatgtgtgaagcgcctagcatcttgtgcatcctcgagaacgatgaaacctcctctctggtttgtttgcttgtttgtttttgatggtggttacgcagtggagagagaatgtgcactccgcagtcagtaactccgcactacgaaaccgttagtccctgtggggtcacagctctctctgtggggtcccttttctcctactttcacatggggaactccctggcctggaactctgggcctccccaatactcctagcacggcctcctcagggttgtctgaggctgatcttggaggcggtgcgctggtagaggcaccgcacacaggcatcgtttcacacaactgttacttaggttttccaatagtaaagttctaagtggatgaatgaacacaagccgcggattttagggaaactgggaaaactgccctgaggtacagctgcagacgctgcagctctagaccgcggggtccgggctcaggcagcccttagcgcccaggctgggtccggctgtcaccaccccgagcgtcctgcggcagcctcccttgcacgaaaagccttcggtgctgcagggctggggaatgctgacacccagtccgtgcccagctggagggcaagggaggacacctggggtgggtgccgacccccgcaggtcctgtctcagcccttccagtccggggcgcggagccagggcgcttgcgcgtcctccgtgtgcgtcctgctcggcgcgcctcggaagcagcgggacctgcggggacgcccgcgaactcagggaaaagtcccaaggcggcgttcccagggtaccccctcttccaccccagggactctgcccgggaaaaagcttccgcagggagcccggcggaagtgggcggagacgctcctcccggcactgaaggagttacgcgttcaaaccagaagggcgcgaaaaatggggccatcttgctccgccgcggctggcgggctctgggttccccctgcgacggaggtggcctcgaagggccgcgtcccgccccgtcctaaaccccgaagcggagtcgccgtcctacagggccgcgtggatgcggagccctgtccccctccccccgccaccccttctgcgagcggcctccaagt

SEQ ID NO: 39867 - DNA, 2300 bp, Homo sapien
taattatctcattaaaaacaaaaccaaagcactttgggaggccgaggtgggcagattgctcgacgtcaggagttcaagaccagtctgggcctctctactaaaaatacaaaaatgagcaagtttgctggctgcgtgcctgtaataccagctactcgggatggatgaggcaccagaatggcttcaactcaggaggcggagtttgcagtgagtcgagattgggccactgcattccagcctgggccacagagcaagactcttgtctcaaaacaaaacaaaacagtaaccaaccaacacagtgtccccatcaccagcaagagtctcctaggagcaggctgggagccagcagagcctctggcaacagggacaggcattcactaaatgacattgtcagggctttccagagctgttgggcaatatacgacatgtgtgaagcgcctagcatcttgtgcatcctcgagaacgatgaaacctcctctctggtttgtttgcttgtttgtttttgatggtggttacgcagtggagagagaatgtgcactccgcagtcagtaactccgcactacgaaaccgttagtccctgtggggtcacagctctctctgtggggtcccttttctcctactttcacatggggaactccctggcctggaactctgggcctccccaatactcctagcacggcctcctcagggttgtctgaggctgatcttggaggcggtgcgctggtagaggcaccgcacacaggcatcgtttcacacaactgttacttaggttttccaatagtaaagttctaagtggatgaatgaacacaagccgcggattttagggaaactgggaaaactgccctgaggtacagctgcagacgctgcagctctagaccgcggggtccgggctcaggcagcccttagcgcccaggctgggtccggctgtcaccaccccgagcgtcctgcggcagcctcccttgcacgaaaagccttcggtgctgcagggctggggaatgctgacacccagtccgtgcccagctggagggcaagggaggacacctggggtgggtgccgacccccgcaggtcctgtctcagcccttccagtccggggcgcggagccagggcgcttgcgcgtcctccgtgtgcgtcctgctcggcgcgcctcggaagcagcgggacctgcggggacgcccgcgaactcagggaaaagtcccaaggcggcgttcccagggtaccccctcttccaccccagggactctgcccgggaaaaagcttccgcagggagcccggcggaagtgggcggagacgctcctcccggcactgaaggagttacgcgttcaaaccagaagggcgcgaaaaatggggccatcttgctccgccgcggctggcgggctctgggttccccctgcgacggaggtggcctcgaagggccgcgtcccgccccgtcctaaaccccgaagcggagtcgccgtcctacagggccgcgtggatgcggagccctgtccccctccccccgccaccccttctgcgagcggcctccaagtcgcagggtccccctggacggccgggggtcgggggagagcccgggcgcccccagacttgcgctcagcacatcttggcatcgcagcactttgcaaagcttgtgatggaaggaagggcggatacatctcccctgcttctgcgaggggatcttgcatgcgtggggcggggggatcgtgcatgggcgggaggaagtcaagcaccagtcgggaggggggggaaccgagcatgggtggaggaaaatcatgcatccttggggggatggtgcatgcgtgggcatctactaaggacgggaggacgtgctctgcaggtgggatggccaccaccgtgcgtcaccggcgcgcagtgctgggcgcaggctggggcagtgcccgcccgggcataggcagcctgtgcggctcccggcgccggggtggggttaggggctgcaggggtgagcacagcctcgggctgccgcactcacgcgcgctctgctcggccgcctgcagcagggccgagagccccaggagcctcgcgtgcatcttccgtgccgaccccgcagcctgcgcccgccccttcccctgcacgcggccccgcgtcggggaggtttccggcccggggcccgactgcgggtggcatttctggctaagccgttaggcgcgaattgtatgtctggtttattcgtagtggccagcaggggagggagggaggatgcttggggtttctggcttccagggtgggtggggacgaggtggtggagtccagctcaggtccgggctcctgataagggcagaagcgggtt

SEQ ID NO: 39868 - DNA, 2300 bp, Homo sapien
agaacagggcttgaacccaggaggttgaggttgccgtgagccaagattgcgcctattcactccagcctcatgtcagagctagactgcctcaagaaagaaagaaaaaaaaaggatttttcttgttcaaaatgataatggagtgacatcaaaggatttctgggttgtgaaaattcatagtaaaacccaccttatcatataatactattttaatatattttgaatttatcattttacctaggatttttgcatctgtgcttgtcattaaaataattttctttctatgtatatctttgtttacaatcaaaactacagcagtcttttaaaataagctgggtaaagttcggtctttgtttcctggagcaaattatattaggtagcagttaactgttcattgaaactttggcagaattaatctgtaaaagtacctagacctgaatagtctttgactaccagtttaatttctctaacactcactggactattcaaattctctctctctctctctcttttttttttttttttttttttttgagatgaagtctccctctgtcacccaggctggagtacaatggtacgatctcggctaactgcaacctccacctcccaggttcaagcggttctcctgtctcagcctcccaagtagctgggattacaggtgtccaccaccacacccagctaatctttgtatttttagtagagacagcgtttcgccatgttggccaggctggtctcaaactcctgacctcaggtgatccgcctgccttggcctctcaaaatgctgggattacaggcatgagacatcgtgcctggccaagttctctttcttcttatgttaatttgaacatgctttcgccatgggatgtgcctgctcccctttcaccttccgttatgagcataagctcccaaggccttcctagaaactgagcagatgccagcaccgtgcttcctgtaaatcctgaagaactgtgagccaatcaaacttcttttctgataaattacccagtctcaggtatttctttatagtcatacaagaacagcctattacaatatatgggtatatacatgaatgacaaagaatgtctccctgatcagactctggacagcctcctccgagctctctgcacgactgggcccaacctgggcattccttcctctgttcctgcagagtctagttttagcaagaatcctgctaagtcagtttaatcccaattccccacctcaggtgtctgaataccctccatatctgaccaaattccaacacctgctccaccccacccccatccccgatgtggatcaacttggcccaccctcagcaggaatcctgttaggtcagggaagccagaacccccacttgatgtccccttctcaatgactttccatccaccgtcccccacactgctccttggctataaatccccacttttccttattattttcggaccccaatctctctcccctgctgcaaaacctcagtgcagtcccttacatctaaggaaatggttctgaataaaagtctgtcttaccgtttttaaaacgtcagaatgttttcagatacgtgtgtgtatatatctccatatctgtaaatatatataaatatagatatagatatctccgaagagaaggttttccaatgtgcactttttcttcttgcacattgcgatcttaaccctcaagcacatctggaaaaagcttccatgaggatacagcctgggatggatttgtgggcgaggtgtagaccacgataccgggtaacgtgccctgtgttttctggacacagaactgtaagatttcaaaaagacccaatcaatgattctaacccaactctacatatatttactcaaacacagtattcctccctgactagtggttaacggacttgctttaggcggccccagaggcggtggccagtttagccacctcccgaggaacctgcgcagtcccgacgctcaccaagcgctttcctggcggttacagggttgggggcagcgcagaacccgcttctgcccttatcaggagcccggacctgagctggactccaccacctcgtccccacccaccctggaagccagaaaccccaagcatcctccctccctcccctgctggccactacgaataaaccagacatacaattcgcgcctaacggcttagccagaaatgccacccgcagtcgggccccgggccggaaacctccccgacgcggggccgcgtgcaggggaaggggcgggcgcaggctgcggggtcggcacggaagatgcacgcgaggctcctggggctctcggccctgctgcaggcggccgagc

SEQ ID NO: 39869 - DNA, 2300 bp, Homo sapien
gttgaagtgcagtggtgcgatctcggctcactacaaccaatgtgtcctggtttcaagcaattctccggcctccgccttttgagtaggtgggattacaggtgtgtgccaccacacccagctaatttttgtatttttagtaaggacggggcttcaccatgttggccaggctggtctcgaactcctaacctcaggcgatctgcccgcctcggcctcccagagtgttaggattacagacgtgagccactgcgccctgaccggttgcattcttttgaatttattataagtctttccaaaaaagttaatcgaaatacgcatgtatctctgggagcaaaaagatgacttgaatagaaaaagaggcagattcgcaataagcagttcccagcttgaaggtgcctgagatatttttctttcacaatcttattgaacccacacctggtgtaataacctggaagcctccccaggaggcggtcagcacagaggctagggaatgaggctttccaggccattacaccagttttccatttaccagcagggtgaccttgggcaatttgtttcaattctctgaaccccagtgtttttcttctctaacatgaggattatattgcctggtcaaagaatcatagtgtggcttcaataagacagaaggaaagggacagaaacagatccgatagaatactgtagctagctcattgaggcagttcacagacggtgtttgggaggaacttggaagaggctgagccatgtcttacccagcaccagcaaggaaagctgtgtttcggttctttcttttctctttccacaatctcactgctcctaggtcaggcatggctcagcctcttccaagttttctcccaaacaccctttgtgaactgcctcaatgagctagctacaggatcccactgcatctttctgtctccttctttctgtctctctgaatctatttctctctatctctctctctctctctatttccatctctctctgtctgtttctatctctctgtttctctgtgtctctctactgtctctctgcatgtctctgtctcttcctctgtctctgtttttgtttgtccatctttctggatctctctctgtctttctctggcagggttgaagtgggagtatacggcaggttcatgtttgggtgcagaatggcattctgccagcggtagagtggctgagggtcactccactctgggtgtctcatgccatgtggctgcagtatggggttctcattggaccaccgtgacagtgtagggtggatgtcattcctggaaactgagcctcaagctgggttctccagcaatgccaccaccccccaccaaccctgatatcctccgaataaactcttcccttccttggtcagcgagagccagcgtctgctgcttgcaaataagccactgagacatcaggaaagctgctcacagaattacaatgaaaatcagtaataaataaaatgtttcttaaatctttagaatcaaggaaaacctgagggatacttggagagtcgctaacagcaccccaatctggcagttgtagctctgcagggtgggcccaagctggcccagaccctcaccctccaagggccacactgggggctcactttctgaggagtgccctttggaaacgtcccaggaacacgtctagtgggaaaagagaaaagttggtccatcgaggagagtgttctgcataaggggagagatgagaaggtagccttggccagaggaagaaacttcattacaaccagctctccttctgcaagggaagagggtgaagtttgagtttgtcttgcaggaagacaatcaaactaaagaggccaacaccagcttagagccgagcggccccctgctcagagcttccctgtggctctcctccatgtgatccagaaggagggactccagtgtgaactgcctgttccagaaaccccatcagaactgcctaacctagaaaaccaaacaggaggagctggcaccagggctccaggctgaaagctaaatccagcggcagccagatggagacaatgtgccatgtgactgctgactgctcagggcaaatgacaccaggggttagcgattagaagttcacccttgactgtggcacctcccttcagttccgtcgacgaggttgtgcaatccaccagtcttataaatacagtgacgctccagcctctggaagcctctgtcagctcagcctccaaaggagccagcgtctccccagttcctgaaatcctgggtgttgcctgccagtcgccatgagaacttcctaccttctgctgtttactctctgcttacttttgtctga

SEQ ID NO: 39870 - DNA, 2300 bp, Homo sapien
gttggcgtggtgattgtggtgactttacaagctgcgatatggatcctgataagccttcctgcaccccatctgtctaaacatttaccaatgcccatggggattggtctgcattatcttctatttcaattaaaataggctgggaacacttcttagtttccaaagatagagcatacaattccaaaatgctcctttaagtcaagacaaattagatcacttatttacagaagtatcttgtcctgttagctagatcagggtatctgagtaacagctccagggtaggatttccaggtgatagagtaattattgcctgtcccatgaactactggggaaagaggcatagacagctataagtcacaatggacaattacagtttgggttggagagggaaagtttaattcgaaatttagatgttagttaaatggtcatctcctgctgggtaaatgaaggcaaaattcaaataaatacagaacaaatgcatttttaaatgcccatagattccctaacaaaactgaaacaaaaatcaagaaaacaattccatgtacaatagcatcaaaaaataaaacacctaggaagaaacaaggaggtgaaggatctacacactgaaaatgaaaaaaaaaaaaatagtgaaagaaattaaagaatgtaaaaataaatggaaagatatcctgggctgaaaattggaagaattaagattgttaaaatgtctatcccaaacaaaacaatataccgattcagcacaattcctatcaaaatccccatggcattctttacagaaataaaaaaaaaaatcctaaaatttgtatgaaatggtgaaagaacccaaatagacaaaacaattctgagaaaaaaaaacaaagttgaagacatcacaattcctggttttaaattatattacaaagctacggtaatcaaaacaatatggtattggcataaaaccagacacataccagtgaaataaaattgagagtccagaaacacatcgaaacacatatggtcaagtaacttttgacaatggcatgaagaagacacaatagggacaggagagtctcttcaataaatggtggtgggaatactatttccatatgcaaaacaataaaactggacccttctcttttggcatatacaaaacttaactcaaaatggataaaatacctgaatagaagaccagaaacaagagactatgaaaataatggtagagttctatatgttttgagctacaaagtattcaaattacagcattagggagaaaaaacaaagcacaaaccaatgtttaatttttaagtggagatttcctggagcagagctgcagggctggggcaaggatggaggctcattactccttttaccctttgaatggtccttgtgggcaattcaacattttctaaaattaaaaataaaataaaatttcagagggggattgtgggcatgtcaattgtttcgatgtttctcaaagtggagagaaatacctagtacatattttagttgatacattcagatcacatgggtttcttgaaataaatcttttggctttagttttactaactctttacctagtatcccactgagttcttttcccttataggctgataaggtcattatcttctccacactgtgccccacaagagcctattcaccccataatctcaaagcctccttcatgagggcagaaatgccccctgaatcctgcaatgaattaactctctactctagcgggatccagctctggcctcaaggtctagacctccagagagtggccagccccaccttcagaaaataagaggcatttgattcctgaaattattcattgaaagcactgttcttttcttttttgaatattaacaagtaaatattccagcagatggaaaacaggacaatgtaacactgttcttatcatcactatcagctgggaccagaacagacactcaataaacagcctcacactacaatgaagcttggagaacaaaggagcatcaaagggacatggagggcaagggtagctcttctgctccccaatcacatgcactccccgtctcaccgcaacatctgtccctgagccttctcccagcagacctataaatccaggctggctcctcactccccacacatctgctcctgctctctctcctccagcgaccctagccatgagaaccctcaccatcctcactgctgttctcctcgtggccctccaggccaaggctgagccactccaagctgaggatgatccactgcaggcaaaagcttatgaggctgatgcccaggagcagcgtggggcaaatgaccaggactttgccgtctccttt

SEQ ID NO: 39871 - DNA, 2300 bp, Homo sapien
ccgaaaggccatcacctcagaagacagtgctctgatccaagggtttgtcctgggaaacagtggcctcaccagaaccagagacaccaaggaatctcatcttgactgtggggtcatccccaaaccagactcaccttactctccttcctgccgcaaggtatggatctcaccacccccgggacatggagttggctcacgtccagtacctggacccgtgctttcttagctcatgctttcctgaggaccctgcagatgaccccttagaatggtattttgctgggatccccatttgtcttcagtgtaacccattagttaaaccgcctactgcaaggaaaccacaaggcttggatcagatcaggaggctgccctacaagttatgccaaaaaatatggacttggaagacctgtctgttataatatcacacccaaatctaaccagctctgccaataacagctctctcctatgttactaggaaaatgcctatggattggagtgtgttctgtgtgcaggaggctggtccaggtttcacttctgcaggacactggacatccccacaaccaccagaccttccccacgtgcacacacaccccttctcattttgcctctacatccatatccactgggcccttcaggcacctactaatgccctagaacctaaaaccatcatctggggcccagttccccaaatagccctaatttcttcctctgctggaatgagtccagtgcccacttcctccaaaggtgaaattgctgggcctgcaacagatcaggaactcactgcttcctcataggggcagccgacttcactgctctggaacagcgaccacccctagcgaggcttgagatgcctcttccctccttaagactgagagcgccgctgcccccagtcctccatagcccagtgcctgctgccttcacgcagagctgcaggggaggccctgagcacccagcctgctggaccagcgctgtgcacggccctcccatggcggcaggggctgcctggactgcatactgggttcagcaacctcactataggtattcattccctcaggaacaactgcattcttttctcatttccagaaacctcatcccgtttacctcactacaaggaggaggatggtggagagtggtacattttaaaatgtgcactagtctccctgggactccccttcaaataacccaggagggaccacacaagggaaagcttatgcatcccccccacccagtgaccatcttcctaactctgggtgtagggagactcgtaagcctacgggattggtttgggaacagggtatttgagctcacaacacaaggtgatgcaagctaacaccaatctcgctgcagctttggccaccatcctaagggacttctgacagacattaggtgtcacgcaatcatttgatgagtccttggcctggatgacctagacagtcatttaggcttgaactatctaaggccaagcaaaaaggtgactgtcccctctagggaaccacatgctatatgcacatcctttactcgggagcctgcaacctgccctatccagcaacacaagcccaggcggtattcagtctcatccaggtattctccaaccttacttgtctgaatggcttggatttgtttttatggttagaccccagggcctggggaggtcagttcagaccacattccaaatcctcatctgtgtgtgggtggcattttgatcctagtctcctcgcaaggtgtatacaacaatatgcaggccaggctctcctggtggctttaaatattccctcggtccaggtagttcagcctcagccaccagcataggtatcatggggtcaattgtcttaggagtcatgaggaatccatagttgattgctgcctgggcctggccagggctgaccaaagtagacgaggggtcggtacctccgtggactcctgcttgaactccagctttctgccaaatttctcaactgcccttgttaacagttatttaaagtacccaatagaaagtaaccctgaaaaattaggacacctgataccaaaagacccttaaataaggaagtcctctcctctgtgtgcatggctgctcttgctacataagacctggaacacaggactgctgtctgccctctctgctcgccctgcctagcttgaggatctgtaagtaacacaaaacttaaactttcacattgaggtttcaatattgaagctgtgtccccagtctgacctctcactgtggggccaccccagagggacccagcgggtgaagcccctgctgtgaacttctatctgggtgtctggcggctgctgggggtaatggc

SEQ ID NO: 39872 - DNA, 2300 bp, Homo sapien
tcacacctagagacctgagatgcctcataccaccttaagattactgaaaacactttaactcttactcctagaaaattctttagccttaaagtatctaactgccaagcaaggagataactatctcctctagggcaccacgtgctacgtgtacttgcttaactcaggagagtccagcaaaacctgagctgcttagcaagacaagccgaagtggtattcagtctcacccaggtgttcaccaacatctacgggcttggctgaatggctttgatgtgtttttacggttagaccccacggcctgcagaggctgatagagaacaaaatcctaaaccctcctcagtgtgtaggttggtgcttttttcctagtctccttacagagtgtatactacgctatgcacgctggcctttcctggtggctttaaatattccctcggtccaggtagttcagcctcagccacgagcataggcattgtgggctcaattgtcttaggagtcatggagaatccataggtggttgctgtctgggtctggccagggctgaccaaggtaggtgaggggtccctctgtcgatgcctgtttgaacccaagcttcacaccaagtttttcaactgtccttgtcaccagagttatttaatgtacccaacagaaaataaccctggaaattaggacacctgatccccaaagacctttaaataggggaagtcctctctgggatgtgcacagatgctcttgctacataagacctggaacacaggactgctgtctgccctctctgctcaccctgcctagcttgaggatctgtaagtaacacaaaatttaaactttcacattgaggtttcaacattgaggctgtgcccccaatctgaactgtgactcccaggccaccccagaggggcccagcaggtgaatcccctgctgtgaacatctgtctgaacctctggtggctgctgggggcattggctaccagctaagttaacagagaaactcaagcagtttccttctaaacacacgtgtcctaattgacatgtccagtagacatgatcatagctctttagaacattcttttgagagaagtctattcaggtcattggtctgttttccaatcagattatttgttttttgctattgagttgtttgatttccttatgtcttcagatatttaccctttctatcatgtagggtttgcaaatattttctctcattttctggcttgccttttcactcagttgattgtttggttgttttctgacgtgcagatcctttagcattcagtgcatctccacttgtgtcttttcccctttattgcctgtgtcgttggtgtcatagccaagaaatcattacccacatcaacgtcaaagctttatcttcatctgttcctctcatcattttatggtttcgggtctatgtttaggtcttctaatcatttggacttgatttttctacatggtataagataaaggtccaaatatatacatatatcaactcataaggtagtatacattacacatatataatttttgtcactcacacctaaatagagatggaaatcatagacatttttagccttagacaactctttatgtcactgagcttgttttacctgtagcctgatgaggtcattgtcctctccaccctggcccctacagcagattcctcaccgcgtaacctcaaaaaccccttcatgagggtggtaatgccttcaaagcctgcaatgaattaattctctactccactgggtccaggtctagacttccagagaacagtagagcccatcttcagaaagtaagaggcctttattccctgaattcactgaatgaaagcacatcatcatggcagggtcctcatcatcaccatcagctccaacccagccaagacactcaacatagagatgcatgctagaatgaaagctgggagagcagagaaggaaaggaggaacattgaagccaatggatatccacaccctctccaacgaatctccacctcctctcactgagaaggttcaagaaggtttgtctctgagccttctcccagctataaatctaggcagactcctccctccccacacatccgctcctgctctctctcctccaggtgaccccagccataaggagccttgccctccttgctgccattctcctggtggccctgcaggctcgggcggagccactccaggcaattgctgatgaggctacagcccaggagcagcctggagcagatgatcaggaagtggttgattcctttgcatgggatgaaagagctcctcttcaggtttcaggtaagacaagccggcatgcagagctgca

SEQ ID NO: 39873 - DNA, 2300 bp, Homo sapien
ttctcggggattcagaaagctgaatcagtagtggatcagacaggcagcagactaccaaacagtgaccatgacctttttatggcgcaagtttggctttgggaagtactttggaacttcttcttggtccaaccattgagctggtctccgctggttatcatatgaaatccactttttgttgcacatcacaatctgatcaagaaatggttcgttgttgtttcgtagaataagagaagacgacacttcaaagcgacgttttttttattttctgtcagctcgtgaggcacccacttatttagctttttcacctttccaatttgcttcaaatgctgcacaactgcagaatggttgatgtcgaattctttggcaactttttatgtagttgtaagcagatcagcttcaatgattgttctcaattggttgtcgtcaacttccaatggcaggccactatgctcctcatcttcaagggtctcgtctcctttgcagaacttccagaaccaccactgcactgtaagttggctagtgcagtgggccaaaatgcaatgtcctggaccaaaggcattgttgatgttgagagttgtctccactgccttacgacttattttgaattcaactaagaaaattgctggaatttgctttttgtctaacatcatttccatagtgtaaaataaatataaaatagacagaaactaataagtcattagcaaaaaaaaaataaagtgagcaatgtgcattaaaatggtctataatataaccacatttatttaagaatgtattccaatatcaaacggcaaatttcaacaatgcaaaaactggaactacgtttgcacaaaacagggccttctaaaagaaattccactgggctcagtgatggttggagtgatttttgtttttagtgtattgaacaatctttagtgaggacaatgtaacaataaactcaaaatatttaagacatgttctttaacccagaattctacttctaaagacatattcaaaagatattgtcacttatgggcaaactgatgtctataaaattatattcattgctgtttaaaattgtcatggcaaagcttagaaatatacaaattatgacaacttgacaatattttcccagtataaaaatagtaaagtgatggcatgtgcgaacgctggaaaagtatagggaataattgtaacgttgaagctcgatgtgtttgatatacaaagtgtacaagacacagcattagagggaaaaagcaagtgtggaagaatgtgtaaaattgggaagtggtggtttccaagagcagagctgcagggctgggggaacagacgggagcctattaccctttctacctgttgttccgtctgcatgatttaagattttataattaaaacaatcacaaagatcctagaagagggctataggcatgtcaattgtttcgatatttcttaaagtacagatatgttaatgatagaaattttacctgatctgtccaaatgacatttgtttcttaaaattaacccaccatttggctttagttttacttattcttgacctagtatcctaatgagctcatttcacctgtagcctgattaagtctttttgtcctcacaccagccccaggaggaggctacacaccctataacctcttcatgagggtggaaatgtccctgaattctccactgctttaattttctatgccactgggttcagatctggggctccagacagtggcagggcccatcttcagaaaataagaggcatttgttccccaacttaatgaatgaaatcacggtttctttacatttttcaatatcaaaaagaaaatattcaagtagattgtaaacagaaaaataaataagggtactcagcctcactatcagcttggatccagtccagacactaaacataaagcctcaagctatgatgaaagctgggaaaacaccagaacacaaaagggacctggagggcaagggtagccctgccacaaccaatcacaagctccacctcctgtcactgcagcatctgtctcaggccttctcccagtagagctataaatccaggcttgctcctcactccccacacatcccctcctgctatccctcctccagatgaccccagccatgaggaccctcaccctcctcactgccattctcctggtgcccctccaggccctgtctgagccactccaggcaagagctgactaggctgcagcccaggaacagcttggggcagacgaccaggactttaccatctccttcactggggacacaagctcaggttttagagcttcaggtgagagccgccagcattgcagagctag

SEQ ID NO: 39874 - DNA, 2300 bp, Homo sapien
cactcgtttagccttaaactgtccattgcccaagcaacgaggcaattgtccgctcccgggaaccacatgctgtgtgcacatccttaacaaacccaacaaaacctgccctgcctggtaacacaagccgacgtgggattcagtctcaaccaggtggtctgcaacatcccaacccagccaatcggctttgatgtgttgttacggttagagcacaggtacttgggaggctggttcaggcaagattcctcatcctctcctgtgcatgggtgtctgtcgtaacttgtctccctaacagagtgtatcctgtgatatgcaggccaggctctcctgggggctttaagtattccctgggtgcaattacctcagcctgagccatcagcacaggcatctcggggtccattgtcttaggagtcatggaatctatcattggttgctgcctgggcctggccagggctgaccgagttagatgcggggttctctgtggactcatgtctacaccacagcgtccctccaaatttctcaactgcccttgccaccagagttatttaatgtacccaacagaaagtaacccaggatattaggatacctgatcccaaatcacccttaaatagggaagtcccctcctgtttgtgcacggctgctcttgctacaggagaccagggacagaggactgctgtctgccctctctggtcactctgcctaacttcaggagctgtaattaacacagaccttaaactctcacattgaggtttcaacattgagcctgtgcccccagtctgacctgtgactcctggaccaccccagagggacctagtgggtgaatcccctgctgtgcatttctctctgaacctctggtggttgcctggggcattggctaccagctaagttaatagagaaactcaggaaatttccttcgaaatacgcgtgtcctacttgacgtgtctaacagagacaatagtagcgccttgaaacattattttattttgagaggagcctatcctgctccttggcctgtttttcaatcaggttatttgttatttgctattgagttgtttgacttacttatgtatttggatatttaccccttctaccacttagggtttgcaaatattttctctcatgttctgggtcactttttcactcagttgtttgtctttttgatttttgccattcagatgctttaatgttcaatgcagccccacttgtctatttttcttttcattgcctgtgtctttgctgccatagcaaagatatcattaccaacatcaacgtcaaagcattatcttcatatgttcctctcatcattttatggtttcaggtctatgtttgggtcttcaaaacattttgagttgatttgtgtacctagtatatgataaaaaaccacatgtatatgaacatcaaatcctaacgcagtatacagtagatctgtaccatttttaattcttattcatatctcagtagagctggaaaaatttcttttggatgtagatgaactttttacctcgatgtcactgtgttcatttcacctatcacgtgatagggtcatggtcctcttcacactggctcctacaagagactactaaccccatgacttcatgagggtggtcacgcccttgatgcctgcaacaaatgactcttcacttgataggaatttatgcctgctgccagagtgtagacctccaggaagtagtggggccatctgcagaaaatgacacatttgctccctgaacttactgaacaaaagcactgctgttatcttttggttattaaaaagtaaatatggaatgaagtgagaaacaggaaaaacatgccaggatcctcatcttcaccatcttctccaaacacctgatccatctactcacactttctagtgtgaatagagattcacactacaataaaagctgagagatcaaaggaggaaaagagggacactgagaccaaagggatcccacacaatccccgatgaaatgcacacctcctctcactgagaagtttcaaagtttctggtctctgagccttctctctgcagacctataaacccaggctaactcctctctccccacacatctgctcctgctctccctcctccaagtctctgtagccatgaggacccttgccctcctcactgccaccgttctctttgtggccctgcaggctcaggcggagccacttcgggcaagagctgatgaagctgcagcccaggagtagcctggagcagatgatcaggaagtgtctgtttcctttacatgggatgaaagcgctgcacttccactttcaggtgagacaggccggcatgcagagag

SEQ ID NO: 39875 - DNA, 2300 bp, Homo sapien
acaacatgagggtgggttaagggagtctcatttagtccatcgtccccaagccaccagcctcctcaagcagcacggtggcctcctaaagtcatggttattaatgtctctggatgtgctatggacacccaaggcaccaaggtccttccaagggccgtcacttttttaactctcaatcccatggccaccactgcctcatcacaattgggctagacgcactttggtgcctatcttggtgatcacagaagagttagcttcttttttcccttacagataacatcatttacatgttctccaataatgagacctccccatatcatcacaggacatccaccatctcaacatcaaacatatactgaacaatggactgtggatggatagtaaactacgatcttctgaggataaccccccaggcccactggcacccagcaggaccacgaggcttttgttagaccacacctctccatttcacatgcagcttctggcaaaagctcccttttttaccggttttaaaggttagctaatatttcccacttacttctcctggcaggaagtagggattattgctccagaacccaccgagggtgcagtcagaggcagtaacgaggagaagaagccttcaaactagagacaccaactacgtcaggcaaagaccatatggaagtgccatcaccaaacgtggccatgggggagaaaggctccaaggaaaagtgggtgccagccaaccccatcatcagtgtcaatatagaagcactgggaagaaagccctgagtgacaagatgtcagtgttctctatgattggccttgcttggtatcttatgtacaaatggcttgtggggtagctgtttaacccaggcctggcagcctagagggctgctggaacaggacagccctagtcagaatttgtaccccagactggaaaactggggaattccctgtaagccctgttacaggggctgcaccccagatacaacctgacctgtgtccaaggcgggcaactcaacccttagatattgaatgggtcccatggcaccaatgcttaaacaccagcagccctcacaaccacagatcgtgttttaaggatgaggaggtagttctctggatgcacaggcttcaatccaaatgggctcatgacgccgcagcacacacccagactgcagcctgaagagttggagcattgcattcacagaaagcatccagacatgatcatgggctcagggatacacctgttctccgatgtgtaccagtgaaggatggaaactcctatgcctcccagaaagcaccactcaagcttttgctgaatgcttctctgaaggcccacaaggcctgagaggctgtgcaacaccagcagtaaagtgaatgcccagactcccacctcctttcttgggtggccatctggaaaggccactcccaccctgatggctaatgcctcagaccagttcttggcccagatgatcctagacaattgtttaagcttaaactgttcattggccaagcaaacaggtgatagtcacctctggggaaccacatgccgcgtgtacatccagtactcaggagaacccaaaaatgtctgttccacatagcaacagaagcccaggtagcactcagtctcacctgggtgttctccaacatcccagctcagccaaatggctttcattagtttttatggttagaccccaggtcctcgggacactgctttagaaacacattccaaatcctcctctgtgtgcaggtggcattcctatcccaatctctttgcagggcgtatactgtgatacgcagccaggctgtcccagaggccttaaatattcccttggtgcaggtagttcagcttagccacagccaatgcatcacagggtcaactgtgttaggagccattgagaatccatagttggttgctgcctgggcctggccagggctgaccaaggtagatgagaggttcctctgtggagttctactttaacctcaccttcccaccaaatttctcaactgtccttgccaccacaattatttaatggacccaacagaaagtaaccccggaaattaggacacctcatcccaaaagacctttaaataggggaagtccacttgtgcacggctgctccttgctatagaagacctgggacagaggactgctgtctgccctctctggtcaccctgcctagctagaggatctgtaagtactacaaaacttaaactttacactgagttttcattattgaagctatgcctccaatctgacctctgactgtggggccaccccagagggaaccagcgggcgaatccctgctaggaacgtctgt

SEQ ID NO: 39876 - DNA, 2300 bp, Homo sapien
tccattgcccaagcaatgaggcaattgtccactccagggaaccacatactatgtgcacatccttaacgaacccagcaaaacctgccctgcctgctaacacaagcccacgtgggattcagtctcaaccaggtggtctgcaacatcccagcccaccaatcggctttggtgtcttgttatggttagagctcaggtactgggcaggctggttcaggggaagattcctcatcctctcctgtgcatgggtgtcaaacttgaacttgtctctctaacagagtgtgtcctgtgatatgcaggccaggctctcctgggggctttaaatattcccttgctgcaactagctcagcatcagccaccagcacaggcatctcggggtccattgtgttaggagtcatggagaatccatcgttggttgctgcctgggcctgggcaaggttgacaaaggcagatgaggggaccctccatggactcctgtccgaaccccagcttcccatcaaatttctcaactgtccttcccaccagagttatttaataaacccaatggaaagtaacccaggttattaggacacctgatcccaaatgactcttaaatagggaagtcctctcctgtttgtgcacggctgctcttgctacaggagacccgggacagaggactgctgtctgccctccctcttcactctgcctaccttgaggatctgtaagtaacccaagacttaaaactttcacattgaggtttcaacattgaacctgtgcccccagtctgacctctgactcctgggccaccccagagggaccttgtgggtgaatctcttgctgcgcatttctctctgaacctctggtggctgctgggagctttagctaccggctcaattaatagagaacctcaaggaatttccttctaaatctacgtgtcctacttgacacgtccaatacagacaacaatagctccttagaacatccttttatttggagagaagcctatcctgctccttggcctgtttttcaaacaggttacttgttatttgcttttgagttgtttgacttccttatgtatttagatatttgccccttctaccacctagggtttgcaattattgtctttcattttctgggttgctttttcactcagttgattatttgtttgttggtttgttttttgacgtgcagatgctttagaggtcagtgcagccccatttgtctattttcccgtttattgcctgtgtctttggtgtcatagcaaagatatcgttatcgacaccaatgacaaagcgttatcttcatatgttcctctcgtcattttatggtttcaggtctatgtttgggtcttcgatcattttgagttgatttgtgtatatagtatatgataaaaaaccacatgtacatgaacatcaaatcctaaggtggtatacaggagatatataccgttttaaattcttattcatatctcaatagagccagaaacacatttttggctgtagacgaactttttgccttaatatcactgtgttcatgtcacctatcgcctgatagggtcattgtcctcttcacactggcccctacaggaggctactcaccccatgccttcatgagagtggtcacgcccttgatgcctgcaacaaatgactcttcacttgataggaattcacgcctgctgccagagtgtagacctgtacagagtagtggggccatctgcaggaaaagaggcatttgtatcctgagcttatcgaacaaaagcactgctgttatcctttggtagaatagtaaaaagtcaatatataatgaagtgagaaacaagaaaaacatgccaggatcctcgtcgtcaccatcctctccaacccagcacaaacactacacgtagagattcaaactagagtgaaagctgggagagcaaaggaagaaaacagggacattgagaccaacgggatcccacacagtctccaacgaaatgcacacctcctttctctgagagggttccaggtttcttgtctccgagccttctctctgcagacctatatatccaggctaactcctctctcccgactcgtctgctcctgctctccctcctccaggtcaccccagccatgaggacctttgccctcctcactgccatgcttctcctggtggccctgtaggctcaggcagagccacttcaggcaagagctgatgaagctgcagcccaggagcagcctggagcagatgatcaggaaatggctcatgcctttacatggcatgaaagtgccgctcttccgctttcaggtgagacaggccggcatgcagaactgcagggtctagtgggatggatg

SEQ ID NO: 39877 - DNA, 2300 bp, Homo sapien
gtatgtctttttttgagaagtatctgttcatgccctggcacgcattttaaagggctcatttcttttttgcttacttatttgtttaagtcccttgtagaggaaaatcactttgaccacgagatcaccaccaaccagcctttccttactgctacaaatacggacctcgccatctccagtacatggtgctggctcatggccagtacccaaacccttgacttgctgcttccctgacctcatgctttgctgattacaccaaaaatgacctcattagagtggaattttgctgagatcaccatttgctttcagaataagcccattactttatggtgcaaggaacccatagagcctcagtgagattgtaaagctgccctacaagctacggaaaactatagacttgggagaactatgtgtaagaataccacgcccgaatctcaccagctctccagtgataacgctcatgcagtgctgtggaaatgcctgtggactggagtgtgctctgtgtgcaggaagcaggtccaggtttcacttccgcaggacatgggacatttccagaacccggagatcttcctctcgctcatatacaccccttcatatttagtccctataacctcatcattgcgaccctacaggcacctactaatgccctggaagctaaaactgtcaccagagcctcagtttccccgaagagcccaaatttcttcttatgctggggtgagactggtgctcacttcctccaaagctgaagttcctgggcctgccacacatcaggaattcactgcttcctcagagggacaggagaccccactgctctgccacagcgaccgcctctagcaaagcttgagatgcctcttctaccttaaggttgagggagatgctttagttatcactccactgcccccaggcctccaccggccgatgcctgctgccttcacacagagctgcagggggggccctgagcacccagcctgtgggaccagcgctgtgcacgacattcccatggtggcaggggctgcccggcgtgcacactgggttcagcaacctcaccacaggtatttattgcctctcgagcgactgcattcttttctcatctccagaaaccttaccccatctacctgactaggagaaggaggaggacggtggatagtggtacattttaaaatgtgctctagtcttcttaggaattctcctcaaataacacaggaggaaccacaggagtttgatcctgcatatttcaagcgaccactgatcatcccactcatgctatgtgcatggagactcttaagcctgcccagaatgggcttaagagcaaggcattggagcacagagcaccaggtgatgcaagctaacaccaaactcactgccaccttggccgcctccctgagagactttcaagagacattaggtctccagcaggaaactcaggagttcttggccccagtggtcctagacactcgtttggccttaaactgtccattgcccaagcaatgaggcaattgtccactccagggaaccacatactatgtgcacatccttaacgaacccagcaaaacctgccctgcctgctaacacaagcccacgtgggattcagtctcaaccaggtggtctgcaacatcccagcccaccaatcggctttggtgtcttgttatggttagagctcaggtactgggcaggctggttcaggggaagattcctcatcctctcctgtgcatgggtgtcaaacttgaacttgtctctctaacagagtgtgtcctgtgatatgcaggccaggctctcctgggggctttaaatattcccttgctgcaactagctcagcatcagccaccagcacaggcatctcggggtccattgtgttaggagtcatggagaatccatcgttggttgctgcctgggcctgggcaaggttgacaaaggcagatgaggggaccctccatggactcctgtccgaaccccagcttcccatcaaatttctcaactgtccttcccaccagagttatttaataaacccaatggaaagtaacccaggttattaggacacctgatcccaaatgactcttaaatagggaagtcctctcctgtttgtgcacggctgctcttgctacaggagacccgggacagaggactgctgtctgccctccctcttcactctgcctaccttgaggatctgtaagtaacccaagacttaaaactttcacattgaggtttcaacattgaacctgtgcccccagtctgacctctgactcctgggccaccccagagggaccttgtgggtgaatctcttgctgcgcatttctctctgaacc

SEQ ID NO: 39878 - DNA, 2300 bp, Homo sapien
acaacacgagggtgggttaagggagtctcatttagtccatcgtccccaagccaccagcctcctcaagcagcacggtggcctcctaaagtcatggttattaatgtctctggatgtgctatggacacccaaggcaccaaggtccttccaagggccgtcacttttttaactctcaatcccatggccaccactgcctcatcacaattgggctagacgcactttggtgcctatcttggtgatcacagaagagttagcttcttttttcccttacagataacatcatttacatgttctccaataatgagacctccccatatcatcacaggacatccaccatctcaacatcaaacatatactgaacaatggactgtggatggatagtaaactacgatcttctgaggataaccccccaggcccactggcacccagcaggaccacgaggcttttgttagaccacacctctccatttcacatgcagcttctggcaaaagctcccttttttaccggttttaaaggttagctaatatttcccacttacttctcctggcaggaagtagggattattgctccagaacccaccgagggtgcagtcagaggcagtaacgaggagaagaagccttcaaactagagacaccaactacgtcaggcaaagaccatatggaagtgccatcaccaaacgtggccatgggggagaaaggctccaaggaaaagtgggtgccagccaaccccatcatcagtgtcaatatagaagcactgggaagaaagccctgagtgacaagatgtcagtgttctctatgattggccttgcttggtatcttatgtacaaatggcttgtggggtagctgtttaacccaggcctggcagcctagagggctgctggaacaggacagccctagtcagaatttgtaccccagactggaaaactggggaattccctgtaagccctgttacaggggctgcaccccagatacaacctgacctgtgtccaaggcgggcaactcaacccttagatattgaatgggtcccatggcaccaatgcttaaacaccagcagccctcacaaccacagatcgtgttttaaggatgaggaggtagttctctggatgcacaggcttcaatccaaatgggctcatgacgccgcagcacacacccagactgcagcctgaagagttggagcattgcattcacagaaagcatccagacatgatcatgggctcagggatacacctgttctccgatgtgtaccagtgaaggatggaaactcctatgcctcccagaaagcaccactcaagcttttgctgaatgcttctctgaaggcccacaaggcctgagaggctgtgcaacaccagcagtaaagtgaatgcccagactcccacctcctttcttgggtggccatctggaaaggccactcccaccctgatggctaatgcctcagaccagttcttggcccagatgatcctagacaattgtttaagcttaaactgttcattggccaagcaaacaggtgatagtcacctctggggaaccacatgccgcgtgtacatccagtactcaggagaacccaaaaatgtctgttccacatagcaacagaagcccaggtagcactcattctcacctgggtgttctccaacatcccagctcagccaaatggctttcattgctttttatggttagaccccaggtcctcgggacactgctttagaaacacattccaaatcctcctctgtgtgtaggtggcattcctatcccaatctctttgcagggtgtatactatgatacgcagccaggctgtcccagaggctttaaatattcccttggtgcaggtagttcagcttagccacagccaatgcatcacagggtcaactgtgttaggagccattgagaatccatagttggttgctgcctgggcctggccagggctgaccaaggtagatgagaggttcctctgtggagttctactttaacctcaccttcccaccaaatttctcaactgtccttgccaccacaattatttaatggacccaacagaaagtaaccccggaaattaggacacctcatcccaaaagacctttaaataggggaagtccacttgtgcacggctgctccttgctatagaagacctgggacagaggactgctgtctgccctctctggtcaccctgcctagctagaggatctgtaagtactacaaaacttaaactttacactgagttttcattattgaagctatgcctccaatctgacctctgactgtggggccaccccagagggaaccagcgggcgaatccctgctaggaacgtctgt

SEQ ID NO: 39879 - DNA, 2300 bp, Homo sapien
tccattgcccaagcaatgaggcaattgtccactccagggaaccacatactgtgtgcacatccttaacgaacccagcaaaacctgccctgcctgctaacacaagcccacgtgggattcagtctcaaccaggtggtctgcaacatcccagcccaccaatcggctttggtgtcttgttatggttagagctcaggtactgggcaggctggttcaggggaagattcctcatcctctcctgtgcatgggtgtcaaacttgaacttgtctctctaacagagtgtgtcctgtgatatgcaggccaggctctcctgggggctttaaatattcccttgctgcaactagctcagcatcagccaccagcacaggcatctcggggtccattgtgttaggagtcatggagaatccatcgttggttgctgcctgggcctgggcaaggttgacaaaggcagatgaggggaccctccatggactcctgtccgaaccccaacttcccatcaaatttctcaactgtccttcccaccagagttatttaataaacccaatggaaagtaacccaggttattaggacacctgatcccaaatgactcttaaatagggaagtcctctcctgtttgtgcacggctgctcttgctacaggagacccgggacagaggactgctgtctgccctccctcttcactctgcctaccttgaggatctgtaagtaacccaagacttaaaactttcacattgaggtttcaacattgaacctgtgcccccagtctgacctctgactcctgggccaccccagagggaccttgtgggtgaatctcttgctgcgcatttctctctgaacctctggtggctgctgggagctttagctaccggctcaattaatagagaacctcaaggaatttccttctaaatctacgtgtcctacttgacacgtccaatacagacaacaatagctccttagaacatccttttatttggagagaagcctatcctgctccttggcctgtttttcaaacaggttacttgttatttgcttttgagttgtttgacttccttatgtatttagatatttgccccttctaccacctagggtttgcaattattgtctttcattttctgggttgctttttcactcagttgattatttgtttgttggtttgttttttgacgtgcagatgctttagaggtcagtgcagccccatttgtctattttcccgtttattgcctgtgtctttggtgtcatagcaaagatatcgttatcgacaccaatgacaaagcgttatcttcatatgttcctctcgtcattttatggtttcaggtctatgtttgggtcttcgatcattttgagttgatttgtgtatatagtatatgataaaaaaccacatgtacatgaacatcaaatcctaaggtggtatacaggagatatataccgttttaaattcttattcatatctcaatagagccagaaacacatttttggctgtagacgaactttttgccttaatatcactgtgttcatgtcacctatcgcctgatagggtcattgtcctcttcacactggcccctacaggaggctactcaccccatgccttcatgagagtggtcacgcccttgatgcctgcaacaaatgactcttcacttgataggaattcacgcctgctgccagagtgtagacctgtacagagtagtggggccatctgcaggaaaagaggcatttgtatcctgagcttatcgaacaaaagcactgctgttatcctttggtagaatagtaaaaagtcaatatataatgaagtgagaaacaagaaaaacatgccaggatcctcgtcgtcaccatcctctccaacccagcacaaacactacacgtagagattcaaactagagtgaaagctgggagagcaaaggaagaaaacagggacattgagaccaacgggatcccacacagtctccaacgaaatgcacacctcctttctctgagagggttccaggtttcttgtctccgagccttctctctgcagacctatatatccaggctaactcctctctcccgactcgtctgctcctgctctccctcctccaggtcaccccagccatgaggacctttgccctcctcactgccatgcttctcctggtggccctgtaggctcaggcagagccacttcaggcaagagctgatgaagctgcagcccaggagcagcctggagcagatgatcaggaaatggctcatgcctttacatggcatgaaagtgccgctcttccgctttcaggtgagacaggccggcatgcagaactgcagggtctagtgggatggatg

SEQ ID NO: 39880 - DNA, 2300 bp, Homo sapien
gtatgtctttttttgagaagtatctgttcatgccctggcacgcattttaaagggctcatttcttttttgcttacttatttgtttaagtcccttgtagaggaaaatcactttgaccacgagatcaccaccaaccagcctttccttactgctacaaatacggacctcgccatctccagtacatggtgctggctcatggccagtacccaaacccttgacttgctgcttccctgacctcatgctttgctgattacaccaaaaatgacctcattagagtggaattttgctgagatcaccatttgctttcagaataagcccattactttatggtgcaaggaacccatagagcctcagtgagattgtaaagctgccctacaagctacggaaaactatagacttgggagaactatgtgtaagaataccacgcccgaatctcaccagctctccagtgataacgctcatgcagtgctgtggaaatgcctgtggactggagtgtgctctgtgtgcaggaagcaggtccaggtttcacttccgcaggacatgggacatttccagaacccggagatcttcctctcgctcatatacaccccttcatatttagtccctataacctcatcattgcgaccctacaggcacctactaatgccctggaagctaaaactgtcaccagagcctcagtttccccgaagagcccaaatttcttcttatgctggggtgagactggtgctcacttcctccaaagctgaagttcctgggcctgccacacatcaggaattcactgcttcctcagagggacaggagaccccactgctctgccacagcgaccgcctctagcaaagcttgagatgcctcctctaccttaaggttgagggagatgctttagttatcactccactgcccccaggcctccaccggccgatgcctgctgccttcacacagagctgcagggggggccctgagcacccagcctgtgggaccagcgctgtgcacgacattcccatggtggcaggggctgcccggcgtgcacactgggttcagcaacctcaccacaggtatttattgcctctcgagcgactgcattcttttctcatctccagaaaccttaccccatctacctgactaggagaaggaggaggacggtggatagtggtacattttaaaatgtgctctagtcttcttaggaattctcctcaaataacacaggaggaaccacaggagtttgatcctgcatatttcaagcgaccactgatcatcccactcatgctatgtgcatggagactcttaagcctgcccagaatgggcttaagagcaaggcattggagcacagagcaccaggtgatgcaagctaacaccaaactcactgccaccttggccgcctccctgagagactttcaagagacattaggtctccagcaggaaactcaggagttcttggccccagtggtcctagacactcgtttggccttaaactgtccattgcccaagcaatgaggcaattgtccactccagggaaccacatactgtgtgcacatccttaacgaacccagcaaaacctgccctgcctgctaacacaagcccacgtgggattcagtctcaaccaggtggtctgcaacatcccagcccaccaatcggctttggtgtcttgttatggttagagctcaggtactgggcaggctggttcaggggaagattcctcatcctctcctgtgcatgggtgtcaaacttgaacttgtctctctaacagagtgtgtcctgtgatatgcaggccaggctctcctgggggctttaaatattcccttgctgcaactagctcagcatcagccaccagcacaggcatctcggggtccattgtgttaggagtcatggagaatccatcgttggttgctgcctgggcctgggcaaggttgacaaaggcagatgaggggaccctccatggactcctgtccgaaccccaacttcccatcaaatttctcaactgtccttcccaccagagttatttaataaacccaatggaaagtaacccaggttattaggacacctgatcccaaatgactcttaaatagggaagtcctctcctgtttgtgcacggctgctcttgctacaggagacccgggacagaggactgctgtctgccctccctcttcactctgcctaccttgaggatctgtaagtaacccaagacttaaaactttcacattgaggtttcaacattgaacctgtgcccccagtctgacctctgactcctgggccaccccagagggaccttgtgggtgaatctcttgctgcgcatttctctctgaacc

SEQ ID NO: 39881 - DNA, 2300 bp, Homo sapien
acaacacgagggtgggttaagggagactcatttagtccatcgtccccaagtcaccagcctcctcaagcagcacggtggcctcctaaagtcatggttattaatgtctctggatgtgctatggacacccaaggcaccaaggtccttccaagggccgtcacttttttaactctcaaccccatggccaccactgcctcatcacaattgggctagacccactttggtgcctatcttggtgatcacagaagagttagcttcttttttcccttacagataacatcatttacatgttctccaataatgagacctccccatatcatcacaagacatccaccatctcaacatcaaacatgtactgaacaatggactgtggatggatagtaaactacgatcttctgaggataaccccccaggcccactggcacccagcaggaccacgaggcttttgctacaccacacctctccatttcacatgcagcttctggcaaaagctcccttttttaccggttttaaaggttagctaatatttcccacttactcctcctggcaggaagtaaggattattgctccagaacccaccgagggtgcagtcagaggcagtaacgaggagaagaagccttcaaactagagacaccaactacgtcaggcaaagaccatatggaagtgccatcaccaaacgtggccatgggggagaaaggctccaaggaaaagtgggtgccagccaaccccatcatcagtgtcaatatagaagcactgggaagaaagccctgagtgacaagatgtcagtgttctctatgattggccttgcttggtatcttatgtacaaatggcttgtggggtagctgtttaacccaggcctggcagcctagagggctgctggaacaagacagccctagtcagaatttgtaccccagactggaaaactggggaattccctgtaagccctgttagaggggctgtaccccaaatacaacctgacctgtgtccaaggtgggcaactcaacccttagatattgaatgggtcccatggcaccaatgcttaaacaccagcagccctcacaaccacagatcgtgttttaaggatgaggaggtagttctctggatgcataggcttcaatccaaatgggctaacaatgccgcagcacacacccagacagcagcctgaagagttggagccttgcattcacataaagcatccagacaggatcatgggctaagggatacgcctgttctccgatgggtaccagttaaggatggaaactcctatgcctcccagaaagcaccactcaagcttttgctaaatgcttctctgaagacccacaagggctgagaggctgtccaacaccagcagtaaagtgaatgcccagactcccacttcccttcttgggtggccatctggaaaggccactcccaccctgatggctaatgcctcagaccagttcctggcccagatgatcctagacaattgtttaaccttaaactgttcattggccaagcaaacaggtgatagtcacctctggggaaccacatgccgcgtgtacatccagtactcaggagaacccaaaaatgtctgttccacatagcaacagaagcccaggtagcactcagtctcacctgggtgttctccaacatcccagctcagccaaatggctttcattagtttttatggttagacctcaggtcctcgggacactgctttagaaacacattccaaatcctcctctgtgtgcaggtggcattcctatcctagtctctttgcagggcgtatactatgatacgcagccaggttgtcccagaggctttaaatattcccttggtgcaggtagttcagcttagccacagccaatgcatcacagggtcaactgtgttaggagccattgagaatccatagttggttgctgcctgggcctggccagggctgaccaaggtagatgagaggttcctctgtggagttctactttaacctcaccttcccaccaaatttctcaactgtccttgccaccacaattatttaatggacccaacagaaagtaaccccggaaattaggacacctcatcccaaaagacctttaaataggggaagtccacttgtgcacggctgctccttgctatagaagacctgggacagaggactgctgtctgccctctctggtcaccctgcctagctagaggatctgtaagtactacaaaacttaaactttacactgagttttcatcattgaagctatgcctccaatctgacctctgactgtggggccgccccagagggacccagcgggtgaatccctgctaggaacgtctgt

SEQ ID NO: 39882 - DNA, 2300 bp, Homo sapien
aaattttagaatcacctagtcagtttctacaaagaaagtcttctacaaagaagtcattagggattctgaaatagattgagctgaatctgtagatcagtttggggagcactgacatctcacattaaacctcacaatccctgagcataagatctctttccagttatttagatattcttaaaaacttcaactttttgtggtttggggagtataagttttgcacattttttaaattcaacgactagctatgttccttttgatactacttgtaaaaggagtttttagcttcatttttgaaaagtttattatgaaagaaaaaatacaattgatttttgtgcactggtcttctatttttcaaccatgctaaactcccttattagttctaatagttttttaataaattgttttggattttctatatataaaagatcatgtctttgcaaacagagattatttaacaacttcttttctaacctggatgtcatttaatttttccttcttgcctgactgccctagaacctctagcacaatgttgagtagaagtgctgatttcagatatccttggctggtttctaatttcagtaggaaagcatccttttttttttttttcaaccaccgagtatgatgttagttgtaagtttttcatagatgtccctgatgccaaaaaagttggggactgctgccttaacagattgagagttcacctctcaacccagtgagtgttttcatgcctaatagtatctcacttttctctaactgtattcttgtttcttcatcttttttctctgttctctggactatataatcttttatctatctgtacacacatttcctaaatcttggttctgccagtttaagtatactattgagcagccgttcataaaatttacatttcgattattgtacttctcaattccagaatttcatgtgtttcttcgtaacttcactttattatattctgcccttgaaaagattttgtcatcacagtttcctttaattatgtaataatggtttcttttagttgtttagtcacatttatcattaatactcgtttttttctattaagttctttatatatttagatatttactttcattacatgtatcgtttacaaatatttctctctcttgctaggttgcctgtttgctcagttaatgacttcctttgctatgcagatgttttacagttaaatgaactccaactggtttatttttgctttagttgcctctacctttaatgtaatatccaagaaataatctcccagttcaacgttaggaagctttatccctatgggttcttctagtaagttttatgatttcaagacttatatttaggtcttcaattcattcagagttgatttttacatttggtgtgagataagggtacaaatgtagatatacgttgaattatcaggttgtgtactttcaaccgatataatttctaattgtcactcctctcaatacggttggaaataaaaaaaaatttttaaccttattcagaccaactctttaactagtatcccactgagcttatttgactgatagcctgatgaggccattgtcctctccacactagcagtggcagaagactatgccttccagaacctcaaaagcgtccttcatgagggtagaaatgccccagaatcctgcaatgaattactctctatgctggggtccaggtcttgcctcagggtctagaccaccaagaatagcagggctcatcttcagaaaataagaggcatttattgcctgaacttatggaataagagcagtgtttcttttcttttttgaatattaagaagtaaatgttccagcagatgagacacaggaaattatagcatgatcctaatcatcactattggcttggacccagaacagacactcgataagcagactcatgctatgataaaagctcggagaacagaagagcatcaaagggatcttgatggcaaaggcagcccttcccttccccaatcacatgctccacctcctctcactgcagcatctgtctctgagccttctcccagcagagctataaatccaagctggcttatcactccccacacatccactcctgctctccatcctccaggtgaccccagccatgaggaccctcaccctcctcgctgccattctcctggtgccactccaggccctggcttgagccactccaggcaagagctgactaggctgcagcccaggagcagcttggggcagaccaccaggactttgccatctccttcacaggggacataagctctggttttagagattcaggtgagagccaccagcactgcagagcca

SEQ ID NO: 39883 - DNA, 2300 bp, Homo sapien
ctcctctcacccgggcattctccaacacacctgtttgtccaaacagctttgatttgtttttatagttggaccccaggttcccaggaggctggttcaggccatattccaaatcctcatctgtgtgtgagtggcattcttagcctagcctccttacagggtggatactatgatacacagccaggctgtcccagtggctttcaatattcttttggtccagatagttcagcctcagcaccagtgtaggcatcacagggtcaattgtcttaggagtcatggagaattcatagttggtagctacctgggcctggccagggctgaccatagacaaggtatccctctgtgaactcctattttaatgccagcttcccaacaaatttctcaactgctcttaccagcaggtatttaaactactcaatagaaagtaaccctgaaaattaggacacctgttcccaaaagacccttaaataggggaagtcctttcctgcttgtgcacagctgctgatgtggcaacatgaggcctgggacaggggactgtcctctgcccactctggtagcctcacgtagcttaacaatctgtcagtaatacaatacaaaacttaaactttcatactgcggttccacccaggaagctgtgttcccaatctgacccgtgattatggggccacctcagagggaaccagtgagggaatattttgccatctgggactgttggttgctgggggcagtggctatgagctcagttaataaactcaagcagtttccttccaaacacacatgtcctacttaacgtgtccaacagagatgatcatactcatagctgctaaaacattattttattttgagaaaagtctattcatgttcttggcccatggagttttcatttattatttatttattttgcagagatggagtctcactgtgttgctcaagctggtctccaactcctgggctcaagcgatcttcctactttggcctttgaaagcgctgagattgcctgtgtgagccatcatgggggctcactggcccactgattaatcagattaattgttttttgctattgaattgtttgacttccttgtatattcggatatttacccattctaacacgtagggtttgcaaatattttctctcatgttctgtgttgccttttcactcagttggtggtttcctttgctgtgcaggtgctttagtgttcaacgcagccccgcttgtctattttccattttattgcctgtccctttgatgtcatagccaagaaataattgcccagattaatgtcaaaaagctttatccctatatattcttctagtagtttatggtttcagatcttatgtttaggtcttcaatccattgagttgatttttgtatgtggtataagaaaaaagaccacatgtatacatatctcaaattctaaggtagtatatattagacacatacaatgtgtctatttacacacattgagctgaaaataataaacatatttttatctttcaatcaactctatctctatctcactgaacttgtttcacctatagcctgatgaggttgctgtcctctctaccccagctcctataggagactgctcatcccctaacctcaaaaaccccttcatgagggtgataatgcccttgaatcctgcaatgaattagttctctactacagtggaattcaggtctgttatgagggtctggatctctgaagagaagagctctcattttcagaaaataagcaggatttattccctgaaattactgaattaaatcactgtttcgattactttttgcaatattaaaagtaaatatttaaacaggtaaaaacagaaataatggtagggtccttatcatcaccgtgaattccaagctagcatagacactaaacctagagattcacactagaatgaaagctgggagagcagaggagtctcagaaggatgtggaggccaatggacacctgcaacctctccaacgaaatgcctacctcctctcactgcagcatccatctctgagccttctcgcagcagagctataaattcagcctggctcctccgttcccacacatccactcctgctctccctcctctcctccaggtgactacagttaggaggaccctcaccctcctctctgcctttctcctggtggcccttcaggcctgggcagagccgctcccggcaagagctcatgagatgccagcccagaagcagcctccagcagatgaccaggatgtggtcctttacttttcaggagatgacagctgctctcttcaggttccaggtgagagatgccagcatgcagagctaca

SEQ ID NO: 39884 - DNA, 2300 bp, Homo sapien
ccaggcgggcggatcacgaggtcaggaaatcgagatcatcctcgctaacacagtaaaacaccgtctctactaaaaatacaaaaaaattagccgagcatggtggcgggcgactgtactcccagctactcaggaggctgaggcaggagaaaggcgtgaacctgggaggcggaggttgcagtgagccgggatcgcaccactgcactccagcctgggcgacagcaagactccgtctcaaaaaaaaaaaaaaaaaaaaaaaagaaggaaattcttcattcatgacaacatggatggaaccaaaggacaatgtgctaaacgaaataaaccagacacaggaagacaaatactatatgatatcacttacacatggaatgttaaaatgtcagttttatggaactagagtacaaaggtggtcatcagaagctgcaggtgggtgagataggaaaagagaagatgttgagccaagagtacaaagtttcagttatgctggagagtcttagtgatctatggcactgcacggtgaccacagttaatagtgatgtattgtatctttcaaactgctaaaggaatcaatttgtaattctccttaaaaaattaagttggtgaggtgatggctatcttaattagcttatgtgtttctcccatgtggatatcaatccaaacgtcacatcataccctacaaatatacagaaaattatttttcaatgaataaataaataaatttgaaaaaaattaaatgaggaattcaaatatagagactctccaagggcccactgagccccaaaggatttggatcaaatatggtgatattatggaaatatgtagtaatatcttaaaaatgtgtaagatatagtctctttttttttttttaagagaaaggggtctcactatgtttttaggctggtatcgaactcctggtctccagtgatcctcccacctcagcctctcaaatagctagaaatataggcatgtaccaccatgctggcttaagatgcattctttgacacagcaattctatttctataagtttatccatataggtaagagaacatatatacaagataatcactgtaactttacttattactgcaaaagtttaaaaataaccaaattgtaataattttataatattttatcagtacaaaaaataagtgatggcatatacaaaccctgggatagtataaggctattaaaattataatagcattccatgtattttgatatacaaagtgccaatgttacaggtgaaaaaagcgaagtgcagaatactatgtgtaactgttaatagtgatggtttgctgggtcagaactgaaggcctgggggtagaaatgagagctcatgacttctaccttttgaatgttgttccttgtgcatgatttacaattttctaaaactaaaaaaaaaatctcagaaaggggctgtacgcacctaaattactttgatattccccaaagtggagagaagtacccgctacacattttatgtgatgcattcagatcacaccaactccttgaactaaatccgaatttttattttaatctgataaacttggcctactattttactgaactcatttcccctatagcctgataaggtcattgacctctccatactggcaccagcgggagactactcacctcgagatctcaaaagcctcctacatgaggttagtaatatccctgaatcctgcaatgaattaactctctactccactgagtcccaggtctgcccccagagagtcatccagagagtaccagggaccatcttcagaaaacaagaggcatttgatccccaaacttcttgaatgaaagcgctgttgtttttcttttttgaatatataaaagtaaatactcaagcagatgggaaacagaacaggatagtaatacccttatcatcattaacaccttggatcaagaagaggcattaagcatacagactcacgctttgatgaaagctgggagaaagaggagcatcaaagggatcttgagaacaaaggcagtccttcccctcccaatcacatgcccacctcctctcactgcagcttctgtctcaggtcttctcccagcagagctataaatccaggctgactcctcactccccacatatccactcctgctctccctcctgcaggtgaccccagccatgaggaccatcgccatccttgctgccattctcctggtggccctgcaggcccaggctgagtcactccaggaaagagctgatgaggctacaacccagaagcagtctggggaagacaaccaggaccttgctatctcctttgcaggaaatggactctctgctc

SEQ ID NO: 39885 - DNA, 2300 bp, Homo sapien
cagaggctcgaaaagcagcaactgcccccttctgggcatcagtgctccctcaagcacctgatcttggacctgcttcttctaaagaagaaaggactttctccaggtagagggaaggacaagtgatggaggaaggatggattcagttaccagataggagagtagctgtgccacagctgctaggagctgcagttgtactggctgtgcaagaaaacacccatcgaggtcaggagtcactggaaaagttgttaggccggtatttctacatctcgcctttgtcaacccttgccaaaacggtgaggcagcggtgtgttacctgctgacagcaagatgggagtcaaggtccagccgttccgcccggcatacgagcttgtggagcagccccctttgaaggtctccaggtggacttcaccttcacggagatgccaaagtgtggaggtaacaagcatgtactggttcttgggcgtacctactctgggtgggtggaggcctatccaacacgaactgagaaagctggtgaagtaatccctgtgcttcttcgagatgtgattcctagatttcgaccgcccttatggatcggctcagacaacgggcctgcgtttttggctgccttggtacagaaaacggcaaaggtattggggatcgcacggaaactacatgccgcctcccggcctcagagttccggaaaggtggagaggatgaatcggactatcaaaaatagtactactgtcttccccgctggatatttaaaacaacagcacaaggggcgtcaaaccacctgctaaattggaggcaatgttatcctctcccctcctcccccggccccggatattagagacaacaacacagaggtgatgtacacccactgctttattgtgagtaatatcatcctctcccttcttggatagtaggaacagtatcacactgtgcgtgtaggcctgtcgcgaaattcaatggaatgtcatcctgcgcctccctggatatgacgaacaatatcacgggggatgtacaacttctgagatattgggagtgatgtcatcctctcccctctggaagttagggacaatatcacaggggtagtgtacaccctctgggatgttgggactaatatctcacaggtgtctgagaattcctcctcctgggactctcagaggatccagaactgcagccggccctcgctttgctgtccctgtccctgtccatgtatctggtcacggtgctgaggaacctgttcagcatcctggctgtcagctctgactgccccctccacacccccatgtacttcttcctctccaacctgtgctggcctgacatcggtttcacctcggccatggttcccaagatgattgtggacacgcagtcgcatagcagagtcatctctcatgcgggctgcctgacacagatgtctttcctgctccttgttgcatgtatagaaggcatgctcctgactgtgatggcctatgactgctttgtagccatctgtcgccctctgcactacccagtcatcgtgaatcctcacctctgtgtcttcttcgttttggtgtcctttttccttagcctgttggattcccagctgcacagttggattgtgttacaattaaccatcatcaagaatgtggaaatctctaatttggtctgtgacccctctcaacttctcaaacttgcctgttctgacagtgtcatcaataacatattcatatatttcgatagtactatgtttggttttcttcccatttcagggatctttttgtcttactataaaattgtcccctccattctaaggatttcatcgtcagatgggaagtataaagccttctccacctgtggctgtcatctagcagttgtttgctggttttatggaacaggcattggcatgtacctgacttcagctgtgtcaccaccccccaggaatggtgtggtggcatcagtgatgtacgctgtggtcaccccatgctgaaccttttcatctgcagcctgagaaacagggacatacaaagtgccctgcggaggctgggcagcagagcattcgaatctcatgatctgttccatcctttttcttgtgtgggtgagaaagggcaatcacattaaatctctttatctgcaaatcctgccccttagtcacattctttttgtggcttgatggtttttattcctttccgcatttcctttgtgaatattgctttcttcgttatgcctttatctggaatgagtgacgattctgggatccttggtttagcagaaacctcatgacagaatcttctatacctaggtggcctcttttagtctctgagcaataaccatgt

SEQ ID NO: 39886 - DNA, 2300 bp, Homo sapien
gtaagagccagcccctcttgcccccctggctctcaggacccccatcgcagtggtgtgaggcacgccccttgatgcgggtattaagagccttcccatcttacctcctggctcttaggacccccatcgcagggggtgaggcacgccccgccatgcgcagagtaagagctaacccctcttgcccccctggtttttaggatccgcggtggactcacagcctgtttatcatattgtgagtaatatcgtctcccgctctggagattgtgaactgtttcacccaccagtgttcaccccggcgtacagaggttgtacaaccgtctgtattgggagtcatatcatcctctccctctctgaatattaagaacagtatcacaggggtgtttctactccctcggatatcgcgtgtcatatcctcctctcccacgttgcaattacaaacaatatcagtgggggcgtgtccaacttctgtgatactgaaagcaatatcatcctcttccctccaggatcgtgggaacaatatccttgggggtgtccactttctgccatatgtgtagtcatatcaccccctccgccttggaatattattaagaaccacgtcacacgggggtgtacacttcctacgatgttgggagtaatagcattctcttcttccatgaatattaggaacaaaatcaccgggtggatgcacacccagtgctatattgggagtaatgtcatactccaccccctggagattatattcggatcaatatcaccggctgggtgtgcacctgctgcgatattgaacgtaatatcatgctctctccctccctgaacattaggaacaatatcacaggtgggtgtacacccactgaggtattagggcatactattagtatgaattattccttgttttttattaacatgaatatgaatggccgatattaatattaatattaagaagtaattgctaataaaaagttctcagattattaatattaatattaattattaggagctaatattactattttctaaagaataagatcagtatcagttattaatatcaggcgtcataatcatcaatattaatcatgtattgttattgttagtataactatttaatattaattatcattagtatccgtattgatttttaaaattatattatgggttattaatattgataattattagtgtcagttaataattgagattattaattgcggtaagtcgcattgcgccattccaccccttcctcggcagctcgtttacgacccaaaacggggacacaaatgcccctgagagagcagcggtatactgggatagatgaaaatgctcatgtagtggagagacgtgtttttgggtaccagcccttcacctgcgtcgaccttctcaactggaaaaacaatacatcgccctataccgaaaagccacaagccctaattgatttgctccaaactgttatccagacccacaaccacacctggaccgattggcaccagttgctcattttcctctttaacagtgaagaaaggcagagagtcctccaagcagcaactaagtggctagaggaacatgcaccagctgattatcaaaaccccgaacagtatggaaggacccagttgccaggaaccgacccccagttggacccacatgaaagagaggagatgcaaaggctaaaccgagacagggaagctctcttggaaggattaatgaggggagctcagaaggccacaaacgttaacaagctctctgaggtcattcagggaaaagaagaaagtccagcacaattctacgagagactgtatgaggcctatcatatgtatactccctttgatcccgatagccctgaaaatcagcgcatgattcacatggctttagtccatcaaagtgcagaagacatgagaagaaaactgcagaaacagactgggcttgcagggaagaatccatcccaattactagaaatagctagccaggtgtttgtaaacaggtatgcagtaagccgtaaggaaaacggcaaagagaatggaggtcaggcccggccacacgccgacctgtttgtcagctgcagcaatcagaggggcccccgcaaagaggcaagggaaagggggccctgggaaagaaactcagcttggctgtcagagtttgcagcgtaaccagtgtgctgattgtaaagaaataggacagtggaagaacaaatgccctcagctcaaaagaaaagaaggtgactcagagccggaggccccggacaaggaggaaggggccctgctcaacctggcggaagggttcttggactgagggagaccgggctcaagcatccc

SEQ ID NO: 39887 - DNA, 2300 bp, Homo sapien
gtcacgggagctggaggccaaggagcccctgccacctgcagtctcactccaggtcagaatcgctgtcctctgaggaggaggaaacctgaaggtcctcatagaggacgctcggtgggacacgaacacagggagcctcagacttctctgacacatgagggctctgagcgaggaaggctcccggcttctcaggagagtgaaatgagggggccgccaggaggctggagctccagcgtccgttttccagtctccggaagagcactctgagaggctgggccccatcatggctggccgctgagtgatgggacatggtgcaggcctgggcagtaggcaggcaaggtctgctgtgcggaggctgccgttcgacgctgggcacctgggccggtgtcctcctgcccatctggggcgacgtacttggtccaagttcggttgcggctggcggaggttggagattctccggggcccccagctcacctccctggatggcgctttcggggatctggaagggacccagtctcggtttcttggggaagttcaggcaagcctgaatcggagcctgggcaggtctcttggctcctggcccgaagctgagattggagccgaggcccaagctgtgtgtggcggctggcgggcagggctgtgaggtcaccgcaggacgtttgtcttgtgcctggggtctggcggcctggagcaggccgtgggttttggaggcagcctggggaacttctcggcagccaccctcagggctgctgtgtgtcggcttcaccacgaggagaggctcgcggccctggtgcctgactgcaggctgagggatgtcggccgcagcccctgtctgtctttcctttggtccaagacttgaggaggagctcaggctggcttttctgaggggagacagtgaagccaagacggagcccctgtcagacatttcggtagctgagccatcagcgaggacagggtccacgcgcggcctcttactggttgtgtggaccggcattggcccgcttgcaacctgaaagagaggaaacaacacaggttagaagttcctcagcatggagccaacgtgaaaatcaagcacatccaaagacaaggtgcacacgccatgaaattcttagtacagtatcgacaggcggtccttggaagtagggacagaccctccacctgagtgctgatcaggacaagacacatgaaagatgcgctctcgagctatgtgtagctgatctaagcacaccattgttcaaaagatcgcgtcttgggcattaactggatcaaagcgcctccactcagccttccatgaagtggaacggactaatgcccttcccaaggcaggttgctggctcaagggtactcgggacgtcttctctgaacacatgcatgttcctgggtttcgccttctccacgtttggggcctctgagggactaatttcctcatgccgctaggaacgtgttgttggcaggcttgccataattggacagaaagaaagcaacaggaaatacggcatgttcagatgccttcgcctggaatccaattgacctggaaggatcgtggagtccctgaccccaagaaggcaagaaagaggggttccccgatttcctcccgcagacgggaagctgaaaggaaatcaaccagggtgacctagaggagaaaaagaccaggggcccggggtgacactcgccctcagataatcagaaggttccgtggatccttttccattcggcagcggcttctctggaggtttcccggaaaacatgtggaggagagccttcctctgcgggtcttgttgcctgcagaacagaaaaaggtcaggccgtgccccctggttttccccaggagacagggagaaccccgtctggggcccagccccattccgtgtcttgtgatacagaaatggacatctggtgccctttccgcctctgcaccttccctcacgtgccaaccttcccatcctccaggtggccctctaggcttcccaactaaggactgtgatttggattccatcgcttttcccgctgtcgcggggaacctgcacgaagcgcccccgcctctccccgtccctgaatctcccagagcccaaggagctcctgggtgtggaaccccggaggacacggagctccggcctatttctctgcagcgttccttccctggcccggagacggaaaggcacacggtgtgcaggtgcagagacaccatgtccttaggaggcagtaccccaagagtggtgaaaacccctcccactgctcaccttggtctctcttccttctctcccttatccttgttcaagggccccgggttggcttcaacccgg

SEQ ID NO: 39888 - DNA, 2300 bp, Homo sapien
gtcacgggagctggaggccaaggagcccctgccacctgcagtctcactccaggtcagaatcgctgtcctctgaggaggaggaaacctgaaggtcctcatagaggacgctcggtgggacacgaacacagggagcctcagacttctctgacacatgagggctctgagcgaggaaggctcccggcttctcaggagagtgaaatgagggggccgccaggaggctggagctccagcgtccgttttccagtctccggaagagcactctgagaggctgggccccatcatggctggccgctgagtgatgggacatggtgcaggcctgggcagtaggcaggcaaggtctgctgtgcggaggctgccgttcgacgctgggcacctgggccggtgtcctcctgcccatctggggcgacgtacttggtccaagttcggttgcggctggcggaggttggagattctccggggcccccagctcacctccctggatggcgctttcggggatctggaagggacccagtctcggtttcttggggaagttcaggcaagcctgaatcggagcctgggcaggtctcttggctcctggcccgaagctgagattggagccgaggcccaagctgtgtgtggcggctggcgggcagggctgtgaggtcaccgcaggacgtttgtcttgtgcctggggtctggcggcctggagcaggccgtgggttttggaggcagcctggggaacttctcggcagccaccctcagggctgctgtgtgtcggcttcaccacgaggagaggctcgcggccctggtgcctgactgcaggctgaggcatgtcggccgcagcccctgtctgtctttcctttggtccaagacttgaggaggagctcaggctggcttttctgaggggagacagtgaagccaagacggagcccctgccagacatttcggtagctgagccatcagcgaggacagggtccacgcgcggcctcttactggttgtgtggaccggcattggcccgcttgcaacctgaaagagaggaaacaacacaggttagaagttcctcagcatggagccaacgtgaaaatcaagcacatccaaagacaaggtgcacacgccatgaaattcttagtacagtatcgacaggcggtccttggaagtagggacagaccctccacctgagtgctgatcaggacaagacacatgaaagatgcgctctcgagctatgtgtagctgatctaagcacaccattgttcaaaagatcgcgtcttgggcattaactggatcaaagcgcctccactcagccttccatgaagtggaacggactaatgcccttcccaaggcaggttgctggctcaagggtactcgggacgtcttctctgaacacatgcatgttcctgggtttcgccttctccacgtttggggcctctgagggactaatttcctcatgccgctaggaacgtgttgttggcaggcttgccataattggacagaaagaaagcaacaggaaatacggcatgttcagatgccttcgcctggaatccaattgacctggaaggatcgtggagtccctgaccccaagaaggcaagaaagaggggttccccgatttcctcccgcagacgggaagctgaaaggaaatcaaccagggtgacctagaggagaaaaagaccaggggcccggggtgacactcgccctcagataatcagaaggttccgtggatccttttccattcggcagcggcttctctggaggtttcccggaaaacatgtggaggagagccttcctctgcgggtcttgttgcctgcagaacagaaaaaggtcaggccgtgccccctggttttccccaggagacagggagaaccccgtctggggcccagccccattccgtgtcttgtgatacagaaatggacatctggtgccctttccgcctctgcaccttccctcacgtgccaaccttcccatcctccaggtggccctctaggctccccaactaaggactgtgatttggattccatcgcttttcccgctgtggcggggaacctgcacgaagcgcccccgcctctccccgtccctgaatctcccagagcccaaggagctcctgggtgtggaaccccggaggacacggagctccggcctatttctctgcagcgttccttccctggcccggagacggaaaggcacacggtgtgcaggtgcagagacaccatgtccttaggaggcagtaccccaagagtggtgaaaacccctcccactgctcaccttggtctctcttcctactctcccttatccttgttcaagggccccgggttggcttcaacccgg

SEQ ID NO: 39889 - DNA, 2300 bp, Homo sapien
gtcacgggagctggaggccaaggagcccctgccacctgcagtctcactccaggtcagaatcgctgtcctctgaggaggaggaaacctgaaggtcctcatagaggacgctcggtgggacacgaacacagggagcctcagacttctctgacacatgagggctctgagcgaggaaggctcccggcttctcaggagagtgaaatgagggggccgccaggaggctggagctccagcgtccgttttccagtctccggaagagcactctgagaggctgggccccatcatggctggccgctgggtgatgggacatggtgcaggcctgggcagtaggcaggcaaggtctgcggtgcggaggctgccgttcaacgctgggcacctgggccggtgtcctcctgcccatctggggcgacctacttggtccaagttcggttgcggctggtggaggttggagattctccggggcccccagctcacctccctggatggtgctttcggggatctggaagggacccagtctcggtttcttggggaagttcaggcaagcctgaatcggagcctgggcaggtctcttggctcctgacccaaagctgagattggagcctaggcccaagctgtgtgtggcggctgatgggcagggctgtgaggtcaccgcaggacgtttgtcttgtgcctgggttctgacggcctggagcaggccgtgggttttggaggcagcctggggaacttctcggcagctaccctcagggctgctgtgtgtcggctccaccacgaggagagtctcgtggacctggtgcctgactgcaggccgagggatgtcggcggcagcccctgtctgtctttcctttggtccaagacttgaggaggagctcagactggcttttctgaggggagacagtgaagccaagacggagcccctgccagacatttcggtagctgagcgaccagagaggacagggtccatgcgcggcctcttacaggttgtgtggaccggcattggcccccttgcaacctgaaagagaggaaacaacacaggttagaagttcctcagcatggagccaacatgaaaatcaaacacatccaaagacaaggtgcacacaccatgaaattcttagtacagtatcgacaggcggtccttggaagtagggacagaccctccacctgagtgctgatcaggaaaagacacatgaacgatgcgctatcgagctatgtgtagctgatctaagcacaccattgttcaaaagattgcgtcttgggcattaactggatcaaagtgcctccactcagccttccatgaagtggaacggactaatggctttccgaaggcaggttggtggctcaagggtactcgggacgtcttctatgaacacatgcatgttcctgggtttagccttctccacgtttgcggcctctgagggactaatttcctcatgccgctaggaacgtgttgttggcaggcttgccataattggacagaaagaaagccacaggaaatacggcatcttcagatgacttcgcctggaatcaaactgacctgcaaggatcgtggaggccctgaccccaagaagacaagaaagaggggttccccgatttcctcccgcagacgggaagctgaaaggaaatcaaccagggttacctagaggataaaaggaccaggggcccggggtgacactcaccctcagataatcagaagattccgtggatccttttccattcggcagcggcttctctggaggtttcccggaaaacatgtggaggagagccttcctctgcgggtcttgttgcctgcagaacagaaaaaggtcaggccgtgccccctggttttccccaggagacagggagaaccccgtctggggcccagccccattccgtgtcttgtgatacagaaatggaaatctggtgccctttccgcctctgcaccttccctcacgtgccaaccttcccatcctccaggtggccctctaggcttcccaactaaggactgtgatttggattccattgcttttccccctgtcgtggggaacctgcatgaagcgcccccgcctctccccgtccctgaatctcccagagcccaaggagctcctgggtgtggaaccccggaggacacggagctccggcctatttctctgcagcgttccttccctggcccggagacggaaaggcacacggtgtgcaggtgcagagacaccatgtccttaggaggcagtaccctaagagtggtgaaaacccctcccactgctcaccttggtctctcttccttctctcccttatccttgttcaagggccccgggttggcttcaacccca

SEQ ID NO: 39890 - DNA, 2300 bp, Homo sapien
tgtaaggaaggggtccagttttggttttctgcctatggcaagccagttttcccagcagcatttactgaataggagatcctttctcccttgcctgtttttgtcaggtttgtcaaagatcagatggtcgtagatgtgtggtgttacttctgagggctttgttctgctccattggtctatatgtctgttttggcagcagtagcatgctgttttggttactgtagccttctagtgtggtttgaagttaggtagcgtcatgcctccagctttgttgtttttgcttacaattgtcttgggtatacggggtattctttgatttcatatgaaatttaaaatagttctttctaattctgtgaaaaatgtcaatggtagcttgatgggtacagcattgaatctataaattagtttgggcagtatggccattttcacaatattgattcttcctattcatgaggatgaaatgtttttccattcatttgtgtcctctcttatttccttgagcagtggtttgcagttgtccttgaagaggtccttcacatcccttgtactcctagctgtatccctaggtattttattctctttgtagcaattgtgaatgggagttcattcttgatctggctctctgcttgactattgttgatgtaaaggaatgcttgtgatttttgcacaatgatttaatatcttgagaacttggtgaacttgcttaccagttcaagaagtttttgaattgagatgatggggttttctaaatataaagtcatgtcatctgcaaacagagacaacttcacttactctcttcctatttgaataccctttatttccttctcttgcctgatagccctggtgataacttccaatactatgttgaatagaagaggttacagaggacatccttgtcttgtaccagttttcaaagggaatgtttccagcttttgcctattcaatatgatgtgggctgtgggtttgttataaacagctcttattattttgcaatatgttccatcagtacctagtctattgagagtttttaacatgaagggatggtgaattttatcaaaggcatttttgcatctattgaaataattgtctggtttttgtctttggttctgtttatgtgatcaattacatttattcatttgtgtatgttgaaccagcatttcatcccaaagatgcagccgacttgattgtggtggataagctttttgatgtgctgctggattctgtttgctagtattttattaagaatttttgcattaatgttcatcagggatattggcctggattgagcaggtgtgtgtgtgtgtgtgtgtttctaccttggtttgccagtaggttgatgtgtgagtgtgtgtgactttgtgtgtgtgtggcggggggtgggggggcggtgaatgtgcgatagagagccaaactagagcagaggaagttccctggcctgccatgacattaaatgttctgaattcaagataccaagagaggcatgagacccacagttgaaacttcatgatgtggccaggtttcaggggtttctgggagctgccagtgggcatatctcaggcttgctcccactgacaatccatgtcttctctctaaatgggagatggctctgtatggagaacaggtaacagagagcatgatgtaagggttctacctcatactcactaggaaagaaaacagttttcatcatctctcactccattcccattgtaaatctatagacacaggggacagttacctgaaatattagcatagctaaagtcctcagaccaaattagatgtcctaccttctcatgtggatcagatcctaaaaaaacaactgcttcctgtggtcattatcttttatcccaggccatttccaatccagcggaagaccttctagaagaggtgatgggtgggagagtgctggcatactacgtgaagctactatttggagttggacacgagtgcatgtgaccttgtgccacagcgggaatgtgagctggatgacaaatggagatttggacttgtgataattggcctctgtgtcattgtgtggaagactgactggtccctttatttcctgtagcttgactaccacacaaatgaatccactcaaatgttggcaagtggagcagagtcccaggacaggtaaggcactttgcctgctttttcttaagatcaatccccatgcctaaaaattaaagtcacatcccacacgatcattaaagtagagagtgcattctgcaggatgagtgaaaaggcatttatgattcttgggggcagatgttctacagtagcctgtgctagttcatgtctttctgcag

SEQ ID NO: 39891 - DNA, 2300 bp, Homo sapien
cacacactggggcctgttgggaggcaggtggagggagagtatcaggataaatggctaatacatatatgcaatggaatattgttcagtgttacataataacgaaaccctgtcatttgtgacaacatggatggacttggagggcattaggttatatgaaataggccaaccacagaatgacaattactatatgatttcacttgtatttgaaatctaaaatcgacaaactcacaaaagcagagagtagaatggtggttgccaggggccgtggtgctggggaaatgggtagatgtggttagagcacaaagtttcagatataccacgtaagtaagttctggaggtctcgtttacagcatagtgcttacagctaagaatactgtattacatacttaaaatttgctaaaagggtagattttgtattcttaccaatatttcttaccaaaaaaataataataataaaggggaggggacttagggaggtgaaggatatggttataatcttgatggtagtgatgtgttcatggtgtatacttatccccaagctcactgagatgtacaccttaaatatgtacagctttttaaatgtaatcatagctcaacaaagtcggttaaaataaaacaagagggggttggttaaaaaacttaaaaggaggggtagatgttcccttgtttttttctcttggcttttttcctacctgctgcctggaattcaaaaatgataggtggggatttagcagccaaactagagcctcttttacactatagcagaacagagtgctggaaggggcctgcatccctaatgaatttggcaggtatctgtactagccatggtaggtagaactatagatttaagtgagggagaaacaaacttctgccttgtttaagctactttgttcagacattaattttatatacatatagagaacatatgctcctttatgagtaggaaaaatgtttatgccatatggtccatgatgggtgttcaacaatgtaggatgaggctgattatgatgacaatggtgacaaatagcatgaaataataagcaatgaaaataaggtggcctcatagttgtgtatggttactttatttaaagattctgctgctaatatcattcaatgtatttgtatgctggtgggagttttgttagatgtagactaagaaagtttacattatttaatgaaaaatacttgaccaatttaaaaaaaaataaaaatatcatgagatggaactaagcatctgtattgcaaagtaactctcccagttgattttctgcatagtaatgattgagaatcccctgatctagatccaatagatctcgacctttataggtgctatcaaggaagcacctaaggaagacaattttcctgactatatccatacctccagttagtaatagatctagagatctagaacccaaatccaaacctcctgcctccacgtgcggtggtctttcgctgttgttttgttccacttggtgaagaggatttgagaataaatagccacatgattcaactccctcctcagttctgaggaatatagccttgtcctagcaagcaagaagttcatacagtagtggatgaggcaaatatacattcactaatctaacatacaaggcagtaagtactgtaacataaacaaagcactttggagtttcagaccaggagcaagtggggtgattaattcttagcagggctagtaaagtctgggaagtgttcactaacaaaatgtctggtcattaatgaaaccaactggtttctcaacacagtctaatttattgtaacaatataaatggttgtttgttcataaactttcatcttttgccaaaatgtagcttatgtccccatttaacaaggttttctggccaaaactgtgcacccacatcattctaatgaactggctgtccaataaaaaaaaaggattctcagtcttcccataaaagcaattttgcgtgcatagaacacctctatctatgaatatccctaaggaggtacagaaagactcttattatccaaacagagacattccactgctgctagagagccacagacggaagttttctctgcctcctggaaatgaagccaaacttttttctttcttcagccatgaggattgctgtcctcttcttcaccattttcttctttatgagccaagttctaccaggtaacaaaataaacttggtaagagtagagtgcctaacaccttacagggattcagtactcaaagagaaatcaccatcacctatgaccagaaaagggggtctcataggaaacctggaagactcattggctgagaggcctgcagc

SEQ ID NO: 39892 - DNA, 2300 bp, Homo sapien
attaaggctcggacatcatcaccaaattttacatctttaccatcacttcaagtgaggtgaggagccagtagcctggacactggtctcatctggtgaaagactgtgggtaatggaagcatttctgtggggtgctggcaggacatgtgcatggcgaggcaggtcatcagcagcaagtgagagctgcctcttactttctaaaggtgacatagcaaatatacaaaaaaaaataaataaattattaatttaggtagagcacataaaggctttatttcatattccatttctctgtatgctttcttcaccaggaagaaatagttttagtgtcaggaatgaatgagtctgcccctcaattccagcctgctcaacacacaaggaaacaaagccctgacaatcagagtgactccctggtgactaagctccagtcctggatgcatatttgtttagcagttctgacagcatctgacccagccctctctttgcataccccatcagaaccttcttttttttttttttctttgagactgagtcttgctctgtcggaagcgactcccgtgcctcagcctcccaaatacctggaattataggcgtaagccatcatgcctggctaatttttgtatttttcatggagatggggttttgccatgttggtcaaattggtctcacactcctgacctcatgtgatccacctgcctcagcctcccaaactgctgggatgacaggtgtaagccaccatgctaggctcagaaatttccttttataaaaatgtcattaaggatcttggctgcacaatatcattaccagcttcctttaaatccacctctggcctgccaggaatcagggttcttcagaacctgacattttaaatgaagaggtcaggcaggtcatgaggaaagcctcattgtccccatgtctctgtcactgctgcacccctgagacatcacagacatggacactggggcctgcttgtttctcaaactgcccttagatcgaaagagggaggaaccaggatgaatgccactcattttcccaagaaaggccctctcctgagtgcccgggatggggctctgtccattgcctggggccgccaattgctactctgggttacggaggaaggacagggtcctgagagacaccagagacctcacacagccctgaaaacatggggctccttcataagtgtttcccatcaccaacagggagaccacgtggaggccttgcagccccactcggtgcttctccaccaaatcccaagggcagtgacgctgacgtctgtggaaagcagagaaagccctggctcccaaagccctgaagtcctgtggagctgacattccctgagtgacggtgtgaatggaaggaactcaagtgcgggtggtaggccacctcctggcccaggcctgggtgaactctgaggggacacatgtagtcacaatcccatcctcccattctccttctcagaggaaggaagtgggcatccatctgcctcatctctctcccgtggggaagatggggagtttcaggggaactttcacataaatttcaccagctcagatctcctgtgaggatggggcccaccatgctcccggtgctgccagaggccctgagcccctcccagggtccctgggtttgagccagccctgtatcatccccaggagctgaatgtccgagcaatggatagaattagatggaaagagctctcaatttggcctgagactgtccccagatactcaggaaaaacaggacgtcgcacagagtgggcagcaggtgagtggcaggttataggtcctgagtttgagtttgttctcacgtgagacagacccagcccctcactccattcacacactgggttttaaatggtgcaagataggaggaattttctggtcccaagagcaggaggaagggattttctggggtttcctgagtccagatttgcataagatctcctgagtgtgcattgttctttgaggaccattctctgactcaccaggtaagtggctgaattctaacctctgtaatgagcattgcacccaataccagttctgaactctacctggtgaccagggaccaggacctttataaggtggaaggcttgatgtcctccccagactcagctcctggtgaagctcccagccatcagccatgagggtcttgtatctcctcttctcgttcctcttcatatttctgatgcctcttccaggtgagatgggccagggaaataggagggttggccaaatggaagaatggcgtagaagttctctgtctcctctcattcccctccacctatctctccctcatccctctct

SEQ ID NO: 39893 - DNA, 2300 bp, Homo sapien
acagttgtcagtggctccctgaagtagagaagtaaattacacagtctctctcttctattgtttgaaattttaccataaaaatgcattacttttataattttcttaaaacaggtaagtccccctcaaaacggattttgtgtgtctggagtatgtccaaacttgaaaaggctgattgtcacagcccaatctccaattcccagctcccaaactagttgacaagaaaaagtggcatttttcctcaccaaggaacttttatgaaatagtggtgttgccataaaaatgcctcccagtctatgaaggaacaggttagaccaggggttcacctgtggaagtctattctccatgtggaaaagcaagtcatctccagcgtctgactgtcctcaccccaggctgagagctggtgctaaccctctacaacgcccaatgccatcgttatgtctgacatagtaagactgtgaagtcagcacccatcccacccacactcacctccttcccccatttataaatatctccaattgctttgtctcaaatcatgaactaaagaggaaagttagattttaaaaagtagcatctacctatctaaagtcttaaatctgctgattgagctccactcttggctcaaagagttatctttgagttatgatgagttatctttcttctacgtttctgcagccctgtgcttgaaatcttcctatgactcccattataattcatcctaaatttatcatttgactgtctgcccatctacctggccctacatggagcttctggagagaaagaaccaagactggtccctcttggtatctcatccacttcaccctcacctatgctgaagacatgatacttgtcccttcctatagtatgtgttcagagttttcttactgaatctgacaggtgtggtgcacccaaattctgaacacacactcccagaactaacacacccttgatccttagtggatccgttataattgcattcacacgaagcagcagctaggagacatcacggtgacttcagctcccaattgaattgtcattgacttacttagttcccaattgatagtcaaccaaatacaacccatccattggattcctgaacatttaagtttaatagctgttttttttttcttttttagcatttttccctctaaacgttgaatctatatgcaggggaaatcatctggcccctggactgccttgaatgctcctgagccaagagtaacttgaggtcttaaatgtctattctgaagcccctcttttgcacagggacagtcattgactaggaggagatgccagtctattaaatctatcatcccagcatcctctttctctgatgaagtaaaattaaacaccttctttactcataaatttggtaggttttagacaatgatgaagaatcggacatgggccgcacacagtggctcataccagtaatcccagcaatttaggaggctgaagcaggaggattgcttgagcccaggagttcacatctgggctcgaaaccagtctgggcagcatagtgagaccccattttattttctacagaaaatttaaaatttagccatgtgtggaggtatgcgtttgtggtcccagctactcagggggctgaagtgggaggacctcttgagcctgacagctcaagctgttgtgagctgtaatcatgccactgcactccagcctgcacaaaaaagtgagactctgtctctcaaaaaaaaaaaaaaaaaatgaaagaatgagacatgtttcactcaaattatagcaccccatcataggccaagggccaggtggtcagctaaccttgaatgtagcccattttcctcccttacctcactaccaaaaagccagtcctattgccagatattgaatatgtccagggctggatttatttggtccccaggagggtcttagactctcccagcattttaggaagagaaaaaaagctccaaagcagcaaagtacggacaagtcagcccccagccacatgccctgagactattccccaaagggggcatacttgctcatgccagccctatctgtacccacaacccaatctgacccacacccagacaagcccctggagtccagagagcacccggacagccacaaatccatagggagctctgccttaccattgggttcctaattaactgagtgagtgggtgtgttctgcatggtgagaggcattggaatgatgcatcagaaaacatgtcataatgtcatcactgtaatatgacaagaattgcagctgtggctggaacctttataaagtgaccaagcacaccttttcatccagtctcagcgtg

SEQ ID NO: 39894 - DNA, 2300 bp, Homo sapien
tttcacaatgatttgattagtaactgtactgctagaaaaaatatgccatccacatttaccttggatcctttccaaataacgtgtagtataaatagaaagaatgaatgtaaagtataaaatatgcattttattgttttatctataagtcatcttagtgacttttaaaaaatgactcaaatttttgaatatccacactcagtgtttttatcaaacaatggttcatgtatcgtacagccactttgtccatgcacaggatacattcagaattgtcattattccttgggacccttgaacttagggtatcatcttggtgtggaagccaatttccctaaggggcaaatgaaattgcttttctttctttctttctttttttttttttttttgagagatttcagagatgtcttcagaacaaatgctccacagagaaagaatttcacattttaatcgatttcttaaagtactgagttggaccctcacaaatattcataactattttacaattacttagtacatagctaacatttaaggtaacttttttttttctctctttttttttggtggagggtcaaaagcagcttggagtgcccaattttccctaaagtcttaacttcaaaggtgattttgcaaggtacagaaaggtctgtgagtcagagagtccctgccagggcacattgtcctgcttaatctctccagaggtggaaagttcaaaatgaacacccagcccctgcctctttgagatgctcacactgttcacccatgcagaaagtccaagaccactgcttgatgtctctttttcaaaatccatgtctaggtaagactcatggtgagatatggttgttgtagactggttaaataacgcagaagacagcttgaagaaaatatgatgtgtctaatctgaagaataacaaggctctgcaagctataacaagtaatataggcaagtccagaatgatatctagagtctgctattgcttacataaaaatggggtatggattcatctctgcttccatacacatgggacacctctggaaggattaataagaagctaacagcaattgttatgaagcccagggggataggagagaagacatccttctcacttgccccttttgcttaagagaattttaagggaaataaatctaagtgatcctgggactaaaatcaaataggggcaaaatgtgcagatttatccactgtgtgttttaataccacacattatataaacccacacacaaaaatatcgtgtccttgcagattctgttttcacaactcccagcaccccagagcccacaaacctccctccagcccaggatgacacagccctgtggttgccgggggctctctgcatccctcactagactgtcacctccgacagcggataacttcatcaaatgagagaagagcatgtcctcttcctccaaagtagacaatatcctggctcttcataaataggtgaattttgccaaatttttggaataatgtggtacgttgtctctgtttttttttttctttcagcatagcgtttgtgaggttcatccacgttgttgtacacatcttcttgtttttctattcttgttgtggtgtggaaatacattgtgttttgttgttgtcataatacactatttggttgcattctcttggctgcaaggaaatgtgctacaatgaacgttcgtgcacatgtctcctaatgcacgtgggcctatgtttctgttggtagatgggagtcatgttgctgggaaataagctaattatctgctcaactgtggtggacaccgcagctttctgaaggcagaaaatatatctttacacaaccatgtctctagcacctagcacagggcttggcactaagtagccacacctcaatgttggttcactttcctcttcaatatccgtatatggaattattggttgatccctgcttctctgaatatcaggaagccagtctatttttaggcagaaagggaagagtagtcagtaaccttctgcccacagccttactcagtagagcagataaatatgctcatgctgatcagtattcccaaaaacctataaatgtcccattttgtgccttctccgctccatttcattccatcattcatcatatttgtgctccttcacgggagggcagggaggttcaacggaccttaaaacatgaaggtcttttttctgtttgctgttctcttttgtttggtccaaacaaactcaggtaaatgtctcctggttagccctggggaaggtagtgcaggaattccatttatgtgtgtgtctgtatggacagtgtgtagatgtgtctgtatgt

SEQ ID NO: 39895 - DNA, 2300 bp, Homo sapien
ctacttagtccaaacgaatcaagataccacatactaagcagcttaaaaaaaaaagaatatgatttattgattgaatggaccaaaaaaaacttgaaacaattattagaatattctataatgggttctgccatcctccccctcaggatggatgtggcttttagcaagagaattattcaaagatttttttaggacacagaaatctggcagaagaggacaggagctgagagcattgttgtgttaggacagatgtaacattaattgcctttattacgacttcaccagcttttgcctgtcaaagagcagaactaggctttcccggctgctcttttttaagattgttcttttcagaagcatggaagagggggcttactttatctcaagacgtagacaaaggaagtgagatctaactatttttggctcagtttcttcatttaaataatttcaaataattctaacgacttcaaagaagattccgttacctgggtggtaattactcaaatgctgttatattttaagtcatgattttgattaatgattcattactattaatatctgaatggtggaataggcttgtttttgttttctttccttttatagagaagataaaaatatatagaaataagttaccaatatactccaaaatttccatcactgttataaaagatccacattccaagtttaaataattacaaatacaactgtaagaagttgctattgaactagagtacaaaaaatacccagagtatgtagatgagcgaataaatcttcatttagggttgaggtagagcagctgtctacctcctttcttgactgtctatgttcttccaacatccaattatcagaatttgatgcagtaagtgattaaagaaacttatcatgggccagttgtcacctatctccgcagtgttgccctgtgctcttggaattggaagacttcctaattccttaaagtgaaaggatgtgaatgatgctcctgctctccctgaccagcacctcatgctttgcagtggagaatctgtcctgagacccaaaagatagtggcctccgcattgtgctgccagggcagctgctatgtgcaactgtccgcagctgcaaaccttccgccctttgctggtgcttcagcggatgcccaggtctctattgtcattgctgcctctttctccatttgcttccagctttctccaggtagagagtaagtatttttatttacacaaatgacctaagttgttttctctgtctggattaaaatatacatgcaaatgagacatatgagataagcactatcttttccagacatcactgatgttacattggatgctatgtgaatacaaaactcttcaaccaaagccttcttcactttagttaagtccagagcagactgtctgggttacatgcatacctgagctaatgcagccaagtaagaaacacacacttggttaaaatgcttaaaaagatgaaggagaagggaagacaagtcctctgcttggatattactagaggagaaaacccagactcaaacacagattttttttttcttttttaaaagaattgaattggacccagtgacatcaacaggaggtgtctgggggtaaagagaatggaaaggggagagaaaaatcaagacaactcaaataagttaaaatagaaaggaggggggtccaaagtgaggaaggagaagtggaggggaccaagaaacagggagagagactcagagaggagaagaaaaagaaaagaacattttgagcagccttggaactctctgtataacttcaggaagggatagtttgtaaaaccaggtcctacctgttatgttgtgtgtcttatgcatgattttttaacactaaaataaaaacgctcagccaacaggatagaatcgacatggcagtttatttatgtccctgttctcatgaacattagggggcttttgagaagcgtttgaggacattggcaactttatgatagttatgtttgttctgcccctccatgcctttcatctttctgtttctctctgttcttccttattcaccaaacccacccaaggcattcaggcgtattatttacttcctgaaatatgtgtctcaagtgtttgttccaccagcagtgggatagtagcgtgtccacattgtcctttgagaatgagaagtcatcctggagcacagctcttcccacgctccgggcccacacacccagcctcactccatcaaaggagccccgctgcctgcccacccaccctgggtgctttctggcttgcagtgctcttggcagacatgaggcaacgattgctcccgtccgtcaccagc

SEQ ID NO: 39896 - DNA, 2300 bp, Homo sapien
tttcttttgaagtttggttattcagtccctgtatatgaattaccttttttttttgaagaattgctgaatatttattatcatcagaatttttcagttttcttcagaatcctggtcacatagatgaccttgaatattggctgatgtttttcccttgaagctcatcatcaaaaattactaaagcctgacatgtggcaggctaggagggtcccatggatcctgcacatttgtgcttgctgtgtgtctgctgtgaggagagtatccgacggcctctacgtgctgcacgtttgtaacctgcggcaggattcccatggctaccactcttgccctggctgcttccaggcagtgaatgagcacaatgtggactagagctgggccatgtctgctggtgtaggacagtctttgccctggggttccccactggcaatgctgaaattttctgcactgtagtctgaggctcccccgactccaaaccttttcacaggtgttaattgacgtcatgttctgaagactttccctactcaatcttgctccctctccccatcatctttttgttttgaatttttattttattttatttttttcagagacaaggttttgctgtattgcctactacactggagtgcagtagtgccatcatagcttactgcaacctcgaacttccgggctcaagagacccccctgcctcagcctcccaagtagctgggactacagggacacaccaccatccctggctaattttctttttgtgtagagtcggggtctctctatgccgtccatgatggactcaaacccctgagctcacatgatcctcctccctcgctcagcctccccaagtgctgagatttacaggtgtgagccactgcgcctggcccccctttatctttcacaggcatttcccaataaatttatttcctttctaattcctgttgataaatgcttcatggagcacccaaactggcatagtttatgatttctgatgttctattctattccgttactgtgaaaggagacctggttttccatcacattctcccctaagtgagaactctggggaagacacactgactgctagattttgcttaggatgtgcaagcaacgtatgtctgtcaggctttgtctaatctgtgttctagaataaggggagcttattcgagaatgtcaacttccaagattggacgtttttactttctctaaaatatttcattttagagaaatgaagtatttttttttttcttaaaataaaattatctggtgttttccctaagggcaaatgccaggagcatatgctctatatgttttgcctcgggtggggttggggttaaatccagggagcatatacccctggttgagggccaggcgtatgctctctggaaggttatgttttatttgaagccattgttagaaatacagcattcccatgaattgtctccttttaacctctcttctcattcttgtcctccttttcacctaagccctaagtgagcctgatgctctgtggttacaatcccacccttggacaatgcccgccatcaagtattccttgttgtcacttgtcatcctcatcctatactttttctatcacagaaatgtgctgggacttttcacgcatttatgacctccccacgctccatgccattcttctccttgacgttgtatgtttgtttcaatgtttacttcagagaggtcttgggggctatggacttcaattccattagccacatcacagttttcaacaagaatctcctgactgaaatgtactgaaatggaagagaaagtcctctcaccagaattgaggaatgtcaaggctggaaggtatcttagagatcatctaatccagttcttgcttcagaaacgattcggggaagcaagtgaagtgacttggactttacctatggtaatactgtctccccaccctcaacactgcccagctggcatttctgtagccccaacacctcccccacactgtgccttggtgagtcttcaccaaggaacgctgcattttgataagcctcagtaatcaagagcagcctctgcccataaatacacctgccctgctcctgcctggggtgattccctccgacttgcgtctgcttctcgccagcagccccagcattatgcagagacttgtgctgctattagccatttctcttctactctatcaagatcttccaggtaaaaagggactctcagctggaaatatacacagttgctggggatgacagggggagaagaaaaacatttgatttagaaaataaatcctgaaggatggagtaaccttcttcaatctcagccttttttct

SEQ ID NO: 39897 - DNA, 2300 bp, Homo sapien
ggaagggtgtctttaatgcctcttactgtggcaagacagttgggctcctaccctggctttgttttggttatctataagactctgagaagcactgagcccatctgaggcacaatttctgcatctgtaataaaatttgtaaaatggaccttcaaacccaaaaagattttctctaacttccattaaattaggggtaagacagagttttccgtaaaggcgctggcactggaagactagatgcattttatgtgaagctctcatcacagtacttggcttgatgatatgtgatcaagaaatggcagtccaagttacgctgctttacctgttgccatgactggcatgagtgcataggtgtctctaagctcagatccttacctgtcccttctccttacctgtctcaatctctaccataactacattttaaaaggttcatagactgctatccttgtttttaattttttctcaatttttgtttttgttagtgagcatgagatgggatgccaaaaggcatctttcctggccttcttttattctttcaaacctgtgacagcccctcctagataacaatgtaaaatgcaaaggaattacagaagaggcgttgggggatatcacctcttgtagtagatgggttgatcacgcccaggcattcactgaaggggaccctgtctgtgggacaccacctccgatcaccttccctgtaaagatgcccattttacctggggtcagaaagaagagcacggcaaagagaaagaggaaagtcctcatgactgggtgggtcttgagagatcagcaccgtgtccatgaggaaagagccgcaaacacccacatttatacatttctccagaccaagtaacatcttgatcagtgaggcttagcagaaacgagaggatttccatgctctgctgcacagagcccacccaacctcagtgggtgtcactcagtctacagctcatcatatttctgattctggaaagttttgaagaaggaaagtggggatgaagggaggacagagtagggcagacacagaaaaaataaaaaaatctggagtccagtagtttcgtttctaatcctggctgtgttcctgaacagctttggtttactcatatgtaaaatgggagtaattatacaatatctcaatgcttcagttaagagctgaggaaccgtagtgaggtggaatctgaattccagattcagtctttttgagctttgtaaacttggcaaagggcttgacctaagcatatatttgttaaaaaatgtgaatcttgctgtatgctgcacgcttttcgtgcttggtcctgccatgctgctcacctgtaccatggcactgttggcgcagcaaggggctggtaaccatcatgccttgccctagacacctgggctcaagcaatctacctgccttaggctcccaaaagctacgataatagacataagccacccatctgggccaatattcatgtccttaatgaatttaaaatatgcagtaattatggctttggtgcgtgaggtgatatcttacaggaaaggggactcagagctaacttgacaaaatgattgctacccctccttttctccctgtgatacttgtagagaataaaaatgaaagctagaaaagtgagagtccacatttattgagttcttacatggtaccaggcctccttccaagcattccacatattcaaaacacttttgcattataatcatactagattcttacaacacctttagaggcaggcagaatttgcaagtgggttcttattttctcccagaaaacagaagctggaagagatgaaaggggtcactatcttctggcccctgcattagtatggtggaaactcacatggcccctgctctttcaacctctagcctggtgttctttccactacaccagttagactccccaaaataaaaggctttctggatgccaagggttattatccatgatatcatccctttatcctgggaaatggagcatataattgtgttttattgattcacttcacggatcaagagcatctccccattacttttaaataaaaatgagcctctcatttgggtcttctcaaggaaatcccaatctctattccgaagagtcttccctaaaagatggccctgatcaggaagacattttattttctatttgctatgttcttcattttggttcaactgccatcaggtaagtaaaaatggatgggattttgattgggcagattataaagcctgttgattcttccatgtttgaccttaatggtcaagctctcatggcacctgtcatgggaatttcttagacctacagtgacatttac

SEQ ID NO: 39898 - DNA, 2300 bp, Homo sapien
tggtacaagaataaatctaagaacttggtttagtgagcaccaacagctaatgggaaaagccactgagtccaaatctctatggccaaattacagtccagtcacaaagatatttttctgtgaaatcaaaaatatccaaatattatacttggaacaagagaaagagaaggagataagttagtgaactgatttttcagacaattctatttctgccactatctctgtcccctctttgcctccagacatcagagagacctaacagcgccagagctcctaagagaaaaaataattatatacaagagatttaacttacctgatggaaatggttgggaaaaatcaagtcctgcctggcaccctaaattcaaaacaaaatacattttgaaaattaaaatcaacacaggaattaacactgtataaaacactcccaacttcacatgtgacatagcataacaggagacagtagatcacagagttgcaatctttattctgtttctcaaggccagcattccaggtaaccagcaaaaacaaattacaaaaaaaaaaaaatacactatatgctgtttgctcttagtaaatgtcactgtaggtctaagaaattcccatgacaggtgccatgagagcttgaccattaaggtcaaacatggaagaatcaacaggctttataatctgcccaatcaaaatcccatccatttttacttacctgatggcagttgaaccaaaatgaagaacatagcaaatagaaaataaaatgtcttcctgatcagggccatcttttagggaagactcttcggaatagagattgggatttccttgagaagacccaaatgagaggctcatttttatttaaaagtaatggggagatgctcttgatccgtgaagtgaatcaataaaacacaattatatgctccatttcccaggataaagggatgatatcatggataataacccttggcatccagaaagccttttattttggggagtctaactggtgtagtggaaagaacaccaggctagaggttgaaagagcaggggccatgtgagtttccaccatactaatgcaggggccagaagatagtgacccctttcatctcttccagcttctgttttctgggagaaaataagaacccacttgcaaattctgcctgcctctaaaggtgttgtaagaatctagtatgattataatgcaaaagtgttttgaatatgtggaatgcttggaaggaggcctggtaccatgtaagaactcaataaatgtggactctcacttttctagctttcatttttattctctacaagtatcacagggagaaaaggaggggtagcaatcattttgtcaagttagctctgagtcccctttcctgtaagatatcacctcacgcaccaaagccataattactgcatattttaaattcattaaggacatgaatattggcccagatgggtggcttatgtctattatcgtagcttttgggagcctaaggcaggtagattgcttgagcccaggtgtctagggcaaggcatgatggttaccagccccttgctgcgccaacagtgccatggtacaggtgagcagcatggcaggaccaagcacgaaaagcgtgcagcatacagcaagattcacattttttaacaaatatatgcttaggtcaagccctttgccaagtttacaaagctcaaaaagactgaatctggaattcagattccacctcactacggttcctcagctcttaactgaagcattgagatattgtataattactcccattttacatatgagtaaaccaaagctgttcaggaacacagccaggattagaaacgaaactactggactccagatttttttattttttctgtgtctgccctactctgtcctcccttcatccccactttccttcttcaaaactttccagaatcagaaatatgatgagctgtagactgagtgacacccactgaggttgggtgggctctgtgcagcagagcatggaaatcctctcgtttctgctaagcctcactgatcaagatgttacttggtctggagaaatgtataaatgtgggtgtttgcggctctttcctcatggacacggtgctgatctctcaagacccacccagtcatgaggactttcctctttctctttgccgtgctcttctttctgaccccaggtaaaatgggcatctttacagggaaggtgatcggaggtggtgtcccacagacagggtccccttcagtgaatgcctgggcgtgatcaacccatctactacaagaggtgatatcccccaacgcctcttctgtaattcctttgcatttt

SEQ ID NO: 39899 - DNA, 2300 bp, Homo sapien
gcttgcatattttttgatgagaagtttgctgcagttattctgtcatctttctacaggcaggaggcatgtatgccttctctgttgacaaaggtagaggatgttctttatttttcttttttaatgtgctcccttctcctcgttctcctagctttaatattttgttttgcatttttttagattgttcattcaccagtgccgtacaaacaactgttgttcttccctcagtttcttaattaagaaattaagactttcttttccataaaagagaaagattcttgcaagctttcgttctttctcacagtggctactgttcccctcagccgacttacatcatgaaatactctaatcttttttgtaagcacctgctgagtctatggagaagacattagaagttgctgtgaacttctcttttgtctgtgaccccagacatttatattgtttctctagtttatgcttgctcttagcaattctctacagactttacctgaaatcttttaaatcatattctgggggtaatctgcttcaggtaagcaagcactcatggtctttattttttggaggttcctgtcttttcttatatttctaggtaggtggctgatttgtgaccttagctttccaatgagttcaagaaactgaatatttgcagtctgccgtgtgttttgctgtgtacttgtttcatgtgggatgattttctttacgtatttctacatcttaagcagaagccattcttcatttaataacacacttactttctttaagacatacagaaatacttatattttctgctaattcttgtgccaattttggtaagttaaatttttgagagaattcttttattttatgtaagttgtgaaatgttttggcatatacctgttgacaacatttttatattagtttaatgtttcttggatctgtagtgataacttctttttcacttattctgcatacttgggcttacattgttcccttttctaaggttcttagagcataattttaagtcatagatttaaacatttcttcttttctacaataagtatttggatacaaatttctttcgaagtcattgttttgttgtgctccacaaaattcgatatacagaaatgctttccaattattctcattatttattctttgatacaaacacaatctagaatgatgttgctttatctccacatatttgaaaatatcctaaatagcttattttatagattgccaatttaatccccttgtggtgagaaatacactctgaagtatttaaatgtgcttaaacacatcaatatttgttttatggcctagcatatggttcatttttatgaatgtatcatatgtacttgaaaaaaatgtgtattttgcagttgtcttatgatgtgttctataaatatcaatgcagtcagtggaatggtggtattgttcagatcatgcatgactttgctaatttttccctgtgttctatcagttgctgagagagtggtgtaaaaattttctactatgaatatagaagtgtctatttctccctttaattaaatcaaataatataaaaacatgttaatggtttttatgtattttcaatggattaacccttttctccttaagcaacagcactccatgcaatacagcgagaccctgtcaaaaaaaaaaaaaaaaaaaaaaaacctgcacacgtactcctgaatttaaaattaaaggtttttgtgtgtttgttttaattattattttaagaataggttttatgtaaaatcatgtactaggaaaagcgtggtggctatatatcttatagacatggtaatacttgagataagacttgaaggaaaaatgagagaagtctaagcagagacacagaatagaatattccaggcagaaaggcagggttctctgcgtttgtctcccacaaatgtggtttagttaaaatctgatccatcagcccacacattagtcagtggagcatggaaaatagtatgttcccaatgaacattacaaaccgaggatgacttccagtcccttcagggcagtagaacatattttaatcaatgccccttgataaaagagcttgattccagctactgcacttccttcatcagctctccactgatgcctggagccatgaaaatatttgtctttattttggctgctctcattcttcttgctcaaattttccaaggtaagagggaaattcttctagaagtagagatgacagtctgctcaggatctgtcttttgagatgaaagctcaacttttacaaagttgaaggttccaaggcaaaccagtcactgaaaatcttttcctgagctccgacacaaaac

SEQ ID NO: 39900 - DNA, 2300 bp, Homo sapien
cgcagttagctacaaaatatctagagaacacaaaggtgacacaaaccccagagagtatgctgcttgcagccttgatgattgtatcaatggtggtaagtctccctatgcctgcaggagcagctgtagctaactataccaactgggcctatgtgcctttcccgcccttaattcgggcagtcacatggatggataatcctatagaagtatatgttaatgatagtgtatgggtacctggccccatagatgatcgctgccctgccaaacctgaggaagaagggatgatgataaatatttccattgggtatcgttatcctcctatttgcctagggagagcaccaggatgtttaatgcctgcagtccaaaattggttggtagaagtacctactgtcagtcccatcagtagattcacttatcacatggtaagcgggatgtcactcaggccacgggtaaattatttacaagacttttcttatcaaagatcattaaaatttagacctaaagggaaaccttgccccaaggaaattcccaaagaatcaaaaaatacagaagttttagtttgggaagaatgtgtggccaatagtgcggtgatattacaaaacaatgaatttggaactattatagattgggcacctcgaggtcaattctaccacaattgctcaggacaaactcagtcgtgtccaagtgcacaagtgagtccagctgttgatagcgacttaacagaaagtttagacaaacataagcataaaaaattgcagtctttctacccttgggaatggggagaaaaaagaatctctaccccaagaccaaaaatagtaagtcctgtttctggtcctgaacatccagaattatggaggcttactgtggcctcacaccacattagaatttggtctggaaatcaaactttagaaacaagagatcgtaagccattttatactgtcgacctaaattccagtctaacacttcctttacaaagttgcgtaaagcccccttatatgctagttgtaggaaatatagttattaaaccagactcccagactataacctgtgaaaattgtagattgcttacttgcattgattcaacttttaattggcaacaccgtattctgctggtgagagcaagagagggcgtgtggatccctgtgtccatggaccgaccatgggaggcctcaccatccgtccatattttgactgaagtattaaaaggtgttttaaatagatccaaaagattcatttttactttaattgcagtgattatgggattaattgcagtcacagctacggctgctgtagcaggagttgcattgcactcttctgttcagtcagtaaactttgttaatgatgggcaaaagaattctacaagattgtggaattcacaatctagtattgatcaaaaattggcaaatcaaattaatgatcttagacaaactgtcatttggatgggagacagactcatgagcttagaacatcgtttccagttacagtgtgactggaatacgtcagatttttgtattacaccccaaatttataatgactctgagcatcactgggacatggttagacgccatctacagggaagagaagataatctcactttagacatttccaaattaaaagaacaaattttcgaagcatcaaaagcccatttaaatttggtgccaggaactgaggcaattgcaggagttgctgatggcctcgcaaatcttaaccctgtcacttgggttaagaccattggaagtactacaattataaatctcatattaatccttgtgtgcctgttttgtctgttgttagtctgcaggtgtactcaacagctccgaagagacagcgaccatcgagaacgggccatgatgacgatggcggttttgtcgaaaagaaaagggggaaatgtggggaaaagcaagagagatcagattgttactgtgtctgtgtagaaagaagtagacatgggagactccattttgttatgtgctaagaaaaattcttctgccttgagattctgttaatctatgaccttacccccaaccccgtgctctctgaaacgtgtgctgtgtcaactcagggttgaatggattaagggcggtgcaggatgtgctttgttaaacagatgcttgaaggcagcatgctccttaagagtcatcaccactccctaatctcaagtacccagggacacaaaaactgcggaaggccgcagggacctctgcctaggaaagccaggtattgtccaaggtttctccccatgtgatagtctgaaatatggcctcgtgggaagggaaagacctgaccgtcccccagcccgacac

SEQ ID NO: 39901 - DNA, 2300 bp, Homo sapien
aggagatattaattggattcagccaactctaggcattcctacttatgccatgtcaaatttgttctctatcttaagaggagactcagacttaaatagtaaaagaatattaaccccagaggcaacaaaagaaattaaattagtggaagaaaaaattcagtcagcacaaataaatagaatagatcccttagccccactccaacttttgatttttgccactgcacattctccaacaggtatcattattcaaaatactgatcttgtggagtggtcattccttcctcacagtacagttaagacttttacactgtacttggatcaaatagctacattaatcggtcagacaagattacgaataataaaattatgtggaaatgacccagacaaaatagttgtccctttaaccaaggaacaagttagacaagcctttatcaattctggtgcatggcagattggtcttgctaattttgtgggaattattgataatcattacccaaaaacaaagatcttccagttcttaaaactgactacttggattctacctaaaattaccagacgtgaacctttagaaaatgctctaacagtatttactgatggttccagcaatggaaaagcagcttacacagggccgaaagaacgagtaatcaaaactccatatcaatcagctcaaagagcagagttggttgcagtcattacagtgttacaagattttgaccaacctatcaatattatatcagattctgcatatgtagtacaggctacaagggttgttgagacagctctaattaaatatagcatggatgatcagttaaaccagctattcaatttattacaacaaactgtaagaaaaagaaatttcccattttatattactcatattcgagcacacactaatttaccagggcctttgactaaagcaaatgaacaagctgacttactggtatcatctgcactcataaaagcacaagaacttcatgctttgactcatgtaaatgcagcaggattaaaaaacaaatttgatgtcacatggaaacaggcaaaagatattgtacaacattgcacccagtgtcaagtcttacacctgcccactcaagaggcaggagttaatcccagaggtctgtgtcctaatgcattatggcaaatggatgtcacgcatgtaccttcatttggaagattatcatatgttcatgtaacagttgatacttattcacatttcatatgggcaacttgccaaacaggagaaagtacttcccatgttaaaaaacatttattgtcttgttttgctgtaatgggagttccagaaaaaatcaaaactgacaatggaccaggatattgtagtaaagctttccaaaaattcttaagtcagtggaaaatttcacatacaacaggaattccttataattcccaaggacaggccatagttgaaagaactaatagaacactcaaaactcaattagttaaacaaaaagaagggggagacagtaaggagtgtaccactcctcagatgcaacttaatctagcactctatactttaaattttttaaacatttatagaaatcagactactacttctgcagaacaacatcttactggtaaaaagaacagcccacatgaaggaaaactaatttggtggaaagataataaaaataagacatgggaaatagggaaggtgataacgtgggggagaggttttgcttgtgtttcaccaggagaaaatcagcttcctgtttggatacccactagacatttgaagttctacaatgaacccatcagagatgcaaagaaaagcacctccgcggagacggagacaccgcaatcgagcaccgttgactcacaagatgaacaaaatggtgacgtcagaagaacagatgaagttgccatccaccaagaaggcagagccgccgacttgggcacaactaaagaagctgacgcagttagctacaaaatatctagagaacacaaaggtgacacaaaccccagagagtatgctgcttgcagccttgatgattgtatcaatggtggtaagtctccctatgcctgcaggagcagctgtagctaactataccaactgggcctatgtgcctttcccgcccttaattcgggcagtcacatggatggataatcctatagaagtatatgttaatgatagtgtatgggtacctggccccatagatgatcgctgccctgccaaacctgaggaagaagggatgatgataaatatttccattgggtatcgttatcctcctatttgcctagggagagcaccaggatgtttaatgcctgcagtccaaaattggttggta

SEQ ID NO: 39902 - DNA, 2300 bp, Homo sapien
ggaaagtgttacctcagggaatgcttaatagtccaactatttgtcagacttttgtaggtcgagctcttcaaccagttagaaaaaagttttcagactgttatattattcattatattgatgatattttatgtgctgcagaaacgaaagataaattaattgactgttatacatttctgcaagcagaggttgccagtgctggactggcaatagcatctgataagatccaaacctctactccttttcattatttagggatgcagatagaaaatagaaaaattaagccacaaaaaatagaaataagaaaagacacattaaaaacactaaatgattttcaaaaattactaggagatattaattggattcagccaactctaggcattcctacttatgccatgtcaaatttgttctctatcttaagaggagactcagacttaaatagtaaaagaatattaaccccagaggcaacaaaagaaattaaattagtggaagaaaaaattcagtcagcacaaataaatagaatagatcccttagccccactccaacttttgatttttgccactgcacattctccaacaggtatcattattcaaaatactgatcttgtggagtggtcattccttcctcacagtacagttaagacttttacactgtacttggatcaaatagctacattaatcggtcagacaagattacgaataataaaattatgtggaaatgacccagacaaaatagttgtccctttaaccaaggaacaagttagacaagcctttatcaattctggtgcatggcagattggtcttgctaattttgtgggaattattgataatcattacccaaaaacaaagatcttccagttcttaaaactgactacttggattctacctaaaattaccagacgtgaacctttagaaaatgctctaacagtatttactgatggttccagcaatggaaaagcagcttacacagggccgaaagaacgagtaatcaaaactccatatcaatcagctcaaagagcagagttggttgcagtcattacagtgttacaagattttgaccaacctatcaatattatatcagattctgcatatgtagtacaggctacaagggttgttgagacagctctaattaaatatagcatggatgatcagttaaaccagctattcaatttattacaacaaactgtaagaaaaagaaatttcccattttatattactcatattcgagcacacactaatttaccagggcctttgactaaagcaaatgaacaagctgacttactggtatcatctgcactcataaaagcacaagaacttcatgctttgactcatgtaaatgcagcaggattaaaaaacaaatttgatgtcacatggaaacaggcaaaagatattgtacaacattgcacccagtgtcaagtcttacacctgcccactcaagaggcaggagttaatcccagaggtctgtgtcctaatgcattatggcaaatggatgtcacgcatgtaccttcatttggaagattatcatatgttcatgtaacagttgatacttattcacatttcatatgggcaacttgccaaacaggagaaagtacttcccatgttaaaaaacatttattgtcttgttttgctgtaatgggagttccagaaaaaatcaaaactgacaatggaccaggatattgtagtaaagctttccaaaaattcttaagtcagtggaaaatttcacatacaacaggaattccttataattcccaaggacaggccatagttgaaagaactaatagaacactcaaaactcaattagttaaacaaaaagaagggggagacagtaaggagtgtaccactcctcagatgcaacttaatctagcactctatactttaaattttttaaacatttatagaaatcagactactacttctgcagaacaacatcttactggtaaaaagaacagcccacatgaaggaaaactaatttggtggaaagataataaaaataagacatgggaaatagggaaggtgataacgtgggggagaggttttgcttgtgtttcaccaggagaaaatcagcttcctgtttggatacccactagacatttgaagttctacaatgaacccatcagagatgcaaagaaaagcacctccgcggagacggagacaccgcaatcgagcaccgttgactcacaagatgaacaaaatggtgacgtcagaagaacagatgaagttgccatccaccaagaaggcagagccgccgacttgggcacaactaaagaagctgacgcagttagctacaaaatatctagagaacac

SEQ ID NO: 39903 - DNA, 2300 bp, Homo sapien
ccagaaagtcagtatggatatccaggaatgcccccagcaccacagggcagggagccataccctcagccgcccactaggagacttaatcctacggcaccacctagtagacagggtagtgaattacatgaaattattgataaatcaagaaaggaaggagatactgaggcatggcaattcccagtaacgttagaaccgatgccacctggagaaggagcccaagagggagagcctcccacagttgaggccagatacaagtctttttcgataaaaatgctaaaagatatgaaagagggagtaaaacagtatggacccaactccccttatatgaggacattattagattccattgctcatggacatagactcattccttatgattgggagattctggcaaaatcgtctctctcaccctctcaatttttacaatttaagacttggtggattgatggggtacaagaacaggtccgaagaaatagggctgccaatcctccagttaacatagatgcagatcaactattaggaataggtcaaaattggagtactattagtcaacaagcattaatgcaaaatgaggccattgagcaagttagagctatctgccttagagcctgggaaaaaatccaagacccaggaagtacctgcccctcatttaatacagtaagacaaggttcaaaagagccctatcctgattttgtggcaaggctccaagatgttgctcaaaagtcaattgccgatgaaaaagcccgtaaggtcatagtggagttgatggcatatgaaaacgccaatcctgagtgtcaatcagccattaagccattaaaaggaaaggttcctgcaggatcagatgtaatctcagaatatgtaaaagcctgtgatggaatcggaggagctatgcataaagctatgcttatggctcaagcaataacaggagttgttttaggaggacaagttagaacatttggaggaaaatgttataattgtggtcaaattggtcacttaaaaaagaattgcccagtcttaaacaaacagaatataactattcaagcaactacaacaggtagagagccacctgacttatgtccaagatgtaaaaaaggaaaacattgggctagtcaatgtcgttctaaatttgataaaaatgggcaaccattgtcgggaaacgagcaaaggggccagcctcaggccccacaacaaactggggcattcccaattcagccatttgttcctcagggttttcaggacaacaacccccactgtcccaagtgtttcagggaataagccagttaccacaatacaacaattgtcccccgccacaagcggcagtgcagcagtagatttatgtactatacaagcagtctctctgcttccaggggagcccccacaaaaaatccctacaggggtatatggcccactgcctgaggggactgtaggactaatcttgggaagatcaagtctaaatctaaaaggagttcaaattcatactagtgtggttgattcagactataaaggcgaaattcaattggttattagctcttcaattccttggagtgccagtccaagagacaggattgctcaattattactcctgccatatattaagggtggaaatagtgaaataaaaagaataggagggcttggaagcactgatccaacaggaaaggctgcatattgggcaagtcaggtctcagagaacagacctgtgtgtaaggccattattcaaggaaaacagtttgaaggattggtagacactggagcagatgtctctatcattgctttaaatcagtggccaaaaaattggcctaaacaaaaggctgttataggacttgtcggcataggcacagcctcagaagtgtatcaaagtatggagattttacattgcttagggccagataatcaagaaagtactgttcagccaatgattacttcaattcctcttaatctgtggggtcgagatttattacaacaatggggtgcggaaatcaccatgcccgctccattatatagccccacgagtcaaaaaatcatgaccaagaggggatatataccaggaaagggactagggaaaaatgaagatggcattaaaattccatttgaggctaaaataaatcaaaaaagagaaggaatagggtatcctttttaggggtggccactatagagcctccgaaacccataccattaacttggaaaacagaaaaactggtgtgggtaaatcagtggccgctaccaaaacaaaaactggaggctttacatttattagcaaatgaacagttagaaaagggtcatattgagccttcgttctcacc

SEQ ID NO: 39904 - DNA, 2300 bp, Homo sapien
ctgagtcagaggctcgaaaagcagcaactgcccccttctgggcatcagtgctccctcaagcacctgatcttggacctgcttcttctaaagaagaaaggactttctccaggtagagggaaggacaagtgatggaggaaggatggattcagttaccagataggagagtagctgtgccacagctgctaggagctgcagttgtactggctgtgcaagaaaacacccatcgaggtcaggagtcactggaaaagttgttaggccggtatttctacatctcgcctttgtcaacccttgccaaaacggtgaggcagcggtgtgttacctgctgacagcaagatgggagtcaaggtccagccgttccgcccggcatacgagcttgtggagcagccccctttgaaggtctccaggtggacttcacggagatgccaaagtgtggaggtaacaagcatgtactggttcttgggcgtacctactctgggtgggtggaggcctatccaacacgaactgagaaagctggtgaagtaatccctgtgcttcttcgagatgtgattcctagatttcgaccgcccttatggatcggctcagacaacgggcctgcgtttttggctgccttggtacagaaaacggcaaaggtattggggatcgcacggaaactacatgccgcctcccggcctcagagttccggaaaggtggagaggatgaatcggactatcaaaaatagtactactgtcttccccgctggatatttaaaacaacagcacaaggggcgtcaaaccacctgctaaattggaggcaatgttatcctctcccctcctcccccggccccggatattagagacaacaacacagaggtgatgtacacccactgctttattgtgagtaatatcatcctctcccttcttggatagtaggaacagtatcacactgtgcgtgtaggcctgtcgcgaaattcaatggaatgtcatcctgcgcctccctggatatgacgaacaatatcacgggggatgtacaacttctgagatattgggagtgatgtcatcctctcccctctggaagttagggacaatatcacaggggtagtgtacaccctctgggatgttgggactaatatctcacaggtgtctgagaattcctcctcctgggactctcagaggatccagaactgcagccggccctcgctttgctgtccctgtccctgtccatgtatctggtcacggtgctgaggaacctgttcagcatcctggctgtcagctctgactgccccctccacacccccatgtacttcttcctctccaacctgtgctggcctgacatcggtttcacctcggccatggttcccaagatgattgtggacacgcagtcgcatagcagagtcatctctcatgcgggctgcctgacacagatgtctttcctgctccttgttgcatgtatagaaggcatgctcctgactgtgatggcctatgactgctttgtagccatctgtcgccctctgcactacccagtcatcgtgaatcctcacctctgtgtcttcttcgttttggtgtcctttttccttagcctgttggattcccagctgcacagttggattgtgttacaattaaccatcatcaagaatgtggaaatctctaatttggtctgtgacccctctcaacttctcaaacttgcctgttctgacagtgtcatcaataacatattcatatatttcgatagtactatgtttggttttcttcccatttcagggatctttttgtcttactataaaattgtcccctccattctaaggatttcatcgtcagatgggaagtataaagccttctccacctgtggctgtcatctagcagttgtttgctggttttatggaacaggcattggcatgtacctgacttcagctgtgtcaccaccccccaggaatggtgtggtggcatcagtgatgtacgctgtggtcaccccatgctgaaccttttcatctgcagcctgagaaacagggacatacaaagtgccctgcggaggctgggcagcagagcattcgaatctcatgatctgttccatcctttttcttgtgtgggtgagaaagggcaatcacattaaatctctttatctgcaaatcctgccccttagtcacattctttttgtggcttgatggtttttattcctttccgcatttcctttgtgaatattgctttcttcgttatgcctttatctggaatgagtgacgattctgggatccttggtttagcagaaacctcatgacagaatcttctatacctaggtggcctcttttagtctctgagcaataaccatgt

SEQ ID NO: 39905 - DNA, 2300 bp, Homo sapien
gtaagagccagcccctcttgcccccctggctctcaggacccccatcgcagtggtgtgaggcacgccccttgatgcgggtattaagagccttcccatcttacctcctggctcttaggacccccatcgcagggggtgaggcacgccccgccatgcgcagaggaagagctaacccctcttgcccccctggtttttaggatccgcggtggactcacagcctgtttatcatattgtgagtaatatcgtctcccgctctggagattgtgaactgtttcacccaccagtgttcaccccggcgtacagaggttgtacaaccgtctgtattgggagtcatatcatcctctccctctctgaatattaagaacagtatcacaggggtgtttctactccctcggatatcgcgtgtcatatcctcctctcccacgttgcaattacaaacaatatcagtgggggcgtgtccaacttctgtgatactgaaagcaatatcatcctcttccctccaggatcgtgggaacaatatccttgggggtgtccactttctgccatatgtgtagtcatatcaccccctccgccttggaatattattaagaaccacgtcacacgggggtgtacacttcctacgatgttgggagtaatagcattctcttcttccatgaatattaggaacaaaatcaccgggtggatgcacacccagtgctatattgggagtaatgtcatactccaccccctggagattatattcggatcaatatcaccggctgggtgtgcacctgctgcgatattgaacgtaatatcatgctctctccctccctgaacattaggaacaatatcacaggtgggtgtacacccactgaggtattagggcatactattagtatgaattattccttgttttttattaacatgaatatgaatggccgatattaatattaatattaagaagtaattgctaataaaaagttctcagattattaatattaatattaattattaggagctaatattactattttctaaagaataagatcagtatcagttattaatatcaggcgtcataatcatcaatattaatcatgtattgttattgttagtataactatttaatattaattatcattagtatccgtattgatttttaaaattatattatgggttattaatattgataattattagtgtcagttaataattgagattattaattgcggtaagtcgcattgcgccattccaccccttcctcggcagctcgtttacgacccaaaacggggacacaaatgcccctgagagagcagcggtatactgggatagatgaaaatgctcatgtagtggagagacgtgtttttgggtaccagcccttcacctgcgtcgaccttctcaactggaaaaacaatacatcgccctataccgaaaagccacaagccctaattgatttgctccaaactgttatccagacccacaaccacacctggaccgattggcaccagttgctcattttcctctttaacagtgaagaaaggcagagagtcctccaagcagcaactaagtggctagaggaacatgcaccagctgattatcaaaaccccgaacagtatggaaggacccagttgccaggaaccgacccccagttggacccacatgaaagagaggagatgcaaaggctaaaccgagacagggaagctctcttggaaggattaatgaggggagctcagaaggccacaaacgttaacaagctctctgaggtcattcagggaaaagaagaaagtccagcacaattctacgagagactgtatgaggcctatcatatgtatactccctttgatcccgatagccctgaaaatcagcgcatgattcacatggctttagtccatcaaagtgcagaagacatgagaagaaaactgcagaaacagactgggcttgcagggaagaatccatcccaattactagaaatagctagccaggtgtttgtaaacaggtatgcagtaagccgtaaggaaaacggcaaagagaatggaggtcaggcccggccacacgccgacctgtttgtcagctgcagcaatcagaggggcccccgcaaagaggcaagggaaagggggccctgggaaagaaactcagcttggctgtcagagtttgcagcgtaaccagtgtgctgattgtaaagaaataggacagtggaagaacaaatgccctcagctcaaaagaaaagaaggtgactcagagccggaggccccggacaaggaggaaggggccctgctcaacctggcggaagggttcttggactgagggagaccgggctcaagcatccc

SEQ ID NO: 39906 - DNA, 2300 bp, Homo sapien
acctgccacagggcccgtggcctaggtatggggggttgagctttcaaccccaaacaaacaactgattctggagactggacttaggtctctcacggttcactccggtagaagacacggtgattctatctcccttgacggacagaatgatcgaagacacagggcatggcgtgtgccaccctttggcaggtctgcttgaagtcacggataagggatgcttcctgtgataacttgaatcgctactcttgccatttcattaggcaacttccaaacacaaattcatacagagaagttaccttcctctctaccgcactagcaggtgatgatctttcctgttctatcttttggctttagctccagcccctctttatttattttcctggtattttacgcataccacacgaattcatctgaacaaacggggaagaagtgccgtatcgtatcgacgtcttacacggctgaagggcaaaccccccttttttccaaagtcctttttccatttacccaccaactcagcatgctgcagtacatttcttttcgcattcccatcttggtcttctcccacacgtggagacggatatgttgtctcgttttctgttccaagaattactagtaacgagaacacatcctaccccaccagcaagccccagtgtgatcggtttctttcggactcctttgtctcttcctccccccgcccctccccgccaaaaccactcagggattgcgtgaaacaaacaattgttcagcgaaactaacctgaaattacacgtctactttctttcccaggctggcgctgagatgggcaggtgctgcagcagccccgctggaagcgatgcagcatccaggacgacggaggaaggggcggagagggacctctgctttccaggctgccttttatactgcctctggtcacctgacatggaacgtaccctaacctaatcagttacctgtaccttaattgcaattaacttaatccaattacatgacctggaaaggtctatctgcacagcccactctaagatcatgtccactgctgacagacattctaaaacctacttgtacagctgcaagctttgaacaatagatgttccccgtcagacatgtaacactggtgcctgtacccctgtcttcttttccatcttttctgttgttttgttttgttttgttttaaaaaatgtggtaaaatagacaccttttaattggaccacattttgtctatctcgacgtaggcctcagtgtcatcaaggagactctgcttgacatgcagtcaaggccatgatccatcttcagagcttctctttcttccccaaggtaagtctgtcagcagagaaccctgaccgcaccctcatgtgttttctcccccaggaggcgcttggaaaccaccgtgaattggaccgcactgggaaacacagatgaggaaagtcaacaacgctttgtccttcagtgcctggctcctttttcagctcgtcttgcgactccaggcattatgcctgaaaagtctcccggacgcctgtgaggctgtaattccctgggtcccattgccatgtctctggatttgcgaagatccaccgcaccttctgtggaactcccgtgtcggtgaacttttgtgccacggcccctaattctgcccatggtcatccgcacctgcacgacttagggtccatgttccttggacgggaagagacaggcaggagtcggaatgatgaaccagcacactggggcgttttctcatgtagcccaagtgaccccatggtcttctcgagctttggaaccagtcgcgtcccctttgacactgcacccggctcccagtctctcaatcttgttggccctccggcgatctcccgttggatgaattgctcctgctgaaactccagtcccctttgatttgcgcttcattaattattcatgattcaggttggaaggcctgctgacgaccccctgtggccgttctctgagctttcctgtcacatcgtttccttccacgctctttggttccttatggtcctgctccctctgctgtcagaggagcagagagttgatcttattcattctggatacggatactttctaggtgatctggataatcaagataacgaccctcaacagcggcggagagggagcagccagttggtgtgtctcagaaaatcccactgagttccgaggcctcctagatgtggaatcctgctgagagttgttcccaggtcagagaatggagagagcctgtgcatgatgggatatccccgcctagatctttcagtgagtctctacctcagctactcttaggatcagggggagaaccatgg

SEQ ID NO: 39907 - DNA, 2300 bp, Homo sapien
cctggcttgcatattttttgatgagaagtttgctgcagttattctgtcatctttctacaggcaggaggcatgtatgccttctctgttgacaaaggtagaggatgttctttgtttttcttttttaatgtgctcccttctcctcgttctcctagctttaatattttgttttgcatttttttagattgttcattcaccagtgccgtacaaacaactgttgttcttccctcagtttcttaattaagaaattaagactttcttttccataaaagagaaagattcttgcaagcttttgttctttctcacagtggctactgttcccctcagccgacttacatcatgaaatactctaatcttttttgtaagcacctgctgagtctatggagaagacattagaagttgctgtgaacttctcttttgtctgtgaccccagacatttatattgtttctctagtttatgcttgctcttagcaattctctacagactttacctgaaatcttttaaatcatattctgggggtaatctgcttcaggtaagcaagcactcatggtctttattttttggaggttcctgtcttttcttatatttctaggtaggtggctgatttgtgaccttagctttccaatgagttaaagaaactgaatatttgcagtctgccgtgtgttttgctgtgtacttgtttcatgtgggatgattttctttacgtatttctacatcttaagcagaagccattcttcatttaataacacacttactttctttaagacatacagaaatacttatattttctgctaattcttgtgccaattttggtaagttaaatttttgagagaattcttttattttatgtaagttgtgaaatgttttggcatatacctgttgacaacatttttatattagtttaatgtttcttggatctgtagtgataacttctttttcacttattctgcatacttgggcttacattgttcccttttctaaggttcttagagcataattttaagtcatagatttaaacatttcttcttttctacaataagtatttggatacaaatttctttcgaagtcattgttttgttgtgctccacaaaattcgatatacagaaatgctttccaattattctcattatttattctttgatacaaacacaatctagaatgatgttgctttatctccacatatttgaaaatatcctaaatagcttattttatagattgccaatttaatccccttgtggtgagaaatacactctgaagtatttaaatgtgcttaaacacatcaatatttgttttatggcctagcatatggttcatttttatgaatgtatcatatgtacttgaaaaaaatgtgtattttgcagttgtcttatgatgtgttctataaatatcaatgcagtcagtggaatggtggtattgttcagatcatgcatgactttgctaatttttccctgtgttctatcagttgctgagagagtggtgtaaaaattttctactatgaatatagaagtgtctatttctccctttaattaaatcaaataatataaaaacatgttaatggtttttatgtattttcaatggattaacccttttctccttaagcaacagcactccatgcaatacagcgagaccctgtcaaaaaaaaaaaaaaaaaaaacctgcacacgtactcctgaatttaaaattaaaggtttttgtgtgtttgttttaattattattttaagaataggttttatgtaaaatcatgtactaggaaaagcgtggtggctatatatcttatagacatggtaatacttgagataagacttgaaggaaaaatgagagaagtctaagcagagacacagaatagaatattccaggcagaaaggcagggttctctgcgtttgtctcccacaaatgtggtttagttaaaatctgatccatcagcccacacattaatcagtggagcatggaaaatagtatgttcccaatgaacattacaaaccgaggatgacttccagtcccttcagggcagtagaacatattttaatcaatgccccttgataaaagagcttgattccagctactgcacttccttcatcagctctccactgatgcctggagccatgaaaatatttgtctttattttggctgctctcattcttcttgctcaaattttccaaggtaagagggaaattcttctagaagtagagatgacagtctgctcaggatctgtcttttgagatgaaagctcaacttttacaaagttgaaggttccaaggcaaaccagtcactgaaaatcttttcctgagctccgacacaaaac

SEQ ID NO: 39908 - DNA, 2300 bp, Homo sapien
tggtacaagaataaatctaagaacttggtttagtgagcaccaacagctaatgggaaaagccactgagtccaaatctctatggccaaattacagtccagtcacaaagatatttttctgtgaaatcaaaaatatccaaatattatacttggaacaagagaaagagaaggagataagttagtgaactgatttttcagacaattctatttctgccactatctctgtcccctctttgcctccagacatcagagagagctaacagcgccagagctcctaagagaaaaaataattatatacaagagatttaacttacctgatggaaatggttgggaaaaatcaagtcctgcctggcaccctaaattcaaaacaaaatacattttgaaaattaaaatcaacacaggaattaacactgtataaaacactcccaacttcacatgtgacatagcataacaggagacagtagatcacagagttgcaatctttattctgtttctcaaggccagcattccaggtaaccagcaaaaacaaattacaaaaaaaaaaaaatacactatatgctgtttgctcttagtaaatgtcactgtaggtctaagaaattcccatgacaggtgccatgagagcttgaccattaaggtcaaacatggaagaatcaacaggctttataatctgcccaatcaaaatcccatccatttttacttacctgatggcagttgaaccaaaatgaagaacatagcaaatagaaaataaaatgtcttcctgatcagggccatcttttagggaagactcttcggaatagagattgggatttccttgagaagacccaaatgagaggctcatttttatttaaaagtaatggggagatgctcttgatccgtgaagtgaatcaataaaacacaattatatgctccatttcccaggataaagggatgatatcatggataataacccttggcatccagaaagccttttattttggggagtctaactggtgtagtggaaagaacaccaggctagaggttgaaagagcaggggccatgtgagtttccaccatactaatgcaggggccagaagatagtgacccctttcatctcttccagcttctgttttctgggagaaaataagaacccacttgcaaattctgcctgcctctaaaggtgttgtaagaatctagtatgattataatgcaaaagtgttttgaatatgtggaatgcttggaaggaggcctggtaccatgtaagaactcaataaatgtggactctcacttttctagctttcatttttattctctacaagtatcacagggagaaaaggaggggtagcaatcattttgtcaagttagctctgagtcccctttcctgtaagatatcacctcacgcaccaaagccataattactgcatattttaaattcattaaggacatgaatattggcccagatgggtggcttatgtctattatcgtagcttttgggagcctaaggcaggtagattgcttgagcccaggtgtctagggcaaggcatgatggttaccagctccttgctgcgccaacagtgccatggtacaggtgagcagcatggcaggaccaagcacgaaaagcgtgcagcatacagcaagattcacattttttaacaaatatatgcttaggtcaagccctttgccaagtttacaaagctcaaaaagactgaatctggaattcagattccacctcactacggttcctcagctcttaactgaagcattgagatattgtataattactcccattttacatatgagtaaaccaaagctgttcaggaacacagccaggattagaaaccaaactactggactccagatttttttattttttctgtgtctgccctactctgtcctcccttcatccccactttccttcttcaaaactttccagaatcagaaatatgatgagctgtagactgagtgacacccactgaggttgggtgggctctgtgcagcagagcatggaaatcctctcgtttctgctaagcctcactgatcaagatgttacttggtctggagaaatgtataaatgtgggtgtttgcggctctttcctcatggacacggtgctgatctctcaagacccacccagtcatgaggactttcctctttctctttgccgtgctcttctttctgaccccaggtaaaatgggcatctttacagggaaggtgatcggaggtggtgtcccacagacagggtccccttcagtgaatgcctgggcgtgatcaacccatctactacaagaggtgatattccccaacgcctcttctgtaattcctttgcatttt

SEQ ID NO: 39909 - DNA, 2300 bp, Homo sapien
ggaagggtgtctttaatgcctcttactgtggcaagacagttgggctcctaccctggctttgttttggttatctataagactctgagaagcactgagcccatctgaggcacaatttctgcatctgtaataaaatttgtaaaatggaccttcaaacccaaaaagattttctctaacttccattaaattaggggtaagacagagttttccgtaaaggcgctggcactggaagactagatgcattttatgtgaagctctcatcacagtacttggcttgatgatatgtgatcaagaaatggcagtccaagttacgctgctttacctgttgccatgactggcatgagtgcataggtgtctctaagctcagatccttacctgtcccttctccttacctgtctcaatctctaccataactacattttaaaaggttcatagactgctatccttgtttttaattttttctcaatttttgtttttgttagtgagcatgagatgggatgccaaaaggcatctttcctggccttcttttattctttcaaacctgtgacagcccctcctagataacaatgtaaaatgcaaaggaattacagaagaggcgttggggaatatcacctcttgtagtagatgggttgatcacgcccaggcattcactgaaggggaccctgtctgtgggacaccacctccgatcaccttccctgtaaagatgcccattttacctggggtcagaaagaagagcacggcaaagagaaagaggaaagtcctcatgactgggtgggtcttgagagatcagcaccgtgtccatgaggaaagagccgcaaacacccacatttatacatttctccagaccaagtaacatcttgatcagtgaggcttagcagaaacgagaggatttccatgctctgctgcacagagcccacccaacctcagtgggtgtcactcagtctacagctcatcatatttctgattctggaaagttttgaagaaggaaagtggggatgaagggaggacagagtagggcagacacagaaaaaataaaaaaatctggagtccagtagtttggtttctaatcctggctgtgttcctgaacagctttggtttactcatatgtaaaatgggagtaattatacaatatctcaatgcttcagttaagagctgaggaaccgtagtgaggtggaatctgaattccagattcagtctttttgagctttgtaaacttggcaaagggcttgacctaagcatatatttgttaaaaaatgtgaatcttgctgtatgctgcacgcttttcgtgcttggtcctgccatgctgctcacctgtaccatggcactgttggcgcagcaaggagctggtaaccatcatgccttgccctagacacctgggctcaagcaatctacctgccttaggctcccaaaagctacgataatagacataagccacccatctgggccaatattcatgtccttaatgaatttaaaatatgcagtaattatggctttggtgcgtgaggtgatatcttacaggaaaggggactcagagctaacttgacaaaatgattgctacccctccttttctccctgtgatacttgtagagaataaaaatgaaagctagaaaagtgagagtccacatttattgagttcttacatggtaccaggcctccttccaagcattccacatattcaaaacacttttgcattataatcatactagattcttacaacacctttagaggcaggcagaatttgcaagtgggttcttattttctcccagaaaacagaagctggaagagatgaaaggggtcactatcttctggcccctgcattagtatggtggaaactcacatggcccctgctctttcaacctctagcctggtgttctttccactacaccagttagactccccaaaataaaaggctttctggatgccaagggttattatccatgatatcatccctttatcctgggaaatggagcatataattgtgttttattgattcacttcacggatcaagagcatctccccattacttttaaataaaaatgagcctctcatttgggtcttctcaaggaaatcccaatctctattccgaagagtcttccctaaaagatggccctgatcaggaagacattttattttctatttgctatgttcttcattttggttcaactgccatcaggtaagtaaaaatggatgggattttgattgggcagattataaagcctgttgattcttccatgtttgaccttaatggtcaagctctcatggcacctgtcatgggaatttcttagacctacagtgacatttac

SEQ ID NO: 39910 - DNA, 2300 bp, Homo sapien
cttttgaagtttggttattcagtccctgtatatgaattactttttttttttttttgaagaattgctgaatatttattatcatcagaatttttcagttttcttcagaatcctggtcacatagatgaccttgaatattggctgatgtttttcccttgaagctcatcatcaaaaattactaaagcctgacatgtggcaggctaggagggtcccatggatcctgcacatttgtgcttgctgtgtgtctgctgtgaggagagtatccgacggcctctacgtgctgcacgtttgtaacctgcggcaggattcccatggctaccactcttgccctggctgcttccaggcagtgaatgagcacaatgtggactagagctgggccatgtctgctggtgtaggacagtctttgccctggggttccccactggcaatgctgaaattttctgcactgtagtctgaggctcccccgactccaaaccttttcacaggtgttaattgacatcatgttctgaagactttccctactcaatcttgctccctctccccttcatctttttgttttgaatttttattttattttatttttttcagagacaaggttttgctgtattgcctactacactggagtgcagtagtgccatcatagcttactgcaacctcgaacttccgggctcaagagacccccctgcctcagcctcccaagtagctgggactacagggacacaccaccatccctggctaattttctttttgtgtagagtcggggtctctctatgccgtccatgatggactcaaacccctgagctcacatgatcctcctccctcgctcagcctccccaagtgctgagatttacaggtgtgagccactgcgcctggctcccctttatctttcacaggcatttcccaataaatttatttcctttctaattcctgttgataaatgcttcatggagcacccaaactggcatagtttatgatttctgatgttctattctatttcgttactgtgaaaggagacctggttttccatcacattctcccctaagtgagaactctggggaagacacactgactgctagattttgcttaggatgtgcaagcaacgtatgtctgtcaggctttgtctaatctgtgttctagaataaggggagcttattcgagaatgtcaactttcaagattggacgtttttactttctctaaagtacttcattttagagaaatgaagtattttttttttcttaaaataaaattatctggtgttttccctaagggcaaatgccaggagcatatgctctatatgttttgcctcgggtggggttggggttaaatccagggagcatacaccccgggttgagggccaggcgtatgctctctggaaggttatgttttatttgaagccattgttagaaatacagcattctcatgaattgtctccttttaacctctcttctcattcttgtcctccttttcacctaagccctaagtgagcctgatgctctgtggttacaatcccacccttggacaatgcccgccatcaagtattccttgttgtcacttgtcatcctcatcctacactctttctatcacagaaatgtcctgggacctttcacgcatttatgacctccccacgctccatgccattcttctccttgacattgtatgtttgtttcaatgtttacttcagagaggtcttgggggctatggacttcaattccattagccacatcacaattttcaacaagaatctcctgactgaaatgtactgaaatggaagagaaagtcctctcaccagaattgaggaatgtcaaggctggaaggtatcttagagatcatctaatccagttcttgcttcagaaacgattcagggaagcaagtgaagtgacttggactttacctatggtaatactctctccccaccctcaacactgcccagctggcatttctgtagccccaacacctcccccacactgtgccttggtgagtgttcaccaaggaacgctgcattttgataagcctcagtaatcaagagcagcctctgcccataaatacacctgccctgctcctgcctggggtgattccctccgacttgcgtctgcttctcgccagcagccccagcattatgcagagacttgtgctgctattagccatttctcttctactctatcaagatcttccaggtaaaaagggactctcagctggaaatatacacagttgctggggatgacagggggagaagaaaaacatttgatttagaaaataaatcctgaaggatggagtaaccttcttcaatctcagccttttttct

SEQ ID NO: 39911 - DNA, 2300 bp, Homo sapien
ctacttagtccaaacgaatcaagataccacatactaagcagcttaaaaaaaaaagaatatgatttattgattgaatggaccaaaaaaaacttgaaacaattattagaatattctataatgggttctgccatcctccccctcaggatggatgtggcttttagcaagagaattattcaaagatttttttaggacacagaaatctggcagaagaggacaggagctgagagcattgttgtgttaggacagatgtaacattaattgcctttattacgacttcaccagcttttgcctgtcaaagagcagaactaggctttcccggctgctcttttttaagattgttcttttcagaagcatggaagagggggcttactttatctcaagacgtagacaaaggaagtgagatctaactatttttggctcagtttcttcatttaaataatttcaaataattctaacgacttcaaagaagattccgttacctgggtggtaattactcaaatgctgttatattttaagtcatgattttgattaatgattcattactatgaatatctgaatggtggaataggcttgtttttgttttctttccttttatagagaagataaaaatatatagaaataagttaccaatatactccaaaatttccatcactgttataaaagatccacattccaagtttaaataattacaaatacaactgtaagaagttgctattgaactagagtataaaaaatacccagagtatgtagatgagcgaataaatcttcatttagggttgaggtagagcagctgtctacctcctttcttgactgtctatgttcttccaacatccaattatcagaatttgatgcagtaagtgattaaagaaacttatcatgggccagttgtcacctatctccgcagtgttgccctgtgctcttggaattggaagacttcctaattccttaaagtgaaaggatgtgaatgatgctcctgctctccctgaccagcacctcatgctttgcagtggagaatctgtcctgagacccaaaagatagtggcctccgcattgtgctgccagggcagctgctatgtgcaactgtccgcagctgcaaaccttccgccctttgctggtgcttcagcggatgcccaggtctctattgtcattgctgcctctttctccatttgcttccagctttctccaggtagagagtaagtatttttatttacacaaatgacctaagttgttttctctgtctggattaaaatatacatgcaaatgagacatatgagataagcactatcttttccagacatcactgatgttacattggatgctatgtgaatacaaaactcttcaaccaaagccttcttcactttagttaagtccagagcagactgtctgggttacatgcatacctgagctaatgcagccaagtaagaaacacacacttggttaaaatgcttaaaaagatgaaggagaagggaagacaagtcctctgcttggatattactagaggagaaaacccagactcaaacacagattttttttttcttttttaaaagaattgaattggacccagtgacatcaacaggaggtgtctgggggtaaagagaatggaaaggggagagaaaaatcaagacaactcaaataagttaaaatagaaaggaggggggtccaaagtgaggaaggagaagtggaggggaccaagaaacagggagagagactcagagaggagaagaaaaagaaaagaacattttgagcagccttggaactctctgtataacttcaggaagggatagtttgtaaaaccaggtcctacctgttatgttgtgtgtcttatgcatgattttttaacactaaaataaaaacgctcagccaacaggatagaatcgacatggcagtttatttatgtccctgttctcatgaacattagggggcttttgagaagcgtttgaggacattggcaactttatgatagttatgtttgttctgcccctccatgcctttcatctttctgtttctctctgttcttccttattcaccaaacccacccaaggcattcaggcgtattatttacttcctgaaatatgtgtctcaagtgtttgttccaccagcagtgggatagtagcgtgtccacattgtcctttgagaatgagaagtcatcctggagcacagctcttcccacgctccgggcccacacacccagcctcactccatcaaaggagccccgctgcctgcccacccaccctgggtgctttctggcttgcagtgctcttggcagacatgaggcaacgattgctcccgtccgtcaccagc

SEQ ID NO: 39912 - DNA, 2300 bp, Homo sapien
acagttgtcagtggctccctggagtagagaagtaaattacacagtctctctcttctattgtttgaaattttaccataaaaatgcattacttttataattttcttaaaacaggtaagtccccctcaaaacggattttgtgtgtctggagtatgtccaaacttgaaaaggctgattgtcacagcccaatctccaattcccagctcccaaactagttgacaagaaaaagtggcatttttcctcaccaaggaacttttatgaaatagtggtgttgccataaaaatgcctcccagtctatgaaggaacaggttagaccaggggttcacctgtggaagtctattctccatgtggaaaagcaagtcatctccagcgtctgactgtcctcaccccaggctgagagctggtgctaaccctctacaacgcccaatgccatcgttatgtctgacatagtaagactgtgaagtcagcacccatcccacccacactcacctccttcccccatttataaatatctccaattgctttgtctcaaatcatgaactaaagaggaaagttagattttaaaaagtagcatctacctatctaaagtcttaaatctgctgattgagctccactcttggctcaaagagttatctttgagttatgatgagttatctttcttctacgtttctgcagccctgtgcttgaaatcttcctatgactcccattagaattcatcctaaatttatcatttgactgtctgcccatctacctggccctacatggagcttctggagagaaagaaccaagactggtccctcttggtatctcatccacttcaccctcacctatgctgaagacatgatacttgtcccttcctatagtatgtgttcagagttttcttactgaatctgacaggtgtggtgcacccaaattctgaacacacactcccagaactaacacacccttgatccttagtggatccgttataattgcattcacacgaagcagcagctaggagacatcacggtgacttcagctcccaattgaattgtcattgacttacttagttcccaattgatagtcaaccaaatacaacccatccattggattcctgaacatttaagtttaatagctgttttttttttcttttttagcatttttccctctaaacgttgaatctatatgcaggggaaatcatctggcccctggactgccttgaatgctcctgagccaagagtaacttgaggtcttaaatgtctattctgaagcccctcttttgcacagggacagtcattgactaggaggagatgccagtctattaaatctatcatcccagcatcctctttctctgatgaagtaaaattaaacaccttctttactcataaatttggtaggttttagacaatgatgaagaatcggacatgggccgcacacagtggctcataccagtaatcccagcaatttaggaggctgaagcaggaggattgcttgagcccaggagttcacatctgggctcgaaaccagtctgggcagcatagtgagaccccattttattttctacagaaaatttaaaatttagccatgtgtggaggcatgcgtttgtggtcccagctactcagggggctgaagtgggaggacctcttgagcctgacagctcaagctgttgtgagctgtaatcatgccactgcactccagcctgcacaaaaaagtgagactctgtctctcaaaaaaaaaaaaaaaaaatgaaagaatgagacatgtttcactcaaattatagcaccccatcataggccaagggccaggtggtcagctaaccttgaatgtagcccattttcctcccttacctcactaccaaaaagccagtcctattgccagatattgaatatgtccagggctggatttatttggtccccaggagggtcttagactctcccagcattttaggaagagaaaaaaagctccaaagcagcaaagtacggacaagtcagcccccagccacatgccctgagactattccccaaagggggcatacttgctcatgccagccctatctgtacccacaacccaatctgacccacacccagacaagcccctggagtccagagagcacccggacagccacaaatccatagggagctctgccttaccattgggttcctaattaactgagtgagtgggtgtgttctgcatggtgagaggcattggaatgatgcatcagaaaacatgtcataatgtcatcactgtaatatgacaagaattgcagctgtggctggaacctttataaagtgaccaagcacaccttttcatccagtctcagcgtg

SEQ ID NO: 39913 - DNA, 2300 bp, Homo sapien
agcattaaggctcagacatcagcaccaaattttacatctttaccatcacttcaagtgaggtgaggagccagtagcctggacactggtctcatctggtgaaagactgtgggtaatggaagcatttctgtggggtggtggcaggacatgtgcatggtgaggcaggtcatcagcagcaagtgagagctgcctcttactttctaaaggtgacatagcaagtatacaaaaaaaaaataaaatattaatttaggcagagcacataaaggctttatttcatattccatttctctgtatgctttcttcaccaggaagaaatagttttagtgtcaggaatgaatgagtctgcccctcaattccagcctgctcagcacacaaggaaacaaagccctgacaatcagagtgactccctggtgactaagctccagtcctggatgcatatttgtttagcagttctgacagcatctgacccagccctctctttgcataccccaccagaaccttctttttttttttttttctttgagactgagtcttgctctgtcggaagcgattcccgtgcctcagcctcccaaatacctggaattataggcgtaagccatcatgcctggctaatttttgtatttttcatggagatggggttttgccatgttggtcaaattggtctcacactcctgacctcatgtgatccacctgcctcagcctcccaaagtgctgggatgacaggtgtaagccaccatgctaggctcagaaatttccttttataaaaatgtcattaaggatcttggctgcacaatatcgttaccagcttcctttaaatccacctctggcctgccaggaatcagggttcttcagaacctgacattttaaatgaagaggtcaggcaggtcatgaggaaagcctcattgtccccatgtctctgtcactgctgcacccctgagacatcacagacatggacactggggcctgcttgtttctcaaactgcccttagatcgaaagagggaggaaccaggatgaatgccactcattttcccaagaaaggccctctcctgagtgcccgggatggggctctgtccattgcctggggccgccaattgctactctgggttacggaagaaggacagggtcctgagagacaccagagacctcacacagccctgaaaacatggggctccttcataagtgtttcccatcaccaacagggagaccacgtggaggccttgcagccctactcggtgcttctccaccaaatcccaagggcagtgacgctgacgtctgtggaaagcagagaaagccctggctcccaaagccctgaagtcctgtggagctgacattccctgagtgacggtgtgaatggaaggaactcaagtgcgggtggtaggccacctcctggcccaggcctgggtgaactctgaggggacacatgtagtcacaatcccatcctcccattctccttctcagaggaaggaagtgggcatccatctgcctcatctctctcccgtggggaagatggggagtttcaggggaactttcacataaatttcaccagctcagatctcctgtgaggatggggcccaccatgctcccggtgctgccagaggccctgagcccctccagggtccctgggtttgagccagccctgtatcatccccaggagctgaatgtccgagcaatggatagaattagatggaaagagctctcaatttggcctgagactgtccccagatactcaggaaaaacaggacgtcgcacagagtgggcagcaggtgagtggcaggttataggtcctgagtttgagtttgttctcacgtgagacagacccagcccctcactccattcacacactgggttttaaatggtgcaagataggaggaattttctggtcccaagagcaggaggaagggattttctggggtttcctgagtccagatttgcataagatctcctgagtgtgcattgttctttgaggaccattctctgactcaccaggtaagtggctgaattctaacctctgtaatgagcattgcacccaataccagttctgaactctacctggtgaccagggaccaggacctttataaggtggaaggcttgatgtcctccccagactcagctcctggtgaagctcccagccatcagccatgagggtcttgtatctcctcttctcgttcctcttcatattcctgatgcctcttccaggtgagatgggccagggaaataggagggttggccaaatggaagaatggcgtagaagttctctgtctcctctcattcccctccacctatctctccctcatccctctct

SEQ ID NO: 39914 - DNA, 2300 bp, Homo sapien
acacactggggcctgttgggaggcaggtggagggagagtatcaggataaatggctaatacatatatgcaatggaatattgttcagtgttccataataacgaaaccctgtcatttgtgacaacatggatggacttggagggcattaggttatatgaaataggccaaccacagaatgacaattactatattatttcacttgtgtttgaaatctaaaatcgacaaactcacaaaagcagagagtagaatggtggttgccaggggccctggtgctggggaaatgggtagatgtggttagagcacaaagtttcagatataccacgtaagtaagttctggaggtctcgtttacagcatagtgcttacagctaagaatactgtattaaatacttaaaatttgctaaaagggtagattttgtattcttaccaatatttcttaccaaaaaaaaaaataataataaaggggaggggacttagggaggtgaaggatatggttataatcttgatggtagtgatgtgttcatggtgtatacttatccccaagctcactgagatgtacaccttaaatatgtacagctttttaaatgtaatcatcgctcaacaaagtcggttaaaataaaacaagagggggttggttaaaaaacttaaaaggaggggtagatgttcccttgtttttttctcttggcttttttcctacctgctgcctggaattcaaaaatgataggtggggatttagcagccaaactagagcctcttttacactatagcagaacagagtgctggaaggggcctgcatccctaatgaatttggcaggtatctgtactagccatggtaggtagaactatagatttaagtgagggagaaacaaacttctgccttgtttaagctactttgttcagacattaattttatatacatatagagaacatatgctcctttatgagtaggaaaaatgtttatgccatatggtccatgatgggtgttcaacaatgtaggatgaggctgattatgatgacaatggtgacaaatagcatgaaataataagcaatgaaaataaggtggcctcatagttgtgtatggttactttatttaaagattctgctgctaatatcattcaatgtatttgtatgctggtgggagttttgttagatgtagactaagaaagtttacattatttaatgaaaaatacttgaccaatttaaaaaaaaataaaaatatcatgagatggaactaagcatctgtattgcaaagtaactctcccagttgattttctgcatagtcatgattgagaatcccctgatctagatccaatagatctcgacctttataggtgctatcaaggaagcacctaaggaagacaattttcctgactatatccatacctccagttagtaatagatctagagatctagaacccaaatccaaacctcctgcctccacgtgcggtggtctttcgctgttgttttgttccacttggtgaagaggatttgagaataaatagccacatgattcaactccctcctcagttctgaggaatatagccttgtcctagcaagcaagaagttcatacagtagtggatgaggcaaatatacattcactaatctaacatacaaggcagtaagtactgtaacataaacaaagcactttggagtttcagaccaggagcaagtggggtgattaattcttagcagggctagtaaagtctgggaagtgttcactaacaaaatgtctggtcattaatgaaaccaactggtttctcaacacagtctaatttattgtaacaatataaatggttgtttgttcataaactttcatcttttgccaaaatgtagcttatgtccccatttaacaaggttttctggccaaaactgtgcacccacatcattctaatgaactggctgtccaataaaaaaaaaggattctcagtcttcccataaaagcaattttgcgtgcatagaacacctctatctatgaatatccctaaggaggtacagaaagactcttattatccaaacagagacattccactgctgctagagagccacagacggaagttttctctgcctcctggaaatgaagccaaacttttttctttcttcagccatgaggattgctgtcctcttcttcaccattttcttctttatgagccaagttctaccaggtaacaaaataaacttggtaagagtagagtgcctaacaccttacagggattcaatactcaaagagaaatcaccatcacctatgaccagaaaagggggtctcataggaaacctggaagactcattggctgagaggcctgcagc

SEQ ID NO: 39915 - DNA, 2300 bp, Homo sapien
agacagatttgtgtacacccatattcatagcagcattattcacaagagccaaaatgtggaagcaacccaagggttcgtggacagatgaatgaaaaagcccactgcagttccttcatacaatggaagactattcagccttcaaaaggcaggcacttctggccggtgcggtggctcacgcctgtaatcgcagcgtcttggaagaccgaggtgggcggatcacctgaggtcaggaattcaagaccagcctggccatcttggggaaaccctgtccctactgaaaatgcaaaaaatgagatgagcatggaggcgtgtgcctatagtcccagctactcgggaggatgtggcacaagaatcactggaacccgggaagcggaggtgagcccagattgtgccactgtactccagcctgtgcgacagagtgagactctatggaaacacaaaacaaaacaaagtcaaacgaacaaacaaaaaacaacaaaaaaaaaacagacaggcacttctgaggcaggccgcaacatggatgaaccttgaagacattatcgtcagtgaaataaataaatcccaaaaggataaacaggcccaggctcagtggctcgcacctgtaacaccagcactttgggaggctgagccaggcggatcacttcaggtcaggagttcgagaccagcctggccaatatggtgaaagctcgtctctattaaaaatacaaaaattagcagggcgtggtggcgcacgcctgtaatcccagcctctcgggagactgagacacaagaatcgcttgaacccacgatgtggaggttgcagtgagccgagatcacaccactgtactccagactgggtgagagagaaagactctgtctccaaaacaaaaaaaataaacacggtatgattccacttatctatcaagtgtctagagtagttaaactcatagagttgcaaactagaaaggtggcccccaggggtgggcgagagaaaggaatggagagcttggtgaatgggtggaatttccattttgaaagataaaactgttcctgagatgatggcggtgatgcttgctaaataatgtgaacgtacttaatgtcattaatctgtaaactgaaaaagagtggaaattgtaaatgtttttactggccattctatatgaactaatatatatttataatttttaatatttatacgtggtatattttcccattataaaagatgaaaattaaagcagttggatgtttaaaaagaaaagaaagaagcgaagaatacacaccagctttcttctgattagaggaggagccccatagtttctatggacactcacttttctcttcttcttgcattattatgaggacatccttagaggttggggaacttgggcggctttggctaatgaggagctctgtgcctgagcctcccaggccacaggatagtaaatactcagtctgtgcctcccgccctgcagtgtgaggttgcagtcctgtggtctccacagccgtcacctgtatcaggaggctcatgtctcaccctgtcttcttgccagccttgaggacggagcctgagcctccatggtgcaccacgcagggaggacagtggacctgttctccgtggtcatgtcccagcagaggggagaggcagttcagtgagtgtagggaaaagaaagagagatcagactcttactgtgtctatgtagaaaggaaagacataagagactccattttgagaaagacctgtactttcaacaattgctttgctgagatgttgttaatctgtagctttgccccagccactttgacccaacctgaagctcacaaaaacatgtgttgtatgaaatcaaggtttaagggatctagggttatgcaggacttgccttgttaacaagatgtttccaagcagtatactttgtaaaagtcatcgccattctctagtatcaataaaccaggggcacaatacactgtggaaagccgcagggagccctgcccttgaaagcagggtattgtccaaggtttctccccatgtgatagtctgaaatatggcctggtgggatgagaaagacctgaccatcccccagcccgccccccgtaaagggtctgtgctgaggtggattagtcaaagaggaaagcctcttgcagttgagagagaggaaggccgctgtttcctgcctgcccctgggaactgaatgtctcggtataaaacccgattgtacatttgttcaattctgagatgggagaaaaaccgccctatggtgagaggcgagacatgtttgcagcaatgctgccttgttattctttactccactgagatgtttgggtgg

SEQ ID NO: 39916 - DNA, 2300 bp, Homo sapien
ctggggcggggaggtggtgcagggcattgccagagcgggcctgtccatgggcaagggacagcgacctcctgggccaggacatgtgacagctgcgcaggcctgggcccggcgtggcagaggtgcgcgagagcggccagaagagggcgccagagagccaggcgcggcccgcggaggagcccgggccggccccgatacccagctccgcgccgcgcggacccaccgagcccgtgctcagacgccccagctccgccgagaagccgcttgagccgggtccttcttcttccccaagttcaggcagagcccccggagccatggccagcccttccagcagctccgaagccactggcaagccccgaggcagggatggcagtcccaggatgggggaggacgtccctcccgaagagaagaggctggggctgtagctggaggggggaagcgcacagcccgaggactgcgaggacggggaggacccgccgctgccgggcaggaaggagaccggcacccagacaggtggcgacggcaaaggagtaagtgatgcgggcgcgggggtccgggagtgccgggggctcgggggtgccggggacgcgacgaaggggcgtcgggaggctccgtggccgtccccgggttgaagttgggagtgcagccttcattctgaacccatttaggcagcatgggcagccctcctcgccatgggcagaatcagagcccccccgcccagtcttggggttgctcctggatgctgtctgggaggctggctcatggtgacatcctcatctccccgtccacgttaccgcattcagagcttgggtcacctggacactgaactcaggtgaattttctctgagatcccgggagaaggaggacagttgtttggaaggttttccagggccgatcacggaaaggatgagaagggagaggtcctggtcggggacacaattatggtggcagtgtaacgccgggaaactttattgcatgaagtccctctcactccctctacctccctcttttacgtggattctgccaaagaccaggataccagaatgcggtggagtgaccaagtgtagtgagaccttgggaatgtgattctggagccaggcggctggggtttgcatcctggttctgcccctccttagctggctgacatggcacaagccacttaccctctctgagccttactgtcttcagtggcaaatggatctgtcaacaggccccattgcctggggttgttgctgctgagattaagggaagctcgtccatagaagcacttagcgttgtgcctggcacatagtgtatggtggataagtgggacttagtactaaaactcatgccttggtgtctttttgcagtgatgttttgttctggagtacgtcacaagagacaaggttcttggctgggcatggtggttcaagccaataatcccagcactttgagaggccgaagggggaggatcgcttgagcccaggagtttaagaccagcctgggcaacatggtgaagcctcatatctaccaaaaaaaaaaaaaagaaaaaaaaaaaaaaaaggcagttatggtggtgtgtgcctgcagtcccaagtacttgggaggctgaggtgggaggattgctagagcctggaaggttgggttgcagtgagctgtgatcatgccactgcactccagcctgggtgacaaagtgagaccgtttcaaggaaaagagagagagagagacagacagacccacaagagtcttaagccagaatctccatgttaaaatgctttctggaggctaaaaggatgatatgttgataatgaaatgtttaaaaggcagaaaccccactgaattgtttggtccacagagggaaatgggaatagcatgacctgaaggatgatggaggaactgaacagaaaccatccttgtttcctgaatctgaacatggcacgctcttttcacggtgcctgtatctgctcagtccggcagccccttgaaaagagggaatcctgattttcaaacttaaaatttggcccaaagctcactgctgcccacaatgcccgccagacacattcctcttcccttttagttcctatgggaatactctctttgaagaacccatgaagcagtgtcaggctggtacgaggatcagcagtgatttctttgaggaggagagcccgtttcttcactcacaggccgtgtctgagtggatcaagaagaacagagtgcccttttatgagattttgtctgcgtagaccactagcttggtaaaaatgtcaaaaccatcctcgttctttaataacagattattttggacttttctctgcaagaagca

SEQ ID NO: 39917 - DNA, 2300 bp, Homo sapien
ccattgctacagccagaaaacagggagatcttgaggcatggcaatatccggtaatgttacaaccgatgccggccgggaaagggagtcaagcaggagttaaacaatatggacctaactctccttatacgagaatattattaaattccattgctcatggaaatagacttatttcttatgattgggaaattctggctatatcttccctttcaccctctcagtatctccagtttaaaacctggtggattgatggggtacaagaacaggtacgaaaaaatcaggctactaatcctgttgcttatatagatgaagaccaattgctaggaagaggtccaaactgggacactattaaccaacaatcagtaatgaaaatgaggctattgaacaactgtaagggctatttgcctcagggcctgggaaaacattcaggacccaggaacctcatgcccttcttttagttcaatcagacaaggctctaaagagccatatccagactttgtggcaaggttgcaagatgcagctcaaaaatccattgcaggtaacgcccgaaaagttattgtagaaataatggcttatcaaaacgcaaattcagagtgtcaatcagccataaagccattaagaggaaatgtttcagcaggagttgatgtaattacagaatatgtgaaggcttgtgatgggattggaggagctatgcataaggcaatgccattggctcaagcaattacaggggttgctataggaggacaagttaaaacatttgggggaaaatgttataattgtggtcaaatcggtcatctaaaaaagaattgcccgagcttaaataaacagcaaaaaaaaaaaaaaaaaaaaaaaaaaaaagagccacctggcctgtgtccaagatgtggaaaaggaaaacattgggctaaggcatgtcgttctaaatttgataaaaatggacaaccattgtcgggaaacggcaagaggggccagccccaggccccgcaacaaagtggggcattcccgattcagccatttgttcctcagggttttcagggacaacaacccccacagtaaataccaccatttcaggaaatcagccaattacaatacgacaattatcctctgtcacagcaggcagtgctgcagtagatttatgttctactcaaatgatttctttactccgtggagagcccctgcaaaagattcctacaggggtatatggcccgctgccacaagggatggtaggccttattttaggaagatctagtctaaatttgaaaggagttcaaattcatactggggtaattgactcagattataaaggggaaattcagttagtgatcagctgtactgttccctggagtgccaatccaggtgatagaattgctcaattactgctcttgccttatattaaaattggggatagcaaaacagaaagaacaggagggtttgcaagtaccaacactgctggaaaagctgtttattgggctagtcagctctcagagaatagatctgtgtgtacagttactattcatggaaaacaatttgaaggattagtggatactgggtctgatgtttctatcattgccttaaatcaatggccaaaaaattggcctaaacaaaagcctgttacaggacttgttggtgtgggcactgcctcagaagtgtatcaaagtgccaggattttacattgtctaggacctgataatcaagagagtacagttcagcctatgattacttctattccaattaatttatggggccgagacttattagaacagtggcatgcagagattactattccagtctctctgtacagccccacgagtcaaaaaatcatgactaaaatgggatagctccctggcaaaggactagggaaaaatggagaaggcattaaagttccaattgaggctaagggaaatccagaaagaaaaggactagggtatcctttttaggggtggccactgtagagcctccaaaacccatttcattaacttggaaaacagaaaagcctgtatgggtaaatcagtggccactaccaaaacaaaagctggaggccttacacttattggcaaaataacaattagaaaagggacatactgagcattcattttcgccttggaattctcctgtgtttgtaattcagaaaaaatcaggcagatggcgcatgctaactgatttaagagccgttaatgcagtaattcaacccatggggcctctccaacctgggctgccctctccagccatgatccccgaagactggcctttaattataattgatctgaagtattgcttttttaccattcctctggcaaaacagg

SEQ ID NO: 39918 - DNA, 2300 bp, Homo sapien
ttaatcacccagacccatccctggttaggacttgctgtggatcctcaggtgactccatctcaggatacagggactgagagtgtgtatgcaacttctcagacccagaaaccgttgattctgcctaaaaacacagcaataaccacatcccaccctcttgatttaaatgaaagggtttgggggaataaaagatgaacttctttttttctttgtcagatcttgcgctcatttggttctggtggggaacaacagctataagagaacaagtgtattcaattagaattaattccccctctcttattctcatagctgagcagggctcaagtgcctctcatctgaaagaggtaataagattttatctgtctcctcatctaccttctgcaagtatacttaacaaattagctctcgggactcttccaaatggagttttatgaggaatttgctacggtaaacgttttagactttgtacacagttcagatttcaggggcagtactgaaatctgaactgtgttgctaactgtcctgcctttcaactcaagacacaataactttgaactaaaataattatatttttgttgttttccagtctgtccccacgtctatatcaccaccacccccaatcccaccccgcaggagctaactcctccttcctgtccctgcaagatcaaaactcctcctgcaagccccgctagctctgtctgctcaccttcgtggcagatatcgctattgtacttttatactcatttgtgtgataaatacttcaatgtccacttcttccacgagcccctgagcccctggaggacatggaccacacctagtttttctcaccgttacatctcccttgtcaggcacatggtaggcgcttaataagtatttggtgaacgaatggcttgtttggtgacagtccaaaggctgggggacagagggaaagctccctcctttcgggccccagactggtggcgctgatacagaggaggctaggataaggcctccaggaccaaagcgcgaacccgtaaggcccctgctaaaaagactttcctgaaggcggaggaactgcgagagtgcctacgttagcccaaggcctgacctgacgatcccagggaccctcgccctaactggccccgccttccgggccccaaacccggactcggccccgcccgaagctccggatcctggggcccgcccctggtcccgcgtcggcggaccgtgggctcgctcctggacctgcctcaaaccctccgcaggtaacgcctcccgaacttgagccacattccgatcccctcctcaaacccctccccgtttcccacgccctggacccctcgctccgtctcggccccgccccaagcccagctaggtctcggcccctgagcccagccccgaccggcctcccagtccctgggtccctcccgacaccggcccctccctaagctccgcctcccagggcccgcctcctgagcgcagcctgcagcccggactcggccccgcctcccggaccctggacccctccccaagtgggcccgtcctaagttccgcctcccagagtccgcgcaccgcctggccatgtggtacgacatagtcaacgccctgccccggccccgcctcctgagcccttctctgggtctggccttagccccgccctaggacctgtctcctgggctctgctccgagtcccgcctcctgaacccaatggcgtttatccccgccctaatgcccgcctccaggactcttatcctgcccccacgcaaggcagcgcctccaggacgcgaccaacctggacgcttccgaagaccagcttccaggatcgccctatgctgaccccgccccaggacccgccaacctggactctacccagcacctgccccaacgacgcttatcctggccctaccccaggcctcgccctcatgacgctcatcctggccccaccccaggccccgccctcctataagctcatcttggccccgccctagagtccgcccccaggacgctcctcctgaccctgcccccaggccccgccccctctctgcccccgcgcactaccctgggcccgctcccttttcaatccaggcccggcttccgcccgatctcctggcaacgctgcggccccgcccacatcatgacgcccgaggagaacgcgggtaccaaactcttgctgcagggttttgagagccgcttcctagtggcgcgcacactgcgctccttcccctggcaggtgggcggcggggcgagcggagaggcccgcggggctcgcggagtccaggggcagacgggatgggtctccgtgctgaaacccccggcgctcctgc

SEQ ID NO: 39919 - DNA, 2300 bp, Homo sapien
cggctgtaatactccctcagaggccctttgccttcacagagaagagcagacactgccatggacccgtctctgtccctgccacatggccccaggcccaagacactccccctaggagggatccttttcccagaagctccacccctcggcagctccagtcaggccccatctgggcccttccagaagcaacccaggagccccgagacctgcaggggtgtgtgcaccctgacccctgatgcatagccctgcacctgcagccagctggcctcgggctgcaaacatggtggggtaagcactggcctggcacctgaccacccactgggtggacccagccttctgtctgtgttgtgcacaggggacacgaggactccccctgccctgccgcagcccccagagcacatggtgcgggttccaatccgcgcctgccctgccacagcctccagagcacatggcgcgctttccaaaccactcctgggagcctagaggccagaggagggaggagagcaggaccagcagctggcccagaccccgcctcttcctacaccacttccgcttttctccctcctcactgagtcatcttgaaagggctcagcagcagtaactgtgggacaggggctcttccatttgaaaaattaaaagaggcttggttaaggcaccaatgacatggccgggcacagtggttcatatttataatgtcagcatattgggaggccaaggcgggtggatcacttgaggtcaggagttcaagaccagcctggccaacatggtgaaaccctgtttctactaaaaatacaaaaataagctgggtgtggtgggcacctgtagtcccagctactcgggaagctgaggcatgagaattgcttgaatgtgagaggcagaggttgcagtgagctgagatcgcaccactgcaccccagcctgggagacagagactttgtctcaaaaaaaaaaaagacaccaatgacataacaacaacagaaaagatgcttggaaactactgaaaaagtagaaagcttggtatctacagattcacatctgggctccctgccctgctgtgaaaccctctgagcctcagtttcccacgtgtcaagcagtataagaccctatggcagagagctgcagtgaggattaaggagacaagatcgtgggaagcacagggtgaaggctgcgtgcccctccccctctgccatcccccagccaaacagacacccagggtcccaggcagtacctgttatcacacagacaagagaaggaaggttgcgtccgtgaagagtcagttgttcaaactctgtgtttaaaaaaagaagcaattctacatggaatttctgatagaattttttttttttttttttcctgacagactctcgctctgtcacccaggctggaatgcaatggcgtgatctcagctcactgcaacctctgcctcccaggttgaagtaattctagtgcgtcagcctcccaagtagctgggattacaggtgcccaccaccatacctagctaagttttgtatttttagtagagacacttttcgccctgttggccaggttggtctcgaactccggacctcaggtgatctgcctgcctcggcctcccagagttctaggattacaggtgtgagccaccatgcccattcagaaaaaaatttttaaataaacaatagccagagtcccctggtcaggtggagaaagtgcactgctctggcagggaggcccccagcctctgtgagatactctcctggagggcgcatttcagcctaagggcctggtcactcaatgacccaaatggggattcagggaggcccacctccaccacccctactgtccccaggctgccccacccagtagcccaggacaggaacatgttgcaggccaggcaagcagctcacagctcagtggcccggacaagcccagagctcctcaccgcagccacacacctactttctaaagctgccagcaggatagagaagtcttcgtcctctatgagaagagaattgaatgtcaggggcctgtttctagacagcactcttccagctcacacaccctccccttctcattgagaccgtggcggggtgggggcatccaggactggtaggggtaaggagaacacaggttggccaggtgcccgtcacaccagccccaagtgccccaggggtcgtgcagacctgtccaggtgtgctgctgaccagcagggctggccgctcatggagacgcatcaccagcccgctcccagcatcctgctccatgaaggctgaccgctccatggctgggtcctcaggttctgagctgaaggaggagaaaaaaacc

SEQ ID NO: 39920 - DNA, 2300 bp, Homo sapien
tggagaacttggcaaagaaggaacctgctacttgggtgtatttggaggaggagaagaacctagctaacagtcttcttaaagaaaaggacctgtgagaccctaacaataactgctaaaagatacttttcttttatttcagaggatttatttagcttaaagatgcagtgggctttattcttaactttttttttgtttttttagacagggtctcactctagtcacccaggctggagtgcagtggtgtgatcatggctcactgcagccttgacctcctgggctcaggcagtcctcctacctcagcctcccaagtagctgggaccacaggcatgcatggctacacctggatagtttttttaaataattattatctttgtaaagacagagtgtctctgtgttacccaggctggtctcaaactcctgggctcaagcgatcgtcctgcctcggcctcccaaagtgctgggattacaggcgtgagccaccgcgcctggcctcaacccatttttcactttggagggaaaagaggcacacgtagcttcagcacttgttgaatgaacacccctgtctatgagtgtggagataaaagagagcacttcccacaaacactctggaatgatttttggggtacccggctcattccacctggttagtcctgttgacagtttagagattatcaaacttaaggcagatccttatgggaggaaagtggagagaaaaccctaaggcaaaatggtccctatttaatgagaacctattcacccttatgttcttaaggaagattttgctcttgaacattctccttatgggaagtcagtttattttaaataggctaagaagagccaggagcaatgcgcaaatcaccactgcagggaggagccgcctgcaaagttggcttctgtttctagaatgggcaaactctcccgtgtctatgggctggtccaagttcttgtgtttgccatagtttccccacctgtaaaattgggacaacagctacctgatggaatgatttcaaggtaattggttaatggctgcaactctttgagctccttctcagtggtgaatttacaagggaccatggtgcaaactgttacttgcagttttactctaagaagcaatgaattttttgagcaagccaattgccttctctccagagccatcacttggaaatagctcttcgttaatctcttctctctcttatcatctatccagccacctttgaccatgaatttgtcttactactggtttgcccctttggcctataacacccagcattgtggacctcagcagcacacggtcaagtaatgtatattaagcaagggatatttctcaagatgccagactctgcataaggtctagaggacaggccagcaccccacttctcccgtttcccaaccattcctttctccacctggttggaagtgtggattacaatgcacctttcagggcctaaagctgcctcccctctcacacagttcttggtcaaacattattttccaaaagccattgtttttatttgctgtactgcttgacagttcttgtttctgtgggtcagcgtcccagactctaggccccggtgtcagggaatacatggatgacgtaccagcttctcatcttaaaccctacgtgatttcttcccataactgcccaaaacctcccaggattttaggggactccccacccaggattttaggggaccgaaatgtcttttatttactcctttaaagcaacaaggctatgtttagtttttacagcttctgataaggccacaccaccagagaatgtttaagagccttgtgacaaatgggcgagggtcccaaaataaatgggatcctaatctttacctttttctcctccttctccctgatcaaatagtgagactctaattgataatgcacccattgtctggcatggcaaatctctaatcaggaaactgtcctgcctttctaggaagccgctctgtgacccacctctgaatcccacaaaactgcaccagagagccgggcgcaagatgaaccagcaccctgtcggctcaagatgcaccagaccctctgcctgaaccccgagagcctgaaaatgtctgcgtgcagtgactttgtggagcacatctggaaacccgggtcctgcaagaactgcttctgcctgcggagcgaccaccagctggtggccggccctccccagcccagagcgggcagcctgccccctccaccgcgcctgcctcccaggcctgagaactgccgcctggaagatgaaggtgtgaacagctcaccttactccaagcccacaattgccgtgaagcccacca

SEQ ID NO: 39921 - DNA, 2300 bp, Homo sapien
gattttgccgtcacactctaggctgggcagcagagcaagactccatctcaaaaaaaatttttttaattaaaaaaaattaaaagtgatgtatatatcactattacataaatgatgcaacagcattattcacaatagccaaaaggtaaaagcaatctaagtgtctatggatggaagactggataaacaaaatgtggtatttatgcacaatagaatatcattcaaccttcaaaaggaaggacattctgacacatgctacaatatggatgaacctggaggacattaagctcagtgaaataagccagtcacgaaaggacaaatacggtccgattccagttctatgaggtacctaaagtagttaaatttatagagagaaaaaagtagaatggtgatcaccagggcctgtgagggagggaggaaaggagagttagtgtttagtgggtacagtgtcagtttgggaagaggaaaaaatcccaggagtggatggtggtgagggtatcacaacaatgtgaatgtatgtcataccaatgagctgtacacttaaagatggttacaacggtcaactgtatgttacatatatgttaccacaggttttttttttaatttaaaaatattcttttaaaaaaagcagtcactgtcattcctagtgttgtccactctggaatattcaaaattatttcaaaccaatgctaaattaacttgaattttaaaaatagttttaattttaaacaattataaaggcaatacgttttcattgtaaaaatctagaaaatacaaaaaagtgttattaaaggataatttttagaaaaaatgtaaacatcgtgactttcacacaaatataaaatgaatatgtgtgaaagaggttatttaactcattattgaataaggaaaccagtatgatgttaaaaccaaagaagctggccacttgcctgcagtcctagctactccagaggctgaggcgggagactcacctgagcccaggagtttgcaaccagcctgggcaacacagcgaaactccccaaccctgtttaaaataaataaataaataaataaataaataaataaataaaagaaaaaggaaaaaaaaaaagcaaagaacaaaaggacacacatatacagacaaacaggaatgctaaaatgaatttacaaatcaatgccatactggtcagtatccattggacaataatcattccactgggacgaactcattagccttgatgttggcaaaagtcatttgcaatactacaggctttctataatttatagagttgtaaaataacctacagacgagaaaggccacagtacactgtaaaattaaataaacctgcaaaaaacgctaagcaggacatccgggaacactggtccctctttctagtccccttgaaagtctcacaaggctgaaaaaggaaagtaaaatccttgtgtaacccttctgcccagaagtacactggcacagattctttagagacgaatttaatccagagtgtggagcctttattaaggaaataatccggtgcaacgttctgggacacgctcctggactgggtgggcttctgcacactcacccagcgcacctccaatccccgggagcgctcggcaccgcccacttctctgcgagtggctgcaagttgcagagcaaaccagggggcgatctggaaccctctgggagtaaagggctaagctataagcgcagggtcgacgggcagggaccggaaacaaattctaggaaccgagatccgctgagcagcagggaagctgcgcagccaccgcgtcccgccagcgccgcctctttccctccccgcccaccgcccgcctggcccggcggggcggcgcgaggacccaggggcggggcgacctttgctccggccgtgagcagtccaggccaggcgtggcccagccgcccggctgcaaggtggggtgtccccgccgctcggatccccatctcacctgccgcgggcgaggtggccccgccgcttcctgcgctcacctcgggtccctccctcccgggccaggtttggccgcggcagccgcccctgggcgcccgcgcccggacccgcggtttcggtcagacccgcccgcgggctggtttcgattagggccagtaggagggcggagcggccgggacgccaggagggaactagcctaagtggggacggtccccgtgcaggagacaaagagcgtccctggagcgatcagggctcaggagcccgacccggagcccggggcgtccgcgctgacttcgggtccccggagcctggggcacggcagggagaagacgacggcggagaaggcgacagcggaga

SEQ ID NO: 39922 - DNA, 2300 bp, Homo sapien
ccaaagttagctgctaggttgagacgtgtgtttttacactggcgtcctccttacagttagattgattatattattagttgaatttgaggcagttttcaaaaccctctcttctgggagtttactatattaataggcattcaaaaaattctcgtggcagagtgccttagaaatgtgaaactctttcctagggctccaaatatccaacttctctttgagctttggagtcagatcaccctagtgaaaggcctggctctgtcactcgctagtatgcacccttggggaagttatttcatcttttggaaccttagttcccttcctagtaagatgctgaggccgggcgcagtggctcacacctgtaatcccagtactttgggaggccaaggtgggcggatcatgaggtcaggagatcaagatcatcctggctaacatggtgaaaccccatctctactaaaaatgcaaaaaattagccgcgtgtggtggcgggcacatgtagtcctagctactcgggaggctgaggcaggagaatggcatgaacccaggaggcggagcttgcagtgagccgagattgcgccactgcactccagcctgggcaacagagcgagactctgtctcaaaaaaaaaaaaataataataatactgagtaagatggagcttacatggtgggattattaggagttgaagataaataatgcactagagtgaacaacctaattcctggcatgtagttagtaaatgagaggtttttggtttttttgttttgttttgttttgttttgctttgctttgctttgttttggtgatgtcgttattatcatgcttgaatgagcccatgactgaatcttgtatggactggagaagtgtttaggcagatgctgaattatcagtgtccatgaaatcagcgtctctcctaatgagagatgggggattggaggaaacgaatcgtaactcctttttcctttcctttcaatgtctttgtatattttattaaaagttgctaaaaaaaaaaaaccactttcaaaaacatcccatcacatgtcattgtagggaagcaaaaatgagaaaaacacttgatattttttcctctaaccattttatcggaactgaatcccgctttatttgctgaggctgcagtagtttattcattctatattgatcagactccagatttgcgtggacaacttaacttataacattttaagtaaaatcatgcattttaggcagacagacatctcactttttagtatatattccttcttctagaggattatttggtgtgtgtctgcgtgtgaccgtgtgtgtttattgaaaggaaacagttccgtgtttagagttttgggttgttagttagaggtctagttaagctataaaattacagtggaataagtgatgacagccagttagtacagttccctcttatagctgaactgagcttaacacaccaacagaaatgtttggcaaatagactgctaaaatgactctttcctttgtggggacataagttgcctgacatttacatgtttataatgagtcctggaagtagaaatgaaaatatgtgcagaaaatagatttctatcatcacttccttttcttattgagggtagcattgtccagtacgtttttgtcatctctgtgctttcttgttgtccacccatacaggaagaatgttggtgaaaagcacagaaaccagtgacgtttgtggctgtggaatttccatggagaaaagagagcatctgaacacctggaccatcttttgcacctggcagaccctctgcactcaccccagcgtgttctgtgaacttgagtgacaacgcgtgcttgcagggtgctttttggacgactggggaagaggtggggagggggtggtggggggaagcatggacgagaacatggagcaaatgttttacaacctgaacctcagaactgtgatcctccaaggagcgcgctacttgaagaaaagaaaaaaaaaaaaaaaaagtcgaatggcttctcagggattttgttttccgtgcacatataagccatagttacagtacaggtggcagtatttagagcactcagatttcagttctgttaaatgtgaaagagggatcgactgacgttcattgctgttccataactagtgtaaaatatgtatatgtttatctttatttttataatatgcaaatacatttaaatttatacagtttgaagcttctagcgttagttcacactgggtgcaatattctgcatgagaactgtgccaagatggggctgatttcttattttagtataagacttttttgttttttctttattctttaa

SEQ ID NO: 39923 - DNA, 2300 bp, Homo sapien
tctatgatgatacccagggcccccgagttgtgccagttccactacggcgtggatgcaaggcgagcggcaggggagcaggtaaaggatgagtaagggaagccggcggatccgacgcattagagaacaagaaaaagaaatccttagagactgggggccaacaaagagccaggcgcgggcgaacccaccaggggggccccggagccccacatccgccgctgggacgacctccccgcccagcatggtccggggcgcggacccggccccgcgccaggcgcccccggccccgcacccggcgccctccgcagctcccgcccccggggcggtgccgggaaaacgcggcgcctccgccggtcacgtgggggccgctccggcgggcggcgctgccgcttcccaatcgcgccctcccagcgccggggacgcggcgcccgcgctcccgcccgagcccggggaaacggagacaaggaggcgccgccgccccctccccgcggctgcgccccagccctgcgcccgcagcatgcccgccgccgggccgagcgccgccctcccccaggagctcgaggaggcgacgccgctgccggccgcgggaccgcggctgcgagggtagcggggccggagccgggccccccgaggcgccgcgcggcgggcggagagggaggaggagcaggcatcctccgcggcgcgcgggcggcggccctgctgcccggcgcgcccatggcccggccgcagggagaatgcaagctgctctccacgcgctcggcgtcccccggagccgctcgcgtcgccgccgccccctagccgccagcgctcggccgctggctgcgctaggacccgcggccgccggccgccgagcgcgggagggcaggcaggggcaggagccggagggcccggggcgcggcgcggcatgtagctgcgggctcccgcgtccgcgtgaggctgtcggcccggggccccgccatggctgggatggacagtggcaacctgaagaccgcgaggctgtggcgggacgccgccctgcgtgccaggaagctgcggagcaacctgcgccagctcacgcttaccgccgccggggcctgccccggggccggggccgacgcgctcgagtcccccgcctccccccagctcgtgctgccggccaacctcggggacattgaggcactgaacctggggaacaacggcctggaggaggtacccgaggggctggggtcggcgctgggcagcctgcgcgtcctggtcctgcgcaggaaccgcttcgcccggctgcccccggcggtggccgagctcggccaccacctcaccgagctggacgtgagccacaaccggctgaccgccctgggcgcggaggtggtgagtgctctgagggagctgcggaagctcaacctcagccacaaccagctgcccgccctgcccgcccagctgggcgctctcgctcacctggaggagctggatgtcagctttaaccggctggcgcacctgcctgactccctctcctgcctctcccgcctgcgcaccctggacgtggatcacaaccagctcactgccttcccccggcagctgctgcagctggtggccctggaggagctggacgtgtccagcaaccggctgcggggcctgcctgaggatatcagtgccctgcgtgccctcaagatcctctggctgagtggggccgagcttggcacgctgcccgccggcttctgcgagctggccagtttggagagcctcatgctagacaacaacgggctgcaggctctgcccgcccagttcagctgcctgcagcggctcaaaatgctcaacctctcctccaacctcttcgaggagttccctgccgcgctgctgcccctggctggtctggaggagctctaccttagtcgcaaccagctcacctcggtgccatcccttatctcgggcctgggccggcttctcaccttgtggctggataataaccgcatccgctacctgccggactccatcgtggagctgaccggcctggaggagctcgtgctgcaggggaaccagatcgcggtgctgcccgaccactttggccagctctcccgggtgggtttgtggaagatcaaagacaacccactgatccagcccccctacgaggtctgcatgaaggggatcccctacatcgcagcctaccagaaggaactggctcattcccagccggcggtgcagccccggctcaagctgctcctgatggggcataaggctgcaggaaagactttgctgcgccactgcctcaccgaggagagagtggagggatgcccaggaggaggggacaaggagaagtgctacccacc

SEQ ID NO: 39924 - DNA, 2300 bp, Homo sapien
gcaccaaatatgggtccccaaatgacagccatagcgcatgtcggggagagctgcagtgggtcaagtgatgcctttaaccaactgaacgcagttttcggtccctgaaaactatttgcttccttatcaatcaacctgaagggaatgatggaggtgacactgggagtcttggtaggtttccagactttcataagttcgggagaaattattgacttagcatagatgtgagctcaaagaaacatttcctaacagcaataaaaataagcattagagttgaacaatggactgtgactgtttcccaaaatagctgttttcttgagtccgcagaacaacaggtactgtattaatggggatacagtatttgtttcacagcgttgttgtgaagataaacgggataccccagataaacagcttgtgtcccccccatcttaacaaccctcctttaggctggcgggccacctgctcaaaagccttccccaggggggttaaaaccgtcttttagtagttctggtacgggtgggctgggggagatcctctaaagccagtgcgaccttgaccccagccaatgtccaggctcttgacacatccagagaatgagttcaaggacaactcagaaaatagtgacaatatgcagatttattgcaaagggaaaagtacacacccaggaaaagggattgtggagagggtcactcacaacggggcttggggctgctacctttatgggtttctttaaccaaggggtgaaatattcatgaaaattcctggaaaagtgtggagatttttcgggactgtggtgccacccatttttacttcaaatatgggtgtccccggaattgtcatggcactggtgtgacttaggatgttaaagagcgtataatggaggcctaggagaaacctaggtcaaatccaggaccacgtcgggtccagccggtcttagccagcttggtacacaccctggttttcagggtcttatcagcccatagcctccagtcaagtgaaactgctgcctggtattttttattctcctctgaccagcctgcattactcctgtcccatgttcaacacgaaatagggcctcaggaaatatttaccaaatgaatgaatggttgcctgttctaattttgtttaaccacactcttgtcctaagcttctatgatgatacccagggcccccgagttgtgccagttccactacggcgtggatgcaaggcgagcggcaggggagcaggtaaaggatgagtaagggaagccggcggatccgacgcattagagaacaagaaaaagaaatccttagagactgggggccaacaaagagccaggcgcgggcgaacccaccaggggggccccggagccccacatccgccgctgggacgacctccccgcccagcatggtccggggcgcggacccggccccgcgccaggcgcccccggccccgcacccggcgccctccgcagctcccgcccccggggcggtgccgggaaaacgcggcgcctccgccggtcacgtgggggccgctccggcgggcggcgctgccgcttcccaatcgcgccctcccagcgccggggacgcggcgcccgcgctcccgcccgagcccggggaaacggagacaaggaggcgccgccgccccctccccgcggctgcgccccagccctgcgcccgcagcatgcccgccgccgggccgagcgccgccctcccccaggagctcgaggaggcgacgccgctgccggccgcgggaccgcggctgcgagggtagcggggccggagccgggccccccgaggcgccgcgcggcgggcggagagggaggaggagcaggcatcctccgcggcgcgcgggcggcggccctgctgcccggcgcgcccatggcccggccgcagggagaatgcaagctgctctccacgcgctcggcgtcccccggagccgctcgcgtcgccgccgccccctagccgccagcgctcggccgctggctgcgctaggacccgcggccgccggccgccgagcgcgggagggcaggcaggggcaggagccggagggcccggggcgcggcgcggcatgtagctgcgggctcccgcgtccgcgtgaggctgtcggcccggggccccgccatggctgggatggacagtggcaacctgaagaccgcgaggctgtggcgggacgccgccctgcgtgccaggaagctgcggagcaacctgcgccagctcacgcttaccgccgccggggcctgccccggggccggggccgacgcgctcgagtcccccgcctccccccagctcgtgctgccggccaacctcggggacattgaggc

SEQ ID NO: 39925 - DNA, 2300 bp, Homo sapien
ccagaaatttgatttttcaaaaatctttccagtttctctcctatcatgtcttcctttaaatctttgagcatattcataacaggtgtttaaaatccttgtctgttaattccatcatttttatcattttggggtttgtttctatgaacttcgtgagatattttcttaccacttggtctctctctctctcttttgagacagagtcttaccctgtcacccaggctgggttgtggtggtgcaatcataggtcactgcagcctcaaactcctgggctcaagcaatcctcccgcctcagcatccccaagtgctgcgtgtctttcaatttttgactggatgtctcacattttgaatttaatgttgttgaatcctggattttactgtagtctttcagagagttttagaatttgttcttacaggtaattaggttacttacagagcagtttgatcctttcagggcttgttttaaggcttttgaagaatctacagtagtttatgttctgggtcctgcagtctacggttattatatctcactaaggcatgacactttcgtaaccacccaaaaggttcatcttgcctactgcctagacagagtcgatttatcaagacaggggaattgcaataaagagcaattcatgcagagctggcagtgcaggagacctgagttttattaatcaaatcagtctccctgagcatttggggatcagagtttttaaggataattgggtgggtgagaagccagtgagatgggagtggtgactggttgggtaggagatgaaatcatagggagtcgatgctgtcctcttgcactgagtcagttcctcccgtgggggacacaaaatcagatgagctagtttatccaagatcaggtgagtcagtttatcaatctgggaggtgccagctgatccatcaagtgcagggcctgcaaaatatctcaagcactgatcttagattttacaatagtgatattatccccaggagcaatttggagagggttagaatcttgtagccttcagctgcatgagtcctaaatcataatttctaatctttcggctaatttactagtcctacaaaagcagtctagtctcaagaagagggtttattttgagaaagggctatcacctttgttttaaactataagctatacactaagttcctcccagtgttagtttggcctacgcctaggaatgaataaggatagcctggaggttaaaagcaagatggagttggttaggtctgatctctttcactgtctcaatgataattttgcaatggcagtttcacatctgaggtttctattgcgtgttccatggtattcaataatctcttcactctggttgctgggagctcaaatgattcccagttctgtgtgacctctcaccattgtttggtgtactgctccccagtaattgttctttcctggccttgtggagtttcacgttttttattcagttaaagattcaaggtactcctaagcagatttctgaagctctttttccatgtaattccctcctctccagaattctgccctacaaattccaaccgacttggcctaccccaatttcgtcaactccaatctctgtcttttcaacccaggagatcctaggtttccatatgatttcctttcatcgcaccacagactggaaatcgcctctgggcaaaagggcaggatgatatacggctccttttatttcttttctctcaggtaaaacagtccacagctgtccgttgtccaatgtctgaataggtgtctcctatattttgttccgttttctaattgtttatagtgggacactaagtcccgacccattttcttttcttgcccagagtggaagttttaggaaactccttatggaaaatgtgaattgttttattattttttatggtcgaaaacatctttctctatgatatcttcccactcaccctacttttttccttctcaggaaacactgacgggaacacacgtgccggtgctaccctccagtgactggactagatccttgcgcaacttcaacccgcgctagctccgcctacggccggccacgccccgtcttctcaccggcgcgcctccctcttgttcgtcctccctccccctgtggactgcggcgctggcgttccgcgcacgccggctcactgcgcctgcccggcgtgtggacgccacacgctcccggaagtgggaggtggccgctggagtttgtgtggccgccgccgcgggaacgcgagcccggtaatttttcaacggagaaaggcgaggctttcgggctctgcagagtgagagttagcaagtgtccggctccagcaactct

SEQ ID NO: 39926 - DNA, 2300 bp, Homo sapien
tgcctgcatatgttttgcaatacctcttggctcttcatctttgcccactcctccagcatgctcactacacctgagaaacttagccagtacttggcttaaaaatcttcaacctactcatcacctaacaagagagggtttaaagttggcagagggaatattgcacagaaacgctatttgccaaccacctaccaatagctgacttcacaagtggtcccttatcagatctgcccatcagaaaagaaggaagaagattaatgatcattcttcagacaccaggactccctccggggaagctctctatagagctaaaggcttgtattggattattgtcaccgatcactgttttaggcttgcattcctagtaaaattgaagctgagcctgtatcccttacagtagaaactcccaaatgccatattcaacataatgagttttcagaaagctaaatatatccaatgggaaagactggccattacatccttcctgcatttcgttgttattgctattaaagtgtactttaaaaaataaaaataaaaggatagtaatagaagacagcagggtttattttcatgtctttcttggcagtttaaaaagttggcaatcctatatcaatttctaatttttttctaaaactctactggtcattaaaattagaaaactggtagcctcatgcctaaagtggctagttcagatcaagttacatgtaaactgaagaaaggaagagcctctgattcaaactctttaaggtcatcatttttttctttttctaagaccattttctatagatctcaaggtgcataatatgcatcgcggaggccctgtagatttagatagcgattataaccgattcaagtcaggaaatttcttctgaagtatacctacctgtgaaaccctccatatctggggcgctctgtgccacgggtgtcagacttttgcaaaagccctgtcattctaacgggacgccctcctgtaggaagttgccccctggcgcccgtcctccggcttctgatgaaacggcgacccaccacccccttcccagaccctggcccgcagccggatcactccgggcgcgctgccgatcacgtggcgaagcggtgctccccagcgccgtggctgcgcgcccattggtcggcggctggagtcccgggcgcgcccattggctgcggggggcgttcacgtggcagggggcctgggatggaccccggggtcccgagagctggcaggaaagttaaagggggcagcgcggccgcggggagctcgagtcccgggtgactgctggagggaggaggtgaccgcgcagctctcgtgcacggacggacttcgccgcccgcggggggcgcgaacccgagcccgggcccagctcctgccgtcacggcagctgtccctgttcccccagggcgtatgctgccgcgggctggcgcgtctgccctcgggacttatgagctgaacccggtacgtagctccccaagtctcgagtccgagggaagggctggggacaacaaggcgagggcgtgcagcggggacctctttgggttcctgtcacctacattttcaccgtgcgacttgcactggcacaccggggctggaacactctaggtagctggccccagggagctgttgcttcagcgtggagagggcgatccagggaccgcagctgggaagcgcctcccgggcccacgtgctccaccgcgctgctgggcccggctgcgaccgtgacccgggagctgcggctgcggcggctgatccctttaccacctgttgttctggcttcgaaactagcacaagttcccagccccgggtcccgagaggtctggagacttctccaaagttgggtagtggggtttggagcttaaggacaagccgcttcgtctctctccgggccttattttccctataaaacgcgaggaaatacacttggtaggctctcaggccaccgagggcgacgggacctagcacgatccccgtcccgggctggcggaggccaggcggccgcgcgggggtgctggtgtcgcgctgcttgctccggccggggttgcccctttgccggccccgcccgggtgcgataacgggctcctcctcctcgtcgtcttcctcccaccgccgacatctccgggaacccagcccaggccctgcctcccggacacaccgacgctcacgtagtcgcgcttgccacaaccctgcgggctctccgatgcggcgagcgagctggggagggggcttctccgcggcccaaaaggtgggtgcggcgcgaggccaaggaggcttgtagggaggttgggggcggagtgcagccctggtcaaa

SEQ ID NO: 39927 - DNA, 2300 bp, Homo sapien
taaatggattaagggcggtgcaagatgtgctttgttaaacagatgcttgaaggcagcatgctcgttaagagtcatcgccactccctaatctcaagtacccagggacacaaacactgcggaaggccgcagggtcctctgcctaggaaaaccagagacctttgttcacttgtttatctgctgaccttccctccactattgtcctatgaccctgccaaatccccctctgtgagaaacacccaagaattatcaataaaaaataaataaattaaaaaaataaataaataaattaaaaaaaaagaaaaagaacagtttatggaagaataataatttactatgcttagccactgctgttttctggtttcatttttttttttttttttggttgggggaggagggttgttaaataaaattaaagctgtaacccaatgccagatataatagaaagaacttggtgtgcattgactgatgcagtaagcattgaaattttccattttcactttctctctttgttgccataaaatgagagggtgaggcaagatcgtgtctgagggtgggtccagctctcaggctctggagctctgcactgctgggtctcctggtaaagccctcctctgagcttgcatctcagctctatcctgatggcaaagactgtgctcttttcaaactcatagatgacaccctcctacctactaaggctgtggtgtaccacaactaagtttaacccctctctcctggtctgaaaaagtcatctaaaccacaggggaaattattgaccatggtttcctagatctatgcaagaaaaatgctcccaaaccctaatgctacaaagctgtatttacttgtcccaactctttcccggtgtggttcggattaccctttgcctgcatatgttttgcaatacctcttggctcttcatctttgcccactcctccagcatgctcactacacctgagaaacttagccagtacttggcttaaaaatcttcaacctactcatcacctaacaagagagggtttaaagttggcagagggaatattgcacagaaacgctatttgccaaccacctaccaatagctgacttcacaagtggtcccttatcagatctgcccatcagaaaagaaggaagaagattaatgatcattcttcagacaccaggactccctccggggaagctctctatagagctaaaggcttgtattggattattgtcaccgatcactgttttaggcttgcattcctagtaaaattgaagctgagcctgtatcccttacagtagaaactcccaaatgccatattcaacataatgagttttcagaaagctaaatatatccaatgggaaagactggccattacatccttcctgcatttcgttgttattgctattaaagtgtactttaaaaaataaaaataaaaggatagtaatagaagacagcagggtttattttcatgtctttcttggcagtttaaaaagttggcaatcctatatcaatttctaatttttttctaaaactctactggtcattaaaattagaaaactggtagcctcatgcctaaagtggctagttcagatcaagttacatgtaaactgaagaaaggaagagcctctgattcaaactctttaaggtcatcatttttttctttttctaagaccattttctatagatctcaaggtgcataatatgcatcgcggaggccctgtagatttagatagcgattataaccgattcaagtcaggaaatttcttctgaagtatacctacctgtgaaaccctccatatctggggcgctctgtgccacgggtgtcagacttttgcaaaagccctgtcattctaacgggacgccctcctgtaggaagttgccccctggcgcccgtcctccggcttctgatgaaacggcgacccaccacccccttcccagaccctggcccgcagccggatcactccgggcgcgctgccgatcacgtggcgaagcggtgctccccagcgccgtggctgcgcgcccattggtcggcggctggagtcccgggcgcgcccattggctgcggggggcgttcacgtggcagggggcctgggatggaccccggggtcccgagagctggcaggaaagttaaagggggcagcgcggccgcggggagctcgagtcccgggtgactgctggagggaggaggtgaccgcgcagctctcgtgcacggacggacttcgccgcccgcggggggcgcgaacccgagcccgggcccagctcctgccgtcacggcagctgtccctgttcccccagggcgtatgctgccgcgggctggcgcgtc

SEQ ID NO: 39928 - DNA, 2300 bp, Homo sapien
aaatcagagtgatggtttggtgggttgtacgccccagtgactttcctctctgccacattttcctgtctgttggcatctgaggacatttcaatggcttccttgaagctcttgctgtctctcctctatgttcaattttctgcctttagcacactgttcaagaatggctttgcaatcttagtgtttgttatttgctctcatcccttgaccagcctgtaatgtttccggaggtaatctgatgaattggtttgaatagctcgatttggagaatagctaacaggcagggaaagtgaggagcatgaataatggaggtagctggggcctttcattgaatcaatatatacagtgggggaggagacaggcatcaggaaacattggcccactaggaataagattgctgggtattaagttttggcattgttagaattgtgacatgaatggggaatgagaatctctttggtcttctctggctatcttggggtgtggactatcgtttattgtttcactgttaataccctatgaaaaagcaagggtcacctgtgctctgtgtggcactgcaaaatcaaattaacattgacctgagcccctgctacaggctaccaagcaaagtgtgggtgctgctgaggatactggagagcattaaacatggttgggcaagatgtaaaaggcgattggaaacaacagtggaattttgaacacaaggtgttaggtggtaaattgcgtaacgaatgcttttgaccttcagtgggtctgctgaagtcagtgtgagtgaggaggaaacaggagctggggctgtaaggatgagaggatggagatggtagagaacagaactggaacattctagctgagagtgacgttggcaaagtagaaagagctctctctaggaagtaggagatctggctgaagtgcaatggcgtgatcacggctcactgtagcctcactctcctgagcttaagggatcctcctgattcagcctctggagtgtctggggccacatgtgcacgccaccacatccagctattttaatttttttgtagacacgaggtctcactatgttacccagggtggtctcaaactcctgggctcaagcaagcctcctcccttagcttcccaaagtgctgagactgtaagtgtgaaccaccactcccagtccgagacctggcttttgacttattatacctgtgctcctgcttcctgtgtggcattgggcaatcaacacagcctttctgaatgttcacttcctcaacagtaaatggaggagttagatgactcattcattccagaaatagttttgagcatttgctctgcatcagacccggtgccacgtaccatgggtgcaaaggggagcagcataggtaagatctgtgccttccgaagagggtagagtcttctggagggacattacaaataatcaggcactcccagtgctgggagctaagttctgttacagggaagagaaagaaacaatgggaataccaaggaggatatttacagagggggaaggctttgagctgaaattgaacggtgaataaaggctgagcagccatggtgagatggggggagactcttctgaatggtgtggtggcggaagtgggggtgggggggatgcaacagtcttgttggactggaacatagagttcaaatggcggaatttcagagctttgacgctctactattaagaaggtccagcaagttctgccgtgaacagttgtgctcatagctagctgtgtgatcttgaacaagtttctttgtctccaaaacctagttttgttacaggtagataggcaagagtgggctctcccccgacgcactagaaatgtcggatgacagttccacagttatcgcattgcctctctaaaaatcataattcagcagccagggagagacaatctcctgatggtccataaccttgacattaaaagtgttaactgaatacagatcccagggagaagcagattcttgggcatgtgtgttaagagataaaatggcaaagtatgactttccggggtacacgccacaggaaaaaggaaaaagtctcaggtgggcatgcgtgtaactccctaaacgcactgcgcgtgctcaattccaaaggctaaggaaagcattgcgcatgcgggaaacccacgctgagggaagaatcatgggaaagaggtgagcctgtaaagttttaggatcaaggttaaaggcccttttttgctctcttctctcttggaccttcaggcgacggcttgggtatcttccaagcgaattttcctttctttcctgttcttttttttttttgagacggagtcttgctctgtcgc

SEQ ID NO: 39929 - DNA, 2300 bp, Homo sapien
aatattgaaaagacatcttgaagtgacagtgtttgctctggatgctctgtgcttccagtaggttcccccatgatgtcttatcttagggttaacctctctctagccactctccagggaccctgccgggttgaagggttgattttcttcagttctccagaccagccttttaaaaataaagacaagaactggatgaacagaacattaagaaaaatgtttgggaaggatgtacatggatatggagttagaaataaggccctgtgtgctgacgccagtgtattttctagattgcacttctagtcttttatatggatgtttgactctgctgtgttctctcccctctcccttctcatgtggagggagaggataatctctgaattgaccttacctaggtatggctcttgttgaatccaaggggagagtcagccatgagtggcacagcccaaggcaggacgagtgagaaccaggagacatataacttgtctacagacccggtgctcaggggaggagatcccagtgatcagagcctgcattcaggtcttacaggttggtaactcatctctttcaacgggagaagtgtaaatactacagggcaatagattatctataagtcttttaattccagaaatctaaatgaggccattaaaggcgttcagaagatccttggaaacaaggtaagacactaaaagaaagactggcttataactttaagagttgggagaatctgctgcaatgcacaatatgcaagtgtttctctaaacagagaccagcgtgctgtgctccatgatatattgacgtccgtggctgtgattcataatgactacggatttggctcttataggaatgtcttcatccagtgaagaaaataatgtgaggttatggggacctccagtcaccaacactaatgttccttaatattacagtaggccaacagaaatcagggactaataaactctagaaaaagagtagccctggtaatcaagagtggcactaaccaaatttggcaaactcaatgaaggtgtgtcagttttggaaacttctttattcaacggaatgagaatactcctaattaataaactgggtttattggattggatctgcaacctttttttttttattttttttatttttttatttttattttttggagacagagtctcgctctgtcaccaggctggagtgcagtggtgcaatcttggctcactgcaacctctgcctcccgggttcaagcgactctcctgactcagtctcctgagtagctgggactacaggtgcacaccaccatgtccagctaatttttgtatttttagtaaagatggggtttcatcatgttggctgatggtcttgatctcttgacctcatgatcggcctgcctcagcttcccaaaatgctgggattacaggcgtgagccacggcacccggcctcaacctttttcattgtggagacatgctttccagagctgatgtttagtgccatcttctgtacatcccacattgtgctgttggcactgaaaaaatatcagatccctgcttctatctgccttgctggttctccttggtgtcctgctgccatacacagtacagggcaataggcactcttcatagtaagcccaacataccctgtgtaattgccccatttgcccttaagcccagggcactgatgagttaaattctaacaatgacatgacataggaattgttcccagtgtctccattagagaagggtattgataggcattcattcaacagacttagactgggcacctactctttcccagggacactggcatatcccaaggatgctattcctcaggatgtctacataagaaacgtaaaacatttcttatcctcaagaatctcacatgtgagtcgagaagacaaatagctaatgattgctgtgctacaaacggtgtgttgtggtagagccctggatgcatgggggacacaggaacagcagctcaatctgactgaaaggcagaaaaaggcctctagaagggagatgactccagagctgagtgggaaacgcagttacaacataacaatgacttattgttacatcagctgggttagggcacaagagaaagttccgagcacagagaactgcatatgtgaaggtgtggcctcatgaaaccacagcacactgttaggagctaccagcctgtcacaagtgggtgtgaaggttgcctagaggagactaccaggagataacactgaaggggtggattaggaaagcccttgtgcaccatcttgaactttaccttgaatgcaatggagagctgtgaaagggctttaagcaaggcccag

SEQ ID NO: 39930 - DNA, 2300 bp, Homo sapien
ttggggctgtggcccttggtgcggggcctcctgagcagcccagactatcagcttcatgagagccctggggaaaatgctgattttattcttcctactttatagtctgttactcctgcagagaggtcaggaaaaatcagatttaggagaaaatgtagtttgtcacaacatccttgaatcccactaacttcaggataccagccagtcttattggtatggccagataaggtcctccatgatttgttctcaacctccctttatagtcctcatcttccatccctctcctccaggccccatcagcttctgtgaacagcttctcccttccccggtgtaccaagctcttcttttacctttgtgcctttgcctgtgcccagaaggccctttgtcctttttgtgacttggtgaaatactcatccttcaagaccctgctcaaatagtcgtccatgaagcctttctggattcacataggctgtcatttctttccactgttctttcttaatgccttgtgcaaacgtttctgatgatacataggactctccaaaagttacctgtttatgagtttatctcctctaccagtctgtgagctcctgataggcagggatggtaactactcattgttgcctcctgagcctagccttgtgcctggccatagtcatctctaagaaatgttgagacaatggagaaatgacctgaaactagatcttggaagcctttgatatcccagcaaaatgattcaatgctatcttcagtgatatccattgtagggtattcacagtgatccactggcggtcagggagaaagtattagaactactatttatggtttgtcaaaaattaacaatgaaagtaaacttttctaatattttctataaaatgacagtagcacacatatttgatttataaataaatacaaacattggccaggcatggtggctcacacctgtgatcgcagcactttgggaggccaaggcgggtggatcatgaggtcaggagttaaaggtcagcctggccaatacggtgaaaccctgtctctactaaaaaatacaaaaattagccaggcatggtggcgtacacctgtagtcccagctacttgagaggctgaggcagcagaatcaccggaacccaggaggcggaggttgcagcgagccgagatcgcctccactgtgctccagcctgagcaacagagcaagactctgtctcaaacaaacaaacaaaacacatacattaagaataggaggtgcctttgagaattgtaggctgctgttgtaagtaagtggaagccactgaaagactctgaaccgggggaaaacatgaaaaaaacaagtgttcagaagaattggtcttatagactagatggagatagagtcaccaatcaatgggcaaggcactgaaagggccatacacaagagacaaaagacgagacaagaataggagtgataggagcgggtggaaaagaagatctactaaagaatgatcatcattatctttgttagcatcgttccatcagtggaactgggtcacgtattgtcacagtaaggagaaggagaaagagccgcatggagactccaaatgcagttacagaatgagaccacaggctaaactcaaaggagaacatggaatactttgccccaggcttagagtctataagtgagactttcaaaaaccgtttttccccactggtttgaaggggcaacaaataaaggccactcctcgggcctgtccaatcccagattggggcttctcagtaaagactatttatagctctgattattgcagcaaggttatgcaactgctgcgtggggcaggcaggacagctgtcccgagcccttgccgggtgagtgaccgtctgaccgtcttctggctgcttcctgttggcttaggagacaacagaagaaggtggatttgtttgtccattgagcaacctgccattgccctgcctgtgcccgcctgtctccctttaaacattaacaatctcttaaaacatttgggttttgtgcccaaggccgaggggatcccaagagaaagaggaacagaaaaggggaggaggaggaaaagaagggagcggggaggaagggagagagagtgttccctgcgtcaacaatttattcattccacaaacatttctaagtgtccatggtgacccagacatcatgggaacttcagggttccagagctgagtagaacacaactcccatccttagggattcaccatccagtagaggagaaagacgtcgagacagaagacagaagggaaaggaaaagctcaatgctgtgccttcaacttagcttctccattttttggag

SEQ ID NO: 39931 - DNA, 2300 bp, Homo sapien
ttagtttttaaaaatctctgtccagcagagacttccttattttattgttattattattttttgtactgatagacacaacagatgcattttgaataagtctgaacatcactactttctatgagtaactgaccactgggagaccagatgagatatttcttatgcctcccattccaggaggccattatttaggggacacatggtgtgttatggatatctaacatatcatgttggatcactcccacttctcaatggttctctgctgtacatcaagaagttaagattaaaaaacagaagcatgaagaagaatgttgtggactgattttagttgcactgatgtgagttttcctatccagctacactttttgtccggtgtctactgcgaacaatggcacatttcatcacacagctggataatgttaagaattataatctgtaaccccagattagatgaaaataaatgccactcgtaatactaattatgttcctgaccttattgtatttacttactaaccccaaataaactcatctatttacttaaatgggaatattaacatcacataaatcatatttaacaatgaacacatgaaacaatttatcacctagtttaatattctgcttgactcatctaaatcttgtttctcttacagaatttccatctgtgtccactctattggaataatgctgtttctgtatacttctacaatgcctgctttactattgaacagtaggtatgaaatggagtcctcaatgggattatctcattcatggatacatcttttgatagtagaaaaacaaaagtatacataggttgggggaaagacagaaaaagcagttgctgaaaaatagcacctgatggtgagtaatggacagcaatcaggtttttgttatgttttcttgttgtttttgtgacagggtctccgccctctgtcacccaggctggagtgcagtggtgtgacctcggctcacagcaacctctgcctcccgggctcaagtgatcctcccaacagactcctgagtagctgggactacacgcatgtgccactttgcccagctaatctgtgtattttttgtagagatggagcttcgccgtgatggccaggctgatcttgaactcccgggctcaagtggcccgccggcctcggcctcccaaagtgctaggattacaggcatgagccaccgtgaccagcctagcaatcaggtttttatctgtttcgggtgtgggagaggctaagctaagccagaattcaaaagaaaggaatatattcataattagttacacttagggtgaaaaataaaatttcagagagagcagaataggaaaaaaaaatcataattttaataattcacacttattgcactattgttatttcaattttacagagaaaaacaggcatagagtgatgaaatagcaagtacatatataaacaacaaatggcagagctggaacgccaatcctagcaatctgaaccagcatttaaaaacgaggaattaaagcacatagggtgagaaaaattatagggaagggacaagagctcaaggggacacctggaaaagaaatactataatttaaaaaattaccaacgggctaattatacttgtgttttactggcagagcgctttgtctgttagctcttttaatcccgctaataattctgtgaggttggtactataagttccatttttcagacaaggacgcttaatagatgataacggacacattccctgcttgctctgatctgcatctcaacagctggctctggagcaagcaaagggagactaagggaaacagagcggagcagggcaaagaaagccgactgaaagtgagaaatgcaggaaatgtttcccatctaggcagaagctggttccagcattcaaatctctccagccggcccgccaccacgtcacaaagcccgcctctcagtgacaaagccccgccccgttcccttggctgttctctgagctcccaatacttccctccttctctttggcccctgctaccccgcctagcatcatttcctgtgcgctggatgctgattggtccgacagtcggaagtgagggcgggcggtgggggccgttgccgcagtgacagtgctaggggagtccgaagatggcggcgtcgcgtcgctctcagcatcatcaccaccatcatcaacaacagctccagcccgccccaggggcttcagcgccgccgccgccacctcctcccccactcagccctggcctggccccggggaccaccccagcctctcccacggccagcggcctggcccccttcgcctccccgcggcacggcctagcg

SEQ ID NO: 39932 - DNA, 2300 bp, Homo sapien
gcgggcgcgaggggaggggtctggagctccctccggctgcctgtcccgcaccggagcccgtggggtggggaggtgtgcagcctgtgacagacaggggcttagagatgcaaacagactcagggagagaaacagaagctgattctgtgacagaagcagatctgtgcagcacagatgcggtgtgcgtggggagggggtcgcctgggagcgcattgcggagtgcttgtgtgtgcagatttttctctgggctcaggactcattgtatgtgggtcaacaccttcctccgtgactgtgtttttgttctgagctgagttttttggtttgcccttaaaaaaataataatttggcatccagagactggcagactgcctcagggcctggactgcggatatattgtgttctgcttgaggtttggggaggagggcaggcggtaggaagggagagggggagctgtttgtcacactttgctgtagagctgagagcacctgacaagcttaaggaagtcgttgggctatgtggacaagaaggagccagctcccagcgggttcacaagctctatcggagttgaaagcgtggtcatggctctaaggagcacctcacgccctccctgtagctgttattgcagtttcaggcagagatccaggagctgcagaggaagggagaggcacaataacctacatggacccaagggagacatgtgttcctttaaaaatgtgaacagaaggaaaaacagaatgtgtgcaactgggggtctgaggaaagactgttttgaaagaggctgtcagggaatggaaagggttaagcttttcatcctgaagaacctgcttcccaaatcaggccttcctcccatcactagaccctgagcagcagctggtcctagagacccccctcgtactgcgctgccacagtctcatcccatttccagctctgtattaaccaccaagctgcagcggatggggcaagacctaagctcattaatttccaggtggaggaaatggaggaggggcaggtccctgcagtagagggaggagcagagaaaggaggccaagagctggatccttctgcccaggaagcctgctgcatcccttcccccgagcatggcagaggcctggctttgcaaggccaaggccataagggatgcttaggagattaatttgattcctgacacaataatcaagccctaagagtctccactgaagcttactgaggacttctttcctctccaaagcctcagtctagcctgctaaataaattagtattcagtgatgccttggatcagggcccctccccggcctcagtttccccaaatatttattaagtacctactgtgtgcaatccttgtgtaattattaactcttaggctcttcatttgccctcctaaagcagtgtttagagtcaggcagaggttaagtgtgttgcacctcacctagatacttccagaaccttctctgggtctgcagaatgtggcacaacctgcttgcccccgcagagagaaagctgcagtgcacatcctgcagactgcaggtgctgggctgcctctggagtcccagaaggcaagcttggctgcaggacagaaagggagaacagcttctctcacccctgagccttcacaagcccttgtctatttgccgttgccttcaaaatatacctcccccgaaaccagtagctttctgagtcctggtgtcccctccgccctttctggacaggtttgggaagaagaaagcagtcagtgctgggccttattggggtgtgaagcgccttgctctgccccttctgctcactgtgaaggccgctggatgcttctcttaggcatggtttaagcctccgattactaaaccccttgccccacaaacgtccacattgacgagcctctttttagtaactgcttccccgtaattccttcagaggttgctgtacccttcgctgatgtgctgccctcctgtaaaacctccagatgccttcccacgtaatgcccctttcagatgctttaagctgagagcttaaaccacaggtaccatggctgacgcctgccaggtttctgctgcagataatctatgatgggaggggcatattttttacttcattacttatgtaaactcttgttccagaaagctttaatgtgtgtgggagtgttctgggtctattaggtctgtgcgcatgggtgtgggcatttgcctgtgtccaccgggtgggtctcattatgaaatgtatgtttatgtagggctttaatggctgaaaatggcaaagagatgaatagaccacttggccccatgtgtaattgccaggccccttctgtgctcaaa

SEQ ID NO: 39933 - DNA, 2300 bp, Homo sapien
cttaaaaaaggagaacaaaaagccgaagaccttgtgtggccgccgggacaaagcaccttgggttcggcgagaagggacgcgcaggagcgctgaacccagaacacgcgtggccgctgcggaagggcgtccgcccggcgtgcggaacgctgagggtattcggattgtcttttatttgtccctgtggcttgctttcacagtgtctacgtaggagaggggtcggggttgttggggtctctttttttttctgggaggggtagctgaattgtgggagacctaggtggacttgacttggctttcctgctactctgcgtctccttctcaagatgcgggggttggaaaggggacaggggactcaaggcttagaaaagagaaggagccctctgctgcctggagggctaagggagtagagagtggagatggaggtgagtagggatgggccagcccgaagagcactgaggaggagaaggggtcttctcctccctcgggtccagtggatgagttttgctgggaatgagaattcgggtgtctgtcgataggagcgctgagaaattgatgagaaattgacatgtccgtgcacatgcatgaggcggcgacaggatttgtgtgtaaacagtgtggagaggtggaggagggcatgggggtgggggcttaaaatgatgtcttattgtccttttggctttagggactctcatcctctgtctcgccccctttttttgacccggggatccagccgcattatacacgagtgaccttttaaatctacgtccaccctttacctggtaaagcccgctgacagttgggggtggggtggggagagtgtaggggtgctctctccctctctccctccctccgcctctcctccctccctcccccctgcactcctctctcttcctccctcccacctccctcgctcccgccctccctgctgcattttgcatgagctatctaggtcattagcattttagcgtatgcaagacttgacaaagctgatgaggggccagatgggcctcgctcttatggtttttttttcttcttcttcttcttcttcctctctctctctctctctctgtctctctctctctcgtctctcttcctttcccccctccaccacttgggacctgagcgagaggactgcagcaggcgagttccggaaggctgaatccccaggtcccagccccggaccgcggcaactcgcccctgcggcacgcccggcccggctgcgcccccactcagcgatggaggtaaagaggcggcggccgcgcgccctgccccggctgccgctgccgagtccccgctgctctccttgtccttcgctctcttcttcctcctcctagtccccttcagtttcctgggcgaagcagagggcgacatgggtgggtgggttgctgcgctggggcgaggtggggtcgatgttgttttttcattgtctggagctgcaggggaggcgaggcgcggggaaaggggcgaggggagccggggtaattaacacgggggaggcacccctccgtctcccacttccacccacacccccatccctccaccccctccgctttgcaggaaaaagcctggatgcgaaaggatgggggagaacaaagagcctttggaagacgtcgctgttatctcattgtctgtgtgattgggggagctgcggcggggaggatgctgtggtcccttcctccggcgttccccacccccatccctctccccgctgtcagtgcgcacgcacacgcgccgctttttatttctttttcctggttttcttattccatcttctacccacccctcttcctttctttcacctttccttccttccttcctcctttccttcctcaggagaaaggcctctctctccgtgttcacagcggaccttgatttaaatgtccatacaattaaggcacgcggtgaatgccaagaatggggctggctgagcaccgtgggtcggcgagggcccgccaaggaaggagcgaccgaccgagccaggcgccctccgcagacctccgcgcagcggccgcgggcgcgaggggaggggtctggagctccctccggctgcctgtcccgcaccggagcccgtggggtggggaggtgtgcagcctgtgacagacaggggcttagagatgcaaacagactcagggagagaaacagaagctgattctgtgacagaagcagatctgtgcagcacagatgcggtgtgcgtggggagggggtcgcctgggagcgcattgcggagtgcttgtgtgtgcagatttttctctgggctcaggactcattgtatgtgggtcaacaccttcctccgtgactgt

SEQ ID NO: 39934 - DNA, 2300 bp, Homo sapien
tagtcactccgcaagagaacctcatctcccaccttcccaagttagatgtggctgtcagatcaacagcgacattagattctcatcagaggacaaaccctatcgtgaactgtgcatgtgagggatctaggctgcacacacctcatgagaagctaactaatgcctgatgatctgaggtggaacagtttcaccccgaaaccatcccccatctccccttccccatctgtggaaaaaaactgtcttccacgaaactcgtccacggtgccaaaaaggtgggggaccgctggattagggggaatgtctgaagaaaaggaagtcctagtggtgaaaaaggcaccactgaaggcaaaaatgttcaattctttcctcaaaacaccaaagaaactaatataacttttcttgcagctattctggtaaacgaaaaacccttgtttttgaaataagatatatctgttctttaaaaatgcttattcttttataattataaaagtaacagccattggaatactcgagaacgttgtaacaatacagaacacttaaaacagtttaaagacaatgaaaagcagtagaatcccactattctgaacaaaaaaaattgcatttttttcgaattgttcagtggctgtgcaactgggagtacatgcattttcatatatactacatgtatacacgcacactgcatttgttttactttttcatttaacatcaaaattaattttttttttttgagacaaggtcttgctctgttgcccgggctggagcacagcagtgtgatcatagctcactgcagcctctacctctctggctccagcgttcctcctggtgcagcctcccaagtagttgggaccacaggtgtgcgctaccacaccaccatgcccaactacttaaataccttttttttttttttttttggtaaagatggcgtctcaaactcctggcctccagcaatcctcctgcctcagcctctcaaagtgttgggattacaggagtgagccatcatgccaagtaagttatttcttcacactaaacattcttcagctcttagttgcagagtatttctagcatgtgaaacttcatacaatcaaccacaaaacacagacaaatcagtatgtatcaaaaagaagtaactgaaaaacacaaaatattgtctttgacagaatgactattttttcagacccttaatagtgaccaggccttcgcaagcctagaagggactcctgggggtgttttcatgaaaggcctgtggaaccgacttggtatagcctcatagcaataacaaacagtttaggtatcattttgtccaggggaaatacaaattacaaaatcaaagctagagcctttttagtgttgtatgcctggcaacacacctcattctacactatagcactgctaagcctcctgccctccttacagtccagaccacatgaaaacaaagtggtaactaaatccatgcaagaagctgggtgaaagcctcctttctgtgggtgctaatctgaagttccctccctcatctgagacgacctgcccattttggcagaacatgtgttaagccaaaatctcacacagatgaactcccaagtcactcacctcgctccaaccactttacatttagtttgagaatgtcacaggaacaaatgtcatctcctatgatttgagaaacaagaataatacaacaccaccattaagtccacctacactgccttaatggtgctgttggtgccttgctcccgtattttggccgctgcaaaatgggcttaaatatgtttgtaaatacataacttaatattgaattcatcttccctattccgcgcattttgagaactgtgcttagttttcactttggacgaatagcaacccttctgatggccgtcatgacaatgtctccaataaaaactgacagtctagctggctgcaaggcaggtcctcttctatcttactgggcactgctaaactgcgaagtcggggcgacacggcagcaactttaaaatcaaaccgcatccccaagggctcggcgtgttttttggcctctgcagcttcacgtacttcgtacgacaggagcgcacttgttctctgtccgagaacttcgtcccgagagaacctcaggaactcgccgggccacaccccctgtccagggaaggaacacgcccccggtgacagccggtacggccccgggtttgggcaacctcgattacgggcggcctccagccccgccagcagcgccccgcgcccgcccgcccgcgcccctgccgccccccggttccggccgcggaccccactctctgccgttccggctgcggctccgc

SEQ ID NO: 39935 - DNA, 2300 bp, Homo sapien
gctctgttctattccttctttactcttattgtcacatgttacctcttcatagattgtgtgcttttcaacataggtttataacaacagttctatgcttttgtcatttacatcagatagaaaaaagagtacatttatcccattttaaatattttagaaatgcttaaggatatttaaaaaattaaactatgttacatttattttaaaatacatttatactatttgtaaaatattcacttctgcagttacctttatacttactcctatatttcttcattgatttgatttactgtctagtgtcttttcatttcagcttggtggaaaagttcctttatttcttgtagagcaggtctgctagtaatgaactctgtttttatttggaatgtcttaatgtctccttcattttcaaagaatagttttgctgacatagaattcttggttgacagttattttcctttcagctctttgactatgttatcccactgctttctggtctccatggttttcaatgagaaatcggctgttaatcttactgaggattccttgcacgtgatgagtcgcttctccaatgctgctttcaagattctctttagtctttggctattaacaggttattggttttgaattacaaattcactgttagtctgcccacgtttcatcatccctatttgaagggacagcatgggacacttttgtcagtgctttaattcaacacttgtgatatctctgtagcattttattgatctatcaactttatggttcagtaatatgtggttttgtctttcactgttatattacttaatagaatttcagattgatatttatgtgatccgttcccataacttatttacttaatagatttgttggacagctgtatatggaaggctgtatgcaagactttgagttttcttagataaatgacacatgatcctaattgtgaagatgacacatttgattggcggagcacacaaacttaactaattactatgcaattaggatgaaggtatctatgtgcataaacgtagtagtttggaagcaaagaataggaagtcactgattttcataagtggtaaatgagcaaactgaggagattagatagattagcaatttgagaccttgagttatctaaattagaacgtggcagaatcaaggactagaagtcacttttctgggttctttctatgaaacgatgattctagaatgtggctcttttctatgttcaagcatcataggtaaaaatgatttcttaaaccaggtaagtgtgtgaagcacagactggctattttgcttcaaaaggtgtttatgttaaaaataaaagcaaacagtacttatttatgcttattatattgtattaacatgaattaagtaaacaagtgactatgctggaacttgaggtgtcaaaatatgaaaagatacttgctgttattaaattgaccttagatgttttattttcctttttattgttatttgttttatcaaaagaactcttctcccctgtacatctgtagtaaaattttgaataggtacagtttgtattagagcctccttaaaaataaagttgcagatcaatcaaaactatattcattctccataggataaagcatgacatttctgggcatacggttttaattttaatctgcatgcctccgtttctattctcccatgagtctttgcggcaggacaaggaaaagcaagtcttataaaaagaaatacagtatgtggtgcttattaaagttacatacatctcttctcacaggagaaatttgatttattgcaggttgtgcatatgtcgcatatggacatttctagggaacagattccttattgctgagcagtgaatggcttctagtactccattattgctccgggaacatgttagtaataattatgaaaggtaggataccatgaaatctgtaaggtgatttggcagaagtcgatgctgttggtgccaggatttgggtaccgtaccacggtttcctgttttcaaatgtattaattgatccgcaaaggacatcttttggagacaagaattcagacagactggcacagcctggacctccgccaagactgctcggaaggttgccatactgggagcaaaagagtgagagagagaaagagggagagagagaggcagagggagagctgaggaaagaaaaaaaggcaagacttggcacagctcagtcaaatcagcttcttttgtctgctttctcggcttgagcttcaggaaagaaaaccgtcctggggtacagaaaaactcagaactttttggttttcaaacttagaaggctttttaagtctcttgg

SEQ ID NO: 39936 - DNA, 2300 bp, Homo sapien
attctgccattccttcccatggaaaccacagtagaggctctgtccacagtttccacccccctctgctccagttcttccgcttctcttgggacctgtgaataacaaactgttaacagcagccatctctaggtctgttggccttattagacctaaataacaatacagcctattaaaacatcatgagatagatatacctaataactgacaaaatcgccattttagcttcctgatccatggagtaaagtctcctgtactcccccctctcccaatatagtgaataaaacaataccttctcttggggaatttcaaattttggtggcaccagtggcaaacccaaatgatgcaggggtgggcattgctgcctgaccctatgttgtcaccctgtttggcagatgaaatactgtttctgtctcccagtgttgtgtcatgcgtgggtttcattcacatgttctcaatgtgttcttgaaaatcattatggaaaatacttaatgagccgggcctgggcatggtggctcgcacctgtaatcccagcactttgggaggccgaggtgggcggatcacctgaggtcaggagttcgagaccagcctggccaacatggtgaaaccccgtctctactaaaaatacaaaaaaattatccaggtgtggtggttggcacctgtaatcccagctactcaggatgctgaggcaggagaatcacttgaacctgggaggcagaggttgcagcgagccaatattgcaccactgcactccagcctgggcaacaagagcgagactccatctcaagaaaaataaataaacaaaaattgaactggacagttcacttagggacatgttgcttgtttaacgtcttagagcttctgttgtgatggccatggcgtgtcattctactgcccctgttgaccctgccacccccaacttctagcagaaagtgctggtagattgccacgctctttcctgccaagcccaggcacactttcagaattcctctacaccaaggaccttgggaaggccctgccaacctatcagacttggtttccaggtgagacccagagctttccttccaggtgaaaccagaattgctgactaaagctttggatgtaatgtctcagccgggggtaagttcaccgaagagatgtcatctaaagaacagggtatcatgatgttagccacagcatggtgatcagagagcctggaacaggtgctttgctgacatctggaaattccacagaggctggtggagcgatcagctggagtgaagtgagacagacctgagggaaaatgctagctctgcctcttatagattgagtgaccctgcagaagtcacatgatcattctgaggctcagtttctttgtgtgtaaaacagcgataatcatacccatgttgcaggacttggggaagattaaatactatgcatacacacacatatatatgtgtgtgtgtgtgtgtgtatatgtatgtatgtatgtatatactttgtacagagcctgagatacagtaagtgttctctacatggtagatattattattgtcttcttgtaaaggagagaaggggattatttgctgagaactttaaaaaaatctcattcgcttttgtgagtccaccctgtccctggagtgatgagtgacattttctaaacattattagtttgtctgaatagtttataaaatttccagggaacaacattttttaacaatatgttgactctgagatgtcctttctgccccccaaattttaaatatttccatcagagaacaggctacacgttctttggaatgtgctctgagttccagctgggacattgggatactgggatgccaagaacgtgtctgcctgatgtcagcagtgggctcgaggcagatgtccctgcgcacccactagtcacttagtcggtgcatcttcacagaagataacatctctgtgggcccctctcctcccctgctgtacagtggctcttctgcgaccaagtggcccccttggaggtggaagcaaaaggaaaggctctggacggaggttccccagctccttgataacgtgtaaaaatctctggcaagtcagaggagttcattgctcacattaagagctgcttctcattgctctcttattcattcagccattagttaattaattctctcaacatgaatctattcggtcccggctgtgtgccagggtctgtgctagatgccgggggcatcatgtcagccaaacatggttgccagcctccataaaactgttctagtggggaaattagatattaaacgagcagtgtcacaactccataattaaaaacagtggatgag

SEQ ID NO: 39937 - DNA, 2300 bp, Homo sapien
agttgacagctgtgagctattctgattttagggctgataaagacaccacactacccattattaagccttatcatgtacactatactatgcccaggatttgcaagtgttatcttgcttaatcctcatagcaaccacatgagggaattactcttcttgttttccacatttagcaggtcaatatgccagatattatatactgatttttagcaccatcgctgcctttctaaatctctcaggtattgtagaggctgaaagcctaagagctgtgtttctcaggatcccagcaggcttccaatttagattctcagccaagttttaggaggcagaggaaagggagcaatcattttcccatggcagctgtgtgcaggcatgcagatttcagcagatggcagtcatgaggttttgccattaactttgggtcttctgcaaatcatcctgatactgaagataattatatcatttgcagggggttccaatgattcctgtagttcactgagctcttgtaaagaagcaaccgtttttcctgaccttgacactcaagcatttttgatggttctagaagtacccattttcaggtattaaatacctttctgtttgagatacatgattgttttctattttcctgaaagaatcctgactgatacagtatttggtactgagagtggttccaggaaatacagctgcaaagatggagggaagtctaagatgtgttgttaggcttggattagcttgaagccaataatgacctcctggctagtggaaaatgggtttctggtagtccatgacatgcaatgtcttaagttatggcctgtcattcatggaatcaattgcctgttaaaagacaccaagcacctttttgatagaatactctggtggaagagataagtacaagggttaaagttactgaatgcaatggaaaatttacagaaaaaatacagcacaaaataccccaacaatctcagggctttaaaatttcaactcagaggcataattcaaaagcattggagaagcatcaaagaagcttctacaactgcccctgaaagaatctcttatcgtagcagaaattgaacccagggttgttcctacaagttggcagaattacaacctaacttgaattcacagcctctttaggtgcttccatgaaaggtgattaatggggaaggactgcgaccaggagtattgcactgagaaacttgggtatgttaagatgaatcaacgtacttcacaaccttaaagtccactgagtttcccttcctttcctttctgggaacctagtcccttcttgcttgaagactttgtaaagactcacctgaagaaaatacttacccagggaatgctgattctcccatagcccactaccccccatcacctctcacagcagtcattacagtcatcccagtagaattcatagaaatcagttcaaatctgacccaggagaagatagaaaacattaaaataactgcaacattcttctaacatatatttgtagaaatctgatgattatgtccaagaatggattctaagggacttagaatttgatttgactgggccaaatttatcagtctaggtgcacttaagagaaactttgaattcagtggtttacctagagcagctggaagtggctctatttggttgaagaactaaaaccttggaccaaaaaaatggcctccgttaaacagaattgctttccagaatataaaagaaggaatccaaagtcttagataagaatgccagaatggatttattgtgacctgctcccccatcctctaactctagtttatgagattcctgaggatgctttgttatatcaggcatcgaaaaatacatttccaaggagagcaccagcatccttggaaggccctgctgtggccatcgtctgtaggctgggggtgatgtagcacatacccatctggtggaaaactgatcacagttgacccattccctcatggagtagtcagcaattttccatcacagtagtagatatttatttattctgtctatggatgtgtctccgaggcccacaaggcctttgctgcctcatcacacaaaacttccccaaatgcctgattattcatcacaatggttttgcatttggcattacttcttacaaactgattaaaacgcgacagattaaaatgcaacagacctgaagcaatgcactcggtgcccatgggattcacggatcttcccataggtcctaccagccagaagcagcatgcctgattgatagaacagtggaatggcccaatgaaggttatgcaactgagcctgttgagatctcatgacatgtgaggatggag

SEQ ID NO: 39938 - DNA, 2300 bp, Homo sapien
ggatggcgctctctggagttgtgcagagctcagcatgtgaggctgggatgtctccatccagaagatgggacatggtgcaacccagcatcgctgtgaagatttgcaaagcaatgctggacagtgaatgagtatttcacaagaatagacctaagtcatgttcttgggagggatggagactctacagtgtggtcttcagcaggaaatcaatctttctggaggtgatggatgattttgttcagatacttctattgaaaatgagcagcagtttgcagtggatatgcccgtgccccctgtctctccatctgtgagattagctgtcatcttccattccctcatcagacctggagcccagactcctcctcccctccacaccctacccccagaaccaatagaaactgagcgaaggagaaagcactggcatatagcagatgcatgagtagcaggtccagtggggacctgagcccaaaggaggggaagaggaaagccagggagctccctattagccaccctgagggccaaggagtgagactaagtggtgagaccagggccaggtgcctgggtgtgctgtgggctcctgtcccacatgccagtcaggaagtcctggcctccatcagggccaggcatcccctgttgaaaagacgggtgaggcatggtttagagcaggtggggagggcaccacccagggccactcaacaggctgtggctcagcctcggaggggatgcctgagcagtgaggagcaaccttcgccagggagctgccttgggagaaagagcagagaagtcctggaatctcctccctgggcagtagctcgagctacacccatgagaggccacctcgacagtcatgtgatctcactttaagcctcacagtaacctgcacgccagtgagcatcgtgtttctctgttgcagatgagaaaaccgaggaggtaagactgggcaggtagacacgcaggcactttggcgattgagcccataagtcacttccaaccacgaggctcagcctgtggccaggaaggcagtgcccaggctgcttgggtaagtccacttgggtcagcgcgctgaggggtgtggaagttttaaaaatacacaaggttcaaagcccgtgactgagtcactgacatccagggagggcacacaccagcaacctccatccgaggctggtcatttcatcttgaatgcacaggggcccatcaggagacttggggccacgtgggatccatctagaaggtggtcggaggaggattgggacccgccatgctgggcacgaggggaagccagaacctctcaacctgacctgtgcggccacacctgaggccctgggtcagagtcctgagcagagaactaagcgggcagctgtaccccacagggtgctggtgctggcagaggcctccaggcgtccccgggccccaccccattcccgagggtccaggctggaagcccttcccccatatcttactcccacattcacagagaagcctcaaaaaatgtttgggggtgacaatggctgaaagcatcagtgtgcccaccaagggctcaatgatttggtttggctgtgtccccaccctaatctcatcttgaattgtagctcccataattcccacgcgttgtgggaaggacccggtaggagatgcttgaattttgggggcagtttcccgcatactgctctcttggtagtgaatcagtctcacaagatctgatggttttataaggggcttcccatttcacatggctctcattctctcttatctgccgacatggaagacatgccttttgccctccaccatgattgtgaggcctccccagcaacctggaactgtgagtccattaaacctctttttctttataagttacccagtctcaggtatggctttatcagcaacactcaggaagctgggtggtgcccaggtcagagagaagggaacctgggataagaaaggctctgagatgaggtgcctctgtgcagccgtcccggaaacaaagcagccagaaaagaagtcttcgtggctacagtctgagttcttggctccacagcccattgtgacatcacttgggggctctggatctgagctggaggctctcagcctcactgcctcagccctggcctctgtcacccccgggcccacagcacagcccagggccatgctcctgttctcagtgttgctgctcctgtccctggtcacgggaactcagctcggtccacggactcctctcccagaggctggagtggctatcctaggcagggctaggggagcccaccgccctcagccccctcatccccccagcccagtcagtggtgagt

SEQ ID NO: 39939 - DNA, 2300 bp, Homo sapien
atcatcagatgcacacatgtgctgccttccagacacccggagtggagtcattcaatcagggaatcagcccacaagcatgttgccctctccatctggagcttacattctggtaccagagtcaggcaaaagggactgataatgtaggagttgatgtaacgaggatgcaatgaagaaatataaagcagggtaggaaataaggagtcaccaggatgggaggggctgttatagacacaggtcagggaaggccactctgaagaagggattcttgggcgtagggaggaagtgagccaggtagctgcctggggaagaatatttcaggcagagagccacatggcgcagtggtgagagcaccagctctgttgccagccggcctggggctcatatcatagttcagtcactgactagttgtgtgacgctgggcaaactacttaacctctctgtacgtcagttgtctcaattacaaagtgaggatgaaaataagagggcctacctcaatagggcagttatgataaccaagtgaatcggtgcttgcaaagtgcttgcaacagtgcctgacgcacagtaagcatcatatgtaaataaaatcagagaggaagtgtggatccacaagtaccgaataggccgggcatggtggctcacgcctgtaatcccagcactttgggaggccgaggcgggcagatcatctgaggttaggagctctagaccagcctgaccaacatacagtgaaaccctgtctctactaaaaaatacaaaaactgtagtcccagctacttgggaagctgaggcaggaggcaggaggattgcttgaacctgggaggcagaggttgcagtgagccgagatggtgccactgcactccagcctgggcgatagagcaagacttcgtctctcaaaaaaaaaaaaaaaaaaagtcccgaagagagcctttatgcattgctgagagcagaaggctctggatgcacattgctaagttctcactcccgtatttttttaaaccaaaaatgaccaccacagggtcacccaaacaacaaaacactcacagcttctgttgagctgatggttggaaaataagcagcaagaaagagacaagattagggtcttgggctttttagagtcaaactcatgccttgttccagaacacaaggcagacagtcaagtcagcaaatattcacggagcatctcctcttcctggggcgaggagctggacccggcctctgtccggaaggggcatttcctgcctcagcacaggcgctacagctttgctctcagtcccctaagtaaaggagctgctcagccttgactagcctacaacagccagggctttccggtagattctggcactttctatgccccaccccttgtggtttcttagggctgctgaaatgaatgaccacacacctggcggcttaaacaacacaaatgtcttatcctacagtactgtgggacagagctccagcaaaggccttctggggctgaattcagggtgcagcaggtctgcgttcctactggacgctctaggggaaaattatttgcctttccacttccagcttctagaaacttctctgggcccctgccttcatcttcaaagccagctatgttgcgtctctttgcctttcctctgcagtcacttctccctctgcctgacttcctgcttccctccacccctctcaagggcctcagtgattccactggcccctcagaaaagccagcatcacgttcccactctgagggcagtgcttagcaacccaaattccatctccaaagcccccctttccttgcaagctaaaatattcgcaggttctggggacatggcccattggaacttggacctctttgggggctattgtcctgcccaccacggggggttagccttggacactgttttcttccgatttctcctggacgagagcagaaacaagctcagtgaagtgactctcctgaggtcacaaatgctggatagagtcagagccaatgcttctgactctatctgttgctgagctctgtgtagacaaaataaaccatctgccggctgatgtcacaagggctgccccgctcggcagcctcagtgagctcctctctagaatggggatgaggatatccacttggaagcctgctcctcccagcccggtccccagctcacactggatgctgactaagtgtttccccttttcctttccactctctttctttccaccagaatgtggtgacagatctattttcgagggaagaactcggtattccagaatcacaggggggatggaggcggaggtgggtgagtttccgtggcaggtgagtattcagg

SEQ ID NO: 39940 - DNA, 2300 bp, Homo sapien
cagcttctgtgtcttaaaggtgtggaggagcccagccagcctgtggtctcagtcctactcactgctttgtgtttttcttctaattttgggcaatagagatgtttgccttttggggagtgtagggggaaaccctagttatatctttttattgttcctttgtttcatttggtccctcatggctatgaaatcggagcagagggtataaattcatgcacagatattctgcttcatctggatcaaaatgccctctccttttcatccttcaggagtgatgtcctccttcccatcatgatagtctttctagctttggaatatttatagcacttactgtcaataatagtcactttgcatattctgctttcagccacttggaagggttgtcaaagtctaggattggtattttactttaactggcttatcttttgtggctacaatttgatgttggcttctctgaggtttctttgcatattcagtagtggctaagagggcaggtggaacatagtaggtatttgggaaacattgagccatgaatctcttgttggttggtacaaagacctctgaggctcaggttcaaaagttctagctaccgtcttgcagctttgaatcattgaagtaggttttctgtagtacaaaggctatttgactatgcaactcacaaaatcagagatgttacacttggtcattcttcgaggtaagggagccctgggtgctgattgcctggggacagttgcggtttactcctgtcttccagatgaaattgataatgtcttgtttcactccccaaagtgccttggtttagctgataaaatatgcggtaaccccactttgaggccactaagtatactctcctttataagtgtggacattgaacaaattatattttccctttacttacaatgtttccccacattcccctggggaaaagaagctagtgaaatgttttattgcaactctgtgcttattcatggatttggatgaactggcatttactgaatagcaatgactgctgtacactttgcaggtaggtgctcactacatgtgaaccaaacgtacatcatctgaaatgcctttgcgctactcgtattctgtgctctgcatgaagcatctggactttggctgatcactactgtgtttgacgatgcttatgctaacttattaaaattacctgggcaagcctatctttcacctacagtgtgatctgcaccccagagccaacatccacacacatctgatcactgggactgacctgctgtgtctgtcagccagaagcaaggcttaagtgatttcatttgtggaactgatcagttcaatgcggactacacatacactaaatcttcgcctcttgatggcaacacaccctgagtccccatgacttccacaggctgcccttccacctagttaatttccagggaggaaactgccaggctggaggtcacagtttgtcccctgcctccaggcagccctgcacttaaacaagtgtattctaaacaaacaaaaaacaaatttccagccctccgagagagttgatttgaacattccaggctcctgtggctccccataggcactgccaacctaaaaccaaaatgatccattttgtctgaaatgaagaaggaggacccttcgaggggaagctgctgttcggctttggtggagaaaatggctgaggacgggttgacttctcagctgcttctttcgggcctccacgtgctgcctcctgcccgatgcaataccatcatgtttccttctctgctttcttccgggagatggaaaacagttccccacctttcccctggtgtcccccactcaggacctggtgttcctgcccagtaccacggtgggcggggcgctcccccaatcctgcaggcctgtcatggcccacccagacaactggaacagggtgggagctgctggtgctcagagggctcccctgcaagcccccaggctgtgtttaacagtcttgacaagtgtacccttgggcagagggccaggaacaatccgtgtaaccccattaagctaattatcctctctgcagatggcctcccgcactaatcctcttgggtttgccataatccagctccctctggggagagtggccagggtggcaggtctctgtgcaaatggaccatctgttggagctcaggaggctgggctcctgcccaagggactggggcctcaggctctcaggccaaggagagtggccccgaggactgtccggaggagggtggccagccctgctgcccagagggactgagccactggcagggaaggaggcggtgttccccctggcctgactttcctcc

SEQ ID NO: 39941 - DNA, 2300 bp, Homo sapien
ccagagcttcaaggcagctggaaaggagtgagggtgaggagtcaagaatgaggtccagtccatcaggtgtggtggctcacgcctgtaatccaagagcttcaggaggccaaggcagggggatggcttgaggctaggagtttgggaccagcctgggcaacatagtgagaccccatctctacaaaaaaaatattaagaataattatccaggcgtggtgggtgttcaccggtagtcccagacactcgggaggctgaggcaggaggatcacttgaggccaagagttggaggctgcagtgagccatgatcatgccactgcatggcttgagcagtggagggcacctgatcagccagggttgaagagggatctggagggttttccagaagaactaattttcgtagaggctgagtttggtggtgtcagttaagagtcggccaggtggggggatttagaagtgcatttagggaggaccctgagaatggatgaacaacaggcaagcagaaccaggggtcagggaggcgttcctgacagcgccgtgccagcacctggcccccgcctaccttaagcagacgtgagatttctcagtcatgtgagacagcacattcgcatttggcctaaggtcaggctgagtctctgacaattgcagcaaaaagcgctgtactaatactgactctgagaaaatggagcaggataggacacgggatgagaaggggctctagccttggggtatggagacccatcccagctgcatcctggggaggtcccggggccacagacttgggaaggactcgagtgaggggctccacctgagggccaaggcatggtgtcagcctgggggacacccctagcactgcattcaggacagcccctgccagaggagcctggacatggagacccccttctgaccccggatcaggactcctgccagcgacacaccccaaacactcagaagcccccgaggacccctggacaccccacaggcggcgcaggtccgcaggtatccgttctttggggagaggtgtggtgagtcgcacactccaagacagagaggggtgaacaccgccactgcgtaaatgtgtgagtcattttctgtggatggacattgaagtcacgtggttggataaagtcattgaagactaggtggccaggaagggcagtgagggccctgaaatatcaccatcacgacgggaggaaggtgggcgggtccttgacgcagtcacgtggctgaaggaggatgacggttcaggatggccagagcctcttccaagacaaccccctggggaaatggggtgacctggggagccaggggtcctgggcagctgcccaccaaccctggcgagtaggaccaggctttcctcactgggactctgggcagtgaggcagaggaaggaaggacttgcctcccaggcaaccggtgggtgccagtgacttccaggacagagaagagcaaggctggcccggagaaggagcgaacccctcccaatcgccgccttcaggggcttgggcactgcacttggggacacccctgaagaactgtttgctctaccccaaagcaaagtcatgacaccagaaacagagccatggatgctactggccagtggaggaggtcggggaggccagaccctaataggaggagtcagggaggacgtggaggcagcaagcccgggcagtcctttccgtggagacaaacaccccgacctgtcggcaggcaggaggcatgaggctacagtcagaagaacatgaggatgacgggcagcatgtgtgcatgcgtgtgcgcgcgcatgcatgtgtgtgtgcacgtgtgtgtacatgtgtgtgcctccgtgtgtgcatgtgtctatgtgtgtgcaagagtgtgtgtgtgtgtgtgtgtgtgtgtgtgtgtgtgtttatgggaagcctcagaatgctcacttcctgaaggagaacaggttatgagggagaggcaagggggggttcctgtccctgagcaggtgcaggtgaccaggcccagcgcatcgcaggaggggccgggaggagagaagcctgggagaagccattcgtgacctaacaaagctggcactggccacccccagggttccggaaactctgagtcagtctggctccgtctcctggcaaccagatgcaggggccatggcactcttaacaccccagggagtgaaagaagtcttccaacttcaggtgaaggaagagaaaatgtggcttttaaacagaaactggctcatcctgggcacatagggaggtgggcactggaagcgcctcttcaggagaccccggggcagccaccccggctcagcacagcac

SEQ ID NO: 39942 - DNA, 2300 bp, Homo sapien
cacacagccgtcgcagggtgagcctcaggtgctgtgcatggctgggctggagccacagttactgcatccaggcagggaacacctcccacgacaccatctccatcctgcctcagctgccctgggctgctgccacaccttctgtcaccaggccatggcaaggggcccccagacacctggcctggccttgttcccatgcataactggccgtggccccgcctcctaggaactctgccctgccttgcccacatcacccgatccctccacccctccaccctgggtgttggactggacgggatggggcaagaggccgctgtcatctgagcccaaccttgtggatcctcatgtaaccctggcactcaggagcgccctccctgccaggctgggcctggtgtgaggctgctgctggtctcctgtgggaggcaggggctcggtgccccatggactcccaaattccatgctttgaatcctaacatgactgtccgccctagactgtcaccccatcactcactggctatgaccctgagtctcccctgtcccatccggctagagagatgatgcttccaaaagatctaacgacgtttcctttttacttaaaaagttttatctgtccaatcctgccaataagataaagcttaaacttcacagggggacattcaaggccttttataatccagtcccaacttacctggccctcgtcaccttatgcagtcccgatgacacactgtgtgttccaggcatggccaatttccaaataggatatgttgcctcataccccagtgcttttgcataagctgttccctctggaatacctttccccacaccttttctccgtgggttcctgctccggtctcaggacccagcacagtgttccccctctcaaagagcctttgcaacagccctccacccactcaagcctacccacgcccggtccccagccatgtagtttgcaggcccattttctgtaccttctcacaagcctctcacatagctctcacagtgtcatgatgcaagctctgtttttaagtctgtctcctcccactagtctggaaatgtatttatctgggaaaggcattttatatatctttcacgccatggggcctgccaggcacatagtaggtgtccaatcaatgcttgttggagggttgaatagctacccagggtgcaaacactgactggtccaccctctgctcagcctgtgatcttagaccatttgtttcatttctctgtggctcaatttttctgtctgtaaattggtcctgcttttggccaagaggtttcagattacggtgatagaagcaacaggaatggcttaggagagggccgagggtgagatgttaattcctaatacaattgactctcgatgatccctggaaaagtttaattcttcactggatccctgccacttcctgggctgtgtccgtaccccaccctttccatcagtcaggaatgctatttgtaacactgtcctcaccaaagtgtgtgattaggaagaaaatatgtgacacatatggacacacacacacttcacaaaatctggctctcctgttgaccccattgggacaggtcctggtggggctgacactgatgattcatgttaggatttatctcagtaaggagtaggctgctcactctatagtaataagggtgctaagttctctctggaagtaaagtggcccttcggtcagttattcttccaagcccaattacaaaccttttattttaaacatgtcgtgtaggtacacgtaggagacttgtaagtacagagacacaacgaagagaaagcgtgcagcgggagattcccctatcgtctcactgtgcaaaggcatcttttgtcagtatcttgttgtactgcttctagatttttttttccagatgtgtgtgctcatgtaaataactttcttttagaatgttgggtttgcattgttttggaaacttacttgcttttttttttttttttttttttttttgaggtgagagggtgtgatggttatattgaatgtcaacttgatggattgaaggatacaaagtattgttcctgggtgtgtctgtgagggtgttgccaaaggagatgaacatttgagtcagtgggctggggaaggcagatccatccttaatctggtgggcaccatctaatcagctgccagcacatataaagcaggcagagaaacgtgaaaaggagagatgggcctagccccccagcctacatctttctcccgtgctggatgcttcctgccctcaaacatcggactccaagttcttcagttttgggactcggactgcctctccttactcctcagcct

SEQ ID NO: 39943 - DNA, 2300 bp, Homo sapien
gagattctcacttaggttaacaaatacctattccttacctctgaaggtcgaatagaaccctgctggatgactgaggccagaatgctagcatctgcttgcaacacatatacgcacacccagacacatgcatgcacacacatatacatgcaaaccgtcacttccagccagccatcttttggggacccttgacggtgccagggcacctgcttagccacagatctccatgcagaagccattccctgcactttccagagtctctattttcttcagtataaaataaagatattgtgacactctccagctccaaactctctctttaaaaattattccatgcttgcaacccactggtgctaatatgctggctgcgcttgatcttctattcaccattgcttgcttgtctgttgcttttcaagttcccggagcatcttccctcatctatcagtgtgcactgcacacccttctgcagtggtttctaggggtggggggcttctggaccccttgggttgctttgctacctcctaaggtgggctcaggattctacaactttaacatgttctaccatgatgctaatgtgtcctgaagtttgagacccgctagcctagaggttaaggcctaaggaaagggccctgtgttccactcagcacattctgcacagggccaggtgcagagccgtgcacacagcagccctcagtgcctccgttgactggctccttgggccaggggctcagagccaggggagggcaatgattaagggcattgtaccaattgggagaaaatttatagaaattccatggagctttcaattaacatcattagctgtcactcaaaagggcaacttgaaagtgttaggagctgcagattcagggctggtcgtcagttcccagcctgtggctgaggctacaaagctgtggcaagtgacccaagatgcaggtgcaccccatactctgtctgtggtctcaatataaaatgtggccgtagcttttaaatgtacctggatgttatataactaataaaatacgtgttcatttaaaaatgctaccaaaggtctactgctctttatgcactttctcattcataatatattttaaataccagtgtgactaggtcacatttttaatgttaaggtttggaaggtttatagtggaaaaagttgagactcgcatatccagccttttcctctcaggtcagaaaggaaagagctgagaaggaaatgtcacacaggtggaggggatcatcctgctgccccctactaacaggtgcacaagtccatattgtgaaaagcaccagtgttgcggtttccctcacccagtgccaggagctacatggctcagcaggaaggaatctgtgtcttttctgcagaatgaactgtaacctcctgaagctgaagtgcaggccccgatggggaccaactcgcaggaagcatctgtctcctgtgtccctgtccctgcccctttcctgggagcaggcttccccaactctgcagagccatgctcctctctcctccccattccctggcccaggcctgcacagaattcctcctctgtcacggtcacagcaggggcttgcttccccctgttggcagggtcaacaggcacagtgcccacggtccgtggaaaaaaaagtttggggatccacaacaaacatattttcacttcttttaaaatctgaagaaaaatataaacttacaggttaaataaaatgttttattattgtacatattaacacatttgtctttatgccaacactgtgtaaaatacaaatgttactatttttgttgagggaaaaggccccagaaggccccagaccactaaggcgagttggtgcagccggccaccaggctgggcccttggcaaccagcactccatcaactgctttgcacagcagctaaaccgcaggagggctcggcctgggaccccctctgcgggcctgcggctttagccagcagaaagaggggcgtcagtcctatccccaaagttccgcctcgggaaagagccctgagctctgaactccgacgaaaaaaggaagggctctgttccggaccgggtggggtttgggaagggtagagccggcctcgggtgcccttcttacagggcctgtctcccgctgcgtgcaccaagtgctttgaaagtttttcgcggattaaaacgaataaaaacctcgtcgaaaggcaaagaaggcagggttgaaaagtactcagctcgacaccggagaaaaaagaaacccccataggaactccggttgttcgggtgtgtcctaacagcctcactctggacctcttggacctggtgagtccgtgtccc

SEQ ID NO: 39944 - DNA, 2300 bp, Homo sapien
aagtgtcggggacgagctcttcccgggatcctccgccgccgctcaatccccccgtgggaccctctttctcccctttctcaaatagctcccttctcctggccgggcgcggccctggatcccacgaggcgcactctggcctaagggttttgctggaggcatatgcgggaaaggggttggccagtggaaatggcctgggctttgcagggttgggaagtccgcctagatggaggacgcactctctgcaaacggccccaggtgggtcccccgccgcttcgcctctggttccaggatgctgccccagcggtgggcaccctgttctctgctcgagctgcgcagcgcgcgccccgccccacacccttgtattcccggcccaccagtgcagcggttggggcgcaccggcctagggtgctgctactgaatcctggctggaaaagaggggcaaacccagccatctcttttgtgcggaaagctaattctcggatgaaaattgtccccggctctagaggtaaaaattaggacgtgaacacagagacgctgcagttcaccttacacttgccgggtcttagccgtcgggcccgttgcatgttgcatgcaaggcatcggtcgctgcgcgcggggacattgaaatccggactcaggctcacgggcttcatgcctagagttatattaacatcaagcatcacaggcagggttggagctttctctgcatttatctcaccgaatcttcacaacagccccggaaagtcagtcttatcattgtcccgtgttaggattaggaaaagagatccagagagatgtgacttgtccagagtcgcgcgttcagtcacctgaacactaaggttctgactccggaccccacggcacccccgcacccccacaacgctgcctccttccaggatcacctctgtggagccccgcacatgggtggcgctcagtaaattttaaattccaggatctagtcaaacctgccgactttcattcagtaggtgtctgagctatatttgctcactcattctgcaggccttgagcgcctactgtgtgccggcgcttatatgagagcgcgggaacagagctcctcacagggggccgggtgacaggggagctgcggtgagcgcggccgagagatggccgtgagctcccagcctgcagtccccaggctgcacgtgggcccggcgcgcacggtcggtctacaccagggtgtgcagatgagggaaactgggggagttcgcaggtcgcagcgcagccagggggggacgcgagagggcgggagcgactccactcggagaagcgggactgccaatcggaggaagaaagaaaaaatataaggagaaaattcagggtgagaagagccagaagtgagggagctggaggcctggacccggagactgggtgcgggtggagtgagaggagaaatcaatcaggtggctgagaaccagaacgacggcctcgccctcctgagagccaggggcggcgggggcgtcgaggggtcttgggtgagcactgcacagaacccgaggcgggatgcggcccccagccccggctccggccggcctctgtggcggcccaagttgactggggctgcggtggccgaagcccggtcattttcgaaaggaatggcagtcggagtattaagaacggctgctctgaggggttcatggtcaatgtctctcacacccaggcgggctcggcgaaacctggttgggttgattttctgaggccacacgcgcagggagggcggtggagtctggcccgggcaggcaggggctggagcgggcctccagcgcctgccttgcgtctctgcggcacctgcgggtccagggcagggggcgggaggcggcccggggcagccgggcgcagatccccgggcgggccctggcggcggaggggcgggccgggggcaggcgcggggaggaggccctccctcactccctccctccgtcctcctcccggcaggtcggagcggggacccggcggcggcccgggacgcagggaggggacccgcgccgacaccgagggaggggccgcgccgccttggagagtcattggaggacgcggccgcccgaagctgataaatcaggggccgggtcgcggctgcgggccaagttggacgccccgacccgtgcgagggccaggtccgcgcctgccccgccaggcgaagcgaggcgacccgcgtgcggccatggcttcgctgctgggagcctacccttggcccgagggtctcgagtgcccggccctggacgccgagctgtcggatggacaatcgccgccggccgtcccccggcccccgggggacaagggct

SEQ ID NO: 39945 - DNA, 2300 bp, Homo sapien
gaccagcctgggaaacatagggatatcctgtctctacaaaaaataaaaataaaaaaatttagctggatgttgtggcacatgcccgtagtcatagctacctaggacactcaggtgggaggactgcttaagtcagagaggcagaggctgcagtaagccatggtcacactattatgctccagcacggacaacatagtgaggccctgtctcaaaaaaaaaaaaaaaaggcagaatctcagactcaccctaggcctgctgaaccagatgtgcattttaacatgatctctgggtgactggcgtgcacagtcatgtctgtgaagtattgcccaagggagtctgctgagacactgaaggacaagatggaatgggttacattggatcaccttcttttaacaagtgcaatttccactccagctggccagttaaaatacaaacaagattctgtaattttttttaaatcccaaacttaataatattctttttcagtagatgatctccattaatatttcatagccatatagaatgctggggttgaaacaaaataggaaaccatcctgcattcaccaaaaggcagagtcccttctacaatattcctctgtggcctctaactgagcgtttccaggagacacctcattgtaacagaagatccaacgataactaaccatttaccacctgaaccatggcaacaggccataaatgtctgcttcgatcttcttgaccatcttagagacaaaattacctttctgaaatcatataccaacacaggaggtgcttgaaaaactctgatttccgactaattcagtattctccattctatataactaccttccactctctctggcataatccaatagatctgctaattatcctaagatttttgtgatcctgccttcctgagtccagtgccctacttttaaccttgttccctatgtcacaatgtcacagctttcctgccttggctgggaaaattccattcacttgcctcccctcaccccctcagtattcactgatagctataagcatccttttgtgtttcttctaacttttatgaaactagggtttacctttttcatccagattcctagttaaagggagaatttcattgtaaacaagaatctagtccttcaattgcttttcttggcacctgagtggtgctctttttaccttccttttatgtaggaaaggcttctgtgtgcactgtcacctgaagtttactggagagtcactcacccaaaaacatgtctttaccatacttaaaagtgttatagctaagagcttattagaactcccctggagacagggatacttgaattaaattttgcaaacatctatggagccttaccatactcacattattttgcgaggtgctggtacgaatacagaaatggatataataaaggcaaccttccagtgtgtgcactgtggtggagaaaataaataaaacctttgccttgttgaaggcatcccattatttaaagaggtaacattttccccacaactattttgtgtggggtcccacaaaaaaaccgatagatagcagacctatcttctgatatctatctactatctatctatcatctatctatctatctatttatctatcatccatttgtttatctatctcagaaagcagaggtagggtacgaggaagagatgggacattacaatgcaaagtcctcccctccagccaagtttttcaaactccttgtccatacaacatccatgaccctaagttcagctctttacacatttcttttccccgtgaggctgagctgcttgagggcaggtcacgtctttccactacccttcttgccggcacctagggcttcctgatggagaccctacaggtaatccacgtgagcttatgctccgcggcagacacgcccaggcgggctttactcacatcaatagcttagtacgcacactccctctagccaatgagcgaatacgtactcctttctccacctcccgcagggcggccaccgccccctcagtccctctttctcccgtcacctccccaggttgccccgccctgctccgccccctcgccgccgcgtgctcgaggagcgagtcgcgcgctactgacgtcaccagcacgcgccccgtccgctgcagtccgccggcgagggagttacgcacgtcctgattctcctggagtctccagcccgcccagtggccgcagtcacccaggtccagaggcggcggtatcacaggctctccgacatgtctatgctggctgaacgtgagtgtcggaagcggaggcccgacccaggcgcgttggtgaagatgccgggtgacgcgca

SEQ ID NO: 39946 - DNA, 2300 bp, Homo sapien
agtgctcgcagcatcccctctccccccttggacatctggacttgctcagaggaaatgcatgtcttaaaaggcgcaaactattctggttcaagattaccctgattttcttcttgctgggatctcaagtcatctcttcagccaggtacttctgcacagcttttgaaagaaggcagatttggaaagcaatatctctgggaaatagaggtgaatctctggcacagggttcgtttgttctccctaaaggagtcagaatcatggacttctttttttcccctgggcacacaggactttgccattctatatttttccaacccagactcagagagacacatctcccccactcccaatgctaggaaccagcatacacagaaggtattagaagcacctagacagatttttccagagtctgtgttttggcagacatttgccttttggcagaatagtgtacctatccacagtgagccattcccccctccgcaaatctggagatacagccagtcctctgaagtcttgggcttattggctgtgcagtgaaacgttaatcctgatggccagccaggtggaaaccaggactgtggtgcctctgcctctctgactcttcacagttaagagctcagagtgctttacaaacatcttgtttctcgtggccactgcacacctccgtgatatgcctggccatgggcactgatcatgtcactgtctgctgctggtgggcatctttcaagatcttttgaaattttcattaggttctaatgcactttttactttccctgagttgaggttgaccgcaaaagggcaggattccacaaagatgtggcagacactactgctctcctgtttggctctttcagggcagaatctagatggggcattgcggacatgctgacattggtcaggagtcccaaggaacttgctagaaaatgtactcaccattccccaggaacaaggttggccctctttggatgaaaggctggcagagcccttcatgatcctagaattcagcccctacctcatgtcttttccagactgatatcagttctccaggaccatagactacaaatgtcaggaaggtctcagagcatgtggagtcccatctcctctctgtacagatgaggaaactgaagcccagagagagatgaagtgatttacccaaagaaacccagctcaaaaggagcagagaccccctcagaccctgcttcctgatgctcctttgtccccctccttacttataaccagcagctcagaatccttttaatttgtgaaattcagatatcattcccaaactctcatgtttgatagaagtccctaagtttcttttcccaatgattatggtcaatgtgaacatcccaacccagccccgtgttagccaagggaagagggtttggatttaggatgtgaaatgagctaatgtctcattaacctatatttttgaggggtaaggaagaacaatgaaaataaggaacagcagaatctaaacctataaactgcccttactaaatctcctgtgagaacagcttttttctaaaaaatctcagtggtccatccatccacccagtgaccctacctgttgttcagccatcccaactttcctggacgtcttccattccagaggcatctgatttctccaggaagtcccttttagcagagcccgtttcaggaaaccgtcaactttttaatccaagcaggtgttcataatgtttgttatgaattccttttattgtacctctctctgcttttatctcaattgagccaccagaagccaaagcgtgttttcctcatgcgaaatagtagaccaggaacgtcttgcggtgtcattcttctaaaaaatggctgttggcctcctgacctcaccttcccctttatacgagcctggaggcacctggcttagctggtgcgttttcctttgggaggactctttgaggtttgtcccccaaagcttacaaagatatagtctagaatgtgtttttatttgaatttttgtggttttatttgaattttcaaaataaactctgtaatttgctactgaggcccttgattctttgttatccctgagaagggcccagtgagtccctactcctttccccagcttccagttcctaacagtctctttctaattaaatagatcctttttttattccaattagattatggtgctgtttctcaaagagaccaagtccctgagttgaagatctttaaagggctttattcctttaaaaaggtgccattccagccctttccagctctcacctccccactcccttataagtgacaccgcctttccccaccaggccctgactcag

SEQ ID NO: 39947 - DNA, 2300 bp, Homo sapien
ggtaggcagttgctactttttgtaaacatcaggataataaaccacctggtcaatatatctttgtcccaccggagctttattttttatttatttatttatttatttttgagatggactctcactgtgtcgcctaggctgaagtgcagtggcgtcatgatctcggctcactgcaacctccgcctcctgggttcaagtgattcttctgcctcagcctcttaagtagctggtattgcaggtgtgcgccaacatgcccggttaatttttgtatttttagtagagatgaggtttcaccatgtttgtcaggctggtctcgaactcctgacctcatgatccacctgcctcagcctcccaaagtgctgggattacaggcgtgagccaccacgcccggccccacaggagctttttaacatagacttgagcatttcactgccccagcccaagactcccagggctcctcataactcccagacttcgctccatctctgcagctcagggctcagtggacaaggtcctcatgttctagtcctgctgtcgctgctctgctcactcactcttgtgatgccccaggacccactactccacagccacccgcccttccttcgccactctctgcttttgcacctgctgtctcctctccttgaagtatatggccatccctcttcccaccaggagaacttgaaagccctctggacggttcacctggactcttttctcccttgggaaccttttgctctcatcacaggcagaattaaccacacccttctctgtcctccatacatatgcctgttagagcatttattatgtgttagcataattatttgttgatggagacagcttggaatgacagaaagagggcagagtctgtagtccaaaagacctgctccagaatcccagttcttacagtttgactttgagcaggctgcatggcttctctgagcctcactttgcatttgtaaaatgaagataataattcctactttaaaaggattatttgaggattaaagacaatgtattccccagtacttacacagattaggtataatagtattagtatcagtctggtagctatgacagtgatgactgacactggtgaagatggtgatggtggtggttgatggtgatgatagtgactatgattgtggtgatggtgatgatgttgatgataattatgataatggtgataatgatgacattgttagtgatgtaatgacgatgatggtagtgatgatggtgagaatggctgtgatgataatgatggtggtggtggtgatggtggtgatgatgaggtggtggtgatgatgatggtgttgacaatgatgttgtacttgttcttctgttagaacctgatcactacaatgccaggtggtgtgcagcttcatctgtgcctccttggtgtctgacatagagtacgtactctattatttcaaggctcacctgctttggcaggtggtgggttgatgcttcctgaattaacctggttggctgaaccttccttctgagtcctccccagttgcaaattttgtgagctgaagcagggagtgtccctgacttggaattgttagattggaggtttttttttttcagtggtccccttagccagtgaccccccttctctgggctttggtgccccaacaagggcctcctatccaacatctgattcaacatcatgattttcattcagaagtgccttgctctgtaaccatacccagattatttccaccggtgacttttatatcccatctggaataaacatcagcacctgaggagggagactgtgtttatttcccttctatctcctttctgcagtaccatccttagcactgagcccgcaccttgtctatgatggtggtggaagaagacaatgcttggggccgttgaactcgcaccaccccctgggcctgggccatcccatggttggcgtggtgagaatgatgacttgtcacgtctgtgtcccccatcaggcatattaccaaaggccttcctgtgctggctgggagggtgaccagatggcaaagccccgcccagccacagggctctgggtatgcaccacaccttccccattcctgcttgctcagtgtatcggttggctttgattcttgagtctttttctcctgccttctcctggagatgaagagaactgcaaacactgtgtactgctgcacgcgggcctcccccaggccaacagaactgctgggtgagtgctggctgagccttcccctgcaaaggtcatggtccagcctttccaggctatgcatcttacttccattccagctcttcacatctgattaaagatgaacaca

SEQ ID NO: 39948 - DNA, 2300 bp, Homo sapien
gtggggcctctactctttatcccattaaggaggatcctagggccatgtttctgggctgagccgccccacttgatggcagtgattgtggtatcggtctcagctctgctgatggggcaagactgggggaagggaaaacatggaaggcccggtaatcactcttgtaagttagccacaatcaggaccccgaggttgggctggccatggagcagtgggagaagtgccccattgaaaaggagcagcctggggaggggcagatgggagaatgtaggtgcaggagtggattcggatcaagggaggagattcttcctgacgggtgcctttctgaaggaagaaatcagttatgaccagtttagcaggcaccgagggggcagggcccaccttggccaggggtgggctgttcgctggtgggagcccatgtgggtgtcacaccatcagtgtccagctggctgggttggctgcagctcctgtaggagcctgtgttcctgggaagcctctctctggtgaaaggcaaggtgggcaggctgtgtgcagaggagaaacccacgctgcccatgtccacacagctgtgtgggcaccaggacctgccgagatgccatcccaggctgcctgaagcagtagctttctgcagaagagacagggaggagaaagcattgtgcaggcacggagcagcaggcagggaaaagaagggattttagtagatggcagggaaaacagggcaagaaaaaaatgggaaatggctcaagaattgtcagggtcccaaacatctgtgtcaggacactaatggcatttgggcaggacagtccttcatggaggggaccattgctcactgagagatgttcagcctgcccagccccccacccaccgtatcccagggatgcccttactcagtcatcaagatgaccatagccgcccccaggctgcctctagaggaggtggtcaccaaggcccccttatctccgacggtctgagatgatggagctgggaggggccctgggagggcgaggacagccactgggcactcagtctccaactctagggccacaaagagcagatgggctgggagaggctgttgaaggtgagtttttccctaaatcaacacaccactattgagtcaggtgctgaggccggccctggagacaggaggaaaagtcaaatgtgaccctgaaccccagggagctcagaatctagcaggagaggtggacgagcaacagcaaccaccccacattcactcactatgcagaccgatgagggcatcctgtcacagcattacccagtgagcatgggcgcggctgcagtcatggggagacccccaggctcagtggtgcaaccccagagcagtcctgtgttccagctggtagatggggcaaaaagtgggaggcacatccacctctgaaacgcctgctcttggaagtggcagagactcctctccccattctctggacctgccatgtggccacatccagcttcagggagtttggggagggggcccggaaagaagaggaaactgtgtgtgggcacacaccaaccacctgtctcaactcccctcagctggtaacaggaagagaatcagcactgtgggtggatttttctcctggagaatctttacctttcaagaaatgtctattatcgcttggcccatgtctaagataaataatgtttcactgtgagacatagtcaataaccaccaaaatattttactaatttagaatcctagaacgttaaggctcaaaaagccctcagggatggtccagttcaacccttttgatgttcaaatgggactctgatgcttcgaggagaagtgcctgggttgagatcacccgggtggggggctctgcccaggctgccacagtggctgctccaggtgtccgggaggcaagggaatccacagaggatgcaagctcaagccaaatgtgcaggtttattttaggacctcaagctgccgccccaggctcttgcccttgcccctgctgggagagtcagagccgcctcctcctcctcagtcagaatgactcagatgcccgcgtcagacattctcccctccccaccagcctgggtgacgtctctccgaaactgtctgctccctaagacacagcttacaggcaagatgaagcagtgtcgcacagccctgtcgcctcactcatcctgccctcaggtcttgtttctgcctcttcacagcaccacccccatgaagcttccacatgcacctctgcagacccatctcgcacgatgcagtgggagcgagcccttgtggtgaggtgacaacggcccacatatccctcagtgctgggggatgggagtgt

SEQ ID NO: 39949 - DNA, 2300 bp, Homo sapien
aaggaattaaccaggcaggagaaaacttggtccctactggaatgaatagtttaaaggccatcttagatgctgaaaactctgagcacaaatgaaagcgacccaagaaggaaaaacttcagagcctaagaataaaaaatggtggtagggttgggggataaactcgcccagagctgacttaaagtgctgtcagggaaggaagtgcctttcctggggaggatgagatggtccatgccgggtctggagctgtgggcgttctgatgttggatagcccaccctagcaggctgcagtgtcttaagggtagtggcatgagatctttggaagtatcgatacatttcctaacagtgagtttgagtttgttctggtatgttctgaatggatatgtggctcaaagattaacttagctaaaaataagtatattagatattagggaaatattgttaataaaggtcttctgtccctgttggataactttagaaaataatgtagacaactgaacgtagtggagatgatggcatgaatacagtcagggtttgatgcttgcttcctagaaacttcctagaaatagaacacatctagacatagggaaataaggttccaaagaaaaccttacacttttattcagattttatgttggcctcagttgtactagaaaagcgtttcagtatgtgtctcttggggaatctgcaccttcttggtcactgcacttcatagcccggcatatcactgagaattcagaaatctgactctttacccagggacgaatacatcgttatgagttcaggtgcactaaatacataggaacacccagagaaaatgagcccgaaacaatggttctttttattttggaagtttcagacaaactctttggaaaattgaagaaatctatggatccttttcctgggaagactgtacagacatacgtattcgtgtggtttctgtgggtgtagggactggccctggtcatgtgtcaggaagccccaatccagaagatcgtcttcattttaccttggccggtgatctgactctgttctcgcgcccatctgtggttgattctctgtcgccttggaatggagcatcagatcttgaaggtcgctcattgcttttccacgcatagaactgagccacatggcaagagcttcctaatgaaatggacggaaactctctgcaaagggctgccccagaagcacgggtgatagaaatagagtccaaggcactaaggccgctgagccacagtcctcctaggcaatgcctcctgctggcttagtgggtttatttcataagttgagtactaatgtcctgttttttaaatgaacatatttcttctaacatttctaacaattatgaagattttctccctaagtgtgactttttcttatgtcttggggtatcagatttacagcgtaacatgtgtacttcaaattgtagtagtgactggaaatttaggattctgttgtttcataacacttaaatctgcagcagattttcaggaaaatggtcaagattcacagataattccttccttattccttacagattttacaattgtatggttatttctgaatttggttaatttgtttataagtgtagtggacatttaacagaacagatgcacccgattatctgattagaaatgtgtttcaacacacgggtccctttgcgtgtttccaatctctgttttcggatctgggattctccacctgttacatcgttcactggaactttcctacaaaatacagcctcgctgagaggcgcatcgtggaaaaatgaagcagcctgaagaaactctaatattgggaccgagtggagagatggaagagcatcatcagagtggtgccgccgcacatgcgggaggcgtcccaggcagcattgctctttgtacatgagacaggataccactgtcttttatgcattagactggtaaccagataaaataaccttgtaaaacagatcttttatgtaagaaaaatacaactctcacctcgcaaacattcctgtctgttgcggatgaacctagcagcaggagaggagccagggtcagtccacttggcctgaaagttaacgtcatatattcagatgtcaaggggtttctgtgcatgcttttgaagtattgtgtttgggcttttacaacatgtgcctcactgtttcgcatctacagagagagtgccgctgagagaggagcctgagtggatccgtgcccagatctgcattctctgtcctcaccacttctccctgctggttgatataaatgtggggataacgtcgagcacaaaggagtcaaaaattgatcagggctgggtgt

SEQ ID NO: 39950 - DNA, 2300 bp, Homo sapien
ctcaaccaaacattcagattgtcctttacgtattaacttcattctagctaatttgttgtttaattagtcccgtattaattggtaaagccgtaaagattttgatggcttaactcttctattttttaccctccactgataaatcaaatgcatgtcgttttatgtgaaaactgaaatagaaaaatgcagtctaattttagtgtgaactatgcattgaaatagccatgtcctccttaggtaacagtgttcaaaattttaagataaaatcgtattgcttcattaaatttcaactggttaacgtcaaatcagtgttaaaactataccgtaatagccctggggtagacacattaatggcgccccccgcagtgtccatattccaatccccagacctataaatatgtaaccgcacattgtaaaggagactttacagaggtgattaaggatttggggatgaagcagttatccaggattatctgggtaaggtgggcctgatgtagccacaaggggcctcctaagtgaaagagagaggtagggtggtcagaactagagagaggtttgaaggtgttacaccactagctttgaaggcagaggaaggggccacaagccaatgaatatatgtggtccctagaagctggaaaaggccagggagtggattcttctctagagtctccagaagaaatgtggcccttctgacaccttcatttagtccacagaactataatttatcttagtttaagccactggtaagtgtaattgtaattgtaatttgttacatctgctatagtgaaactaatactgaaatttagaaaagatgggtaacttattatgtggtgaagtttaaaaaagataagtaactcgttgaagatcacataattagaaaagaaagcagtagagcttggccttgaactcaaccagtgtgactccagagcttgtagaacagaataaccacctccaaggccagctgaatctgaccacagtctggtggaattctagtacatctcgttaagaagtgggattgccggaagggagttggttattcatgaaagtgatgatgtttatccaatgtaccacctagagtacccttagtactctactgtcctagagtataaccctgttgtaaagaatgatacacaagacaaacttaccctgatgttgttaaatatatgttagatgaccagttgctttgatttctttgctcaataaacattggattacagctggtttgctgtgtggcatgcctacatggagggaacacactgagccaatgatttcatcatctgggtccctttggtttatatcagtttccaacatgacttgtttgtggggcttgtgggaggggcacatacatcggccccaggattctaacatctcctggtctctgaggttataattttcacttaacattgtcgagttggcattttggttttagtccaatggttcagttctttgaaactgactccagagatggctctgttcattaatagattgttttgttgaccctgtgaggattagtctgtggatcttggaaattcggcaggtgactacaattctagaaggcctcttgtgagatataaggtgttttccttaagtgacatggccctgcgttgcaaagctgagaagtaatatgaaggagcgttttgtaagtttgaatctctataatcaaaaaccagactaatgacacattcgcttttagaacttaaaaaaaaaaattcaagaactgagtagtaggccaaaaacaagataaaatgtagcataagaaaatgtagagttttgtactttatcacttaaaaaacgccaaagtaggccgggcacagtggctcacgcctgtaatcccagcactttgggaggccgaggtgggcggatcacaaggtcaggagttcaagaccagcctgaccaatatagtgaaccccgtctttactaaaaatacaaaaattagccgggcgtggtagtgcacgcctgtaatcctagctactcaggaggctgaggcaggagaatagtttgaacctgggaggcggaggttgcagtgagccgagatcatgccactgcacttcagtctgggcgacagagggagactctgtctcaaaaaaacaaaacaaaaaaaaaaaaacaaaaaccaccaaaaaaaaactgccaaagtataggttatagaagagcagacttacttggtgtttgcaagaaagacaaagagatttagagtttccatcaagtttgttgtgagttactaggaggtagtgccagagaagcaacatggcattaggctgcatgggtagaagtatagtactgagaacacgggagagcatcgg

SEQ ID NO: 39951 - DNA, 2300 bp, Homo sapien
tttaggtttggttaagaggaaactagtacagactgtagaatagtgttgtttagacagtagctctgtaagtaccacctgtgactgtgatgcattcactttgatcttgaggataacttgtctcaaagacaactgattacttgattttatgagatcaggcttttcaaagtatgggcctggcatacctgggagcttgttaggaatgcaaattttagggcgctgcaccagacctactgcatcagaatctcgggtcagtggagtgcagcagtgctgaagtttgagacccactgtatcagagcacagaatgcagagaagataatggctcttcgggccagcagcactaggggaaaaacatacacagtcatgtatcacttaacaataatgttctgagaaatgcataggcagtcttgtgccaacatcatggactgacatacacaaacctagatggtatagtctactgcacacctacactgtctggtatagcctgttgctctgaggcttcaagcctgtatagcacgttactctactgaatagtgtaggcagttgtaatgcaaaggtaagtatttgtgtatctaacctatctaaacatagaaaaggtgtagtaaaaatatggtataaataatcatctgggaccaccattagatatgtggtccatcattgaccagaatattgttgtgaatgtgttgcatgactggaaaaggagagctagacaacactgactacttcaggggaagagaactggcggctaatggcaaggatgaaaggaaaactttttattgtgtacctttgttcactttttgaattttatgcttttaagccatacagaaatattttttaaaacgttagctttatttacatcatgaagtttaagtatgtttctcaggaattttcttctttaacatcataaataaagaaaaactcaaaaaaaatgatttcatcatgccttctatgttaattactctttcttgtattttacatctttccagtaaatttcagttcctaaattcacacacagttccacataggaagctaaagaggcataatccagattaagaaccaaaaatgaaacagaaataggatacagttgaatcatctgtgtaacaaataaagaaaaagcctgggaactataaagctatggaaaatgaaagaggctcactgagatgaaccagagtgtacaaatgctgaattcaatacagtgccaagtatttagagtgtttttttgcattgaggttattgtggctgtgaacaaggattaccatccacagctagaagagaaatcccccgggacagaatctctaaaacagggtcctcagttacataactagcgatttatgaaatgtgcttatattgtatgtgatgtcatgacatcatttcttggtcttctgctcagaattaggtagtttgactataaaatctactatttggggacacatttgctgctctgcaaggttactgttaccattgctgcagtcaagtggcatatacttaagggactggagtcctgaaggtctgtgttgattctgggaggtgtgcacatatgtgggtccagtgttctttacaaaggccccctgtgtggcatctgtcgtacttcttatttgttcagcatatcccttggcttgtgatggaagatacacaatctgtacctttgtctgaaggagataccagctcctgagtggccttttacatcatccttaggtggggatagttaacttaaaaaaaaaaaaaaccggcgagggagaaaaggccgtcttagccatagttggcagcccctagccctttagcctaaggaagtctacagagactacggcacttgggtgcagacttttaatgaacccatcttttgttgtttttgtccattgcactgtctgtgtgtaacacacacgtcccggttctcgcccctgatcctgatggttccaaggagcgtggatggatactttcaagaccaaccagactactacgtggcttagtgtagatatggcgataaaacacttgtgctttggaaaacgtaaaaatcccgaacttagatcttgaccagtaagtgaagaggaactgaattttaactatttgctgaaaaatctatcattttggaagcattaaaaaaaattaaactgtaaactgagtgcacacatcttaaccctaaatacatacacacatacacacaaccagccacaaaatagtgttatttccttaaatgccaaacactgtctagttctagaagtgaaaaggaccttcttgtcttttcagaagtgtgtgttttgagtatgtaatgagattacctttctgtggctttggagaattaattt

SEQ ID NO: 39952 - DNA, 2300 bp, Homo sapien
gccaggatggtcttgatctcctgacctcgtgacccacccacctcagcctcccaaagtgctgggattacaggtgtgagccaccatgccaggccaggaagggttcttaagaacaacatatcttgaatccttgtctagtgataactgtccccttgatacttgaaggtcactttacttagagataaaattattggcttgtattttctttccttaagtatcttaactctctttctctgtttccttctggcataaactgttgctggaaatgtgcagtgatatttccctctgtaagtcatgtggtctttttgcctcgatacccaaaggactttttcttaatctggtgttagccatttgtggttgataggcttagataggtggtatgttctctcagtgtatagcttcagatcgtttttcattcggaaaacgtttcttggattgtagtcttcagtatttgtcctgttccattgcttcattgttgcttttatagtcagagactcctgttatctgtttcaggtattctttgcctgtctttagtattcatttcttctcttgcattctttttatctcttctttttttttttaattaaaaaattttcttcttcgagccgcctgtttctcttaaagcatttttgtgtttacgtgttcttgtcttccatataatctttatgtataaaacgagtttctcctttatttgtacttcctagagatttgcccgctttttgaactttaaaaaggaaatcattctggcttaccttcgttcatggcttgtatcattttcacatactttagctcagtttgaattgtattttcttcagtgtgctttccttgtctgtggggattttgctgcttaaatctttctctcgtagtaagtttgtgtggggtctgacctcagtgctttcggtgcttgtttgtatgtgacgctagttttcctcaactcatggaaggagacttgggagatacactgccctgttacagccccttcggctgtggcttttgtacaggtttcctgcttcccctctcccagttttacctgccttttctttgtccctgtccctgttttgctcctttttgaatccagtcccagcactttctcctcagtgtgaggccttggcttggagcgggagccctggagcatctgttttccgagttccaggaggtgaggctcatctagtccctcggactgcactccctgtctctgtggagtggccagatccctcctagtagcagctgctggcaagaaatgggtctgctgtgcttttcagtgagtgcctcaggctgttggggtgttctgccttcccgagagcccatgcctcctctagtggctggtgcaggggcagtgactgctggggcctggtcactgcctccctacctgcgtgtgccttgctgtccacaggattctttgagttacgtaagaaatgatgtctgactttgggttttgctacttattctgcttttatatttcatttagagaaaattatagttttgtacataaaagtgaagaattttatcttatttcatggaggaaagcatcttttataaaataacacccttgttgtggaggccaagagagtaaaattgcctgttaaagctttgtaatttgcatttactattaaaggttaatggttttattctgaaattgccatagagtgggttagagaactaattgcttttattaatcattaacaagttactgaaaattatccagaatgtggcaactagctaactatatattagtgaatatgaatattgttgaaaatttcatcttgaggtcaggttttttttttttttattctgccggtgaaatggcccagataacttcattgtaaaaatattctggctttggaacataagttatttgttttatatagtttgcctgtttagagaatatagaacatttcaaataaaattagtcattttgtgaaaattcagaggactgggaatttaactgtccttctggctgtaggaatcataatctccccattttcatcaacctgaagacctcttggttgtaagaatatttgggttttgatgttttaaaaaactgattatttaaaaaaactgatgcaacctttgttgcatggagttgaggaaggcccaggagggaggattaaaattaaataagagacagttttgcttcttaatggtttctccacttaattattttagtaggaatctgaaatcaaatatagaatggaaaactaatgtagccaaaccatctgagagccaatagtagagacagacattaaatcacagcacttgttcactagcagtttgggtacctacagtatgctatattgaatgat

SEQ ID NO: 39953 - DNA, 2300 bp, Homo sapien
ttcagaaaagtcactgttgttatttctattatatcaaggtgaaaactgagatttgaagaggtaatcttgctcacattattcatgttactattttagtgaaattggggttcatacctgggcaatcctactctatatttatgccatgtaaggtgttattcattcaaattcagcaaagaaacagaatcccatctatatgcagaaataatctttacctgctggccttaagttttactaccatagggagtatgaggcttacatatgagtatgagttttacataccatagggagtatgaggcttaaatcatagcatgaaatacatggatacagttatatggctggtttctaaaagttgattttggaatcactcccctcttcccaatgtatgggagtaaaaattcactattagtaatttttctaaagtcttcagagatttcacactggcatatatactcatgaaaagctgtgtcctaaaatgtagtatccccatctaccctgccactcccaaaactcataggtgccatagtattcaatagtatcaaagtaactattgaagttgtcaaacgcacctttctgccatagaacctccagccatataaatattacctaatttgtactcttaacattctaaagacagttattggcattattagaagactttagtgaatggagaagtagacagaatcacaaaaatgagttcaaaaatctagggaagtcaatgagaaaattcagggatttttttccccctcattcttttttttaactgtaaaatgttcatttcatctgatcaggaacaactgtaaccatgtagcttgccctattttggctatctggcttcaaaaatactttcactggaagatcattgtaattcaaatccattcagtgctgtttcacttttgtaatttgttagctaagtttaagtagtgtatcctgcacctactttaatgatatagcacattgataacatttttttccttatttaaagcaatgtttacccacagcgccttagcaccaaaaaaattctaaaaggcactccttacacatttaaataacctgaacaaataattgatacaggttaagccctggctagttctgcattttccaaattaagatcacagaatttaaaaattgcatattaaaaaaaaagttggtagaatatatttccatagggcagaaaatatattcaaggtcacaatatgcccattcattccttgctccaacatgtaagacccaaccaggctgatttccaattgaattttgcctgaagcttttttaaggtaatgatggaaactttattacaaaaggtggttaagttgtcagtgacaggaaaatcaggaggtcaacagaggtaagaggagaggtgtctaaatggaagtgagaatcagtaacttgattgtgaaaatctgacttatgtaatttttaaagaccctcaaaataagagaagaataagagaaatttaaaagaaaatagaaacagccaaagaggtgagacatagacattttgattgggggggggtgttgtctaactacacaatgaggtcatcccatctcccggaagtgacacgtaatcacctgctttgcactagctccgccccttccctcagaggtcccgcccctccaccagcagccgggagggtgttagggggcgtttctccaggaggaaagctgtgagctgcgacgctgaggaaggggaccccaaaacgtctggcactgccccctccagggatcactttggaccgcctcactcgggccagccggattctgaaacgccgaggggtcaacctgatgggtttcggggtcaacggaagaggggaaggggagccctggcggggagaaccccccggtcccccgcccagcagctgaggcacaggagggcggccatcttggccgggagggtagggctggggagctgcgggcgccgtgcgattggggggctcgcccggaagtgacgccaactacccggaagcggagggggttccctggcccactcccccctcgttcgtttgctcccccgcttcctccccgccccccttcctttccatttgtttccccccctccccgttccctgcctttttccccccccccccgccgtccctcccccccaacctccggagctgggaagagagtcaagatggcggcgaaatccgatggcggtggcgtgggggtgggcttcgctcagctgcacaacctggacgaggcggtgggcagcggcggcgaggaggacggggagcccgggggaggcggctgcggcggcggcggcgacggcagcgagcccggcgagagcagctcgatgcacatctgcca

SEQ ID NO: 39954 - DNA, 2300 bp, Homo sapien
agcgaatcagaacctctaggagccagccaggtgtggtggctcacacctgtaatcctagcactttgggaggccaaggcagccagatcacttgaggtcaggagtttgagaccagccaggtcagcatggcaaaaccccacttctacaaaaaaaaaaaaaaaaagaaagaaaaaaaaattagctgggcatgatggtgcatgcctgtagtctcagctatttagggggctgagttgggaggattgattgagcctgggaggcagagcttgcagtgagcttagatcatgccactgcactccagcctgggcagcagagtgagaccctgtctcaaaaacaaaaaaaaaaaaaaaaagaggaacctctgcgagcctaagcttgttctacaagctcgccagttgtttctgaagctgcagctgtcaccatgcctctatacggtaacagctcaatgaatagtgcccagttctaagacctgccatcttgccactgcgtgagattataccatggcgacttttagagaagccccaccagtctcagtctgtgagtctttcaggtatctgagatgatcactaaaatgtttccaatccttgtaatgccattctcagttccattcctagatacaggtgagaagtcttcagcttcagtatttcagtggtttattcggaaagcaagtataggcagataagttgatgtcagctccctgccaaattcttggaacagcttgggaaaacataaaatgattagcaaacagccctcccacccaggctggagtgtaggaatgcagtggtgcaaacatagctcactgcagccttgaactcctaggctcaagcaatcctcctccctcagcttcctgagtagctgaaactgtaggcatacatcaccatgctcagctaattttgaaactttttgttgtagagtcagagtcttgctatgttgtttaggctggtctccaactcctgggctcaagtgatcctcctgcctcagcctcccaatgtgctgggattacagatgcacatcaccacacccagcccaagccccgcccattctttgcataaaagcaaccatttaattagaggttctattatggtctgacattttaagtaaaaaagattatttggggaaaacatccaggcatgggtcttgaagacagcctctaaaagccttctgcttctcgttagacaatgcctctgaagcttctctgattctgtacagaatcaggacacgaagagggggaggaaatactgtgattgcaactgtaaaagcaatcagaagtatacagttattggaaggtctacaagttaggactagggaaccccccccccccgaaaatgctgtataattatcagcaagatggcgagaaataaacaagggagatttcataggagagaagcagagtatcagaaaagaatatctaggctttgctgcaggaaaaagtaaaaatagaatattggaacttctaccacatagatataagttatttctaatatttggatggtaataaaatacagtgtcctcaaaaagtagacagagcaaacttttctgatcaaaaggtaggaagggattaaaaaaaaaaggctagctattttaacctttaaacagtggatagtcttcatttaatgttctgtcatttctaaagaggctgtctggagccaggcatggtggtgcgaacacctacggtcctagctactcaggaggctgagacaggaggattgtttgacgtcaggagttcaaggctgtactgttctgtgacctcgcctgtgaatagccattgcagtccagcctgggcaacatagcaagaccccgtttctgaaagaaaatgtgttatgctttaaatctctctagaacaaagtaggttttgaaatcctagccaaccgcttacttatttaacacatatttgatacatcaaagaattaggatagttctttgaagctgattgcactgggatttatcctggcattctaagtttttgtctttagatgggataagatttgctgatcaacttctctacacttactcttatcagcagccctgggttatctttatgtggacccagactcagtccaaaatccttaagtcttcccatccttctgatctttcactttttttcaggtcccaccttacctggaagaaccatgaagatcaaatagaaggtccttgtgcatgaagctcagcggaaaaaagctcgggtatgaggcaggggaaatgtagcgaacaaagcactgggaagaacagtcactttgcaccttttgtatcaaaaggaagcaggtctagggtggatagaagacattcatcaaaactgtgaaagccaa

SEQ ID NO: 39955 - DNA, 2300 bp, Homo sapien
actggtgctgcacagggaaaaggttccttgtttttcaagacaaaaattgttttccatggtgaacatgtgggttagcttgttgttttcactttcccaagtggttaagtttcctactaaagtggccaagcgaaaatgtcaacccagctagtgggcccaccttcacagtacttagactgtgcatcctttaaagtgcccttaactagggatggtttccatgaaaagcatacaggttttctaaacgatgcagtttggttaattgcatagcttacatgattgtgtgagggttaatttctggggtgtggttgcattgaagacttcaagttcccacgacctgaacagaattttggcttctttcaatacaaagtggcatctggaattttagctctgtgtatgttgatgttgggcccctaatgggtttctgtgggaatgcaccctcaaaaaggttgctctgattggactggagagggtttactgctcatcctgtcattttaacctttgtcatttccatacttttgaagtcttataagtcatccagattcattaattcaaagggagttcctccctggtagttggaatgataggtcatttttttcaaggacccaagatcgggctgggatagggatggcagtgtatctggatgaagataggagataaacaaagccaacagtcctttgccagagctgagctggtggtatttaacagtctttgcattaaatttaaagttcttaataaatacccagaatctattaattgccagaggggtaaagtgaagctctgttgtaaaataaagctgattccctgtatgcggtgtccctgtgtatactgggtgtatactgggtgtccattatggaacaaaaaaaaaatacttatttgctattttgttctatagaatgggaacttcagggggtggatacctgtgctgtcaggaatgctagttataaaaatgaattaaaacacttcatatattacaaaggaagtgattccatctatttggacgaaagcaattaaactgcaaaaatataaaaaatggcaactattattcagtctacagtaactatgcaacaaagacaccaaggaaagttggtaggcatttacgtatctcacttaaaacaagtctataaagtggtttattttaagaagggtacattttaagaaggacaaaatcaaaagcatggacaagtgttggatgagctgatgaggttgtggcaatttactttgtgaatactgtgagagtttgtccaactcgctgtgcttaggtactagatggtgaggatttaaaaggtcaatgaagtcacagcagaccagcactcaaacatatttctcttctatttcctacttttgaataaaaatgtcagaagtgggcggtgggaaaggaacaagcaaaggagtaattatttgaataaatttttggcgaaacgtgggtgtctgacggggaggctgtgcggtggtgaccaacgcacccatgcgctgggtttcacagatgcagactgaagtccaggctctgctgcagattaacggggtggccgccagcaagtcaagtgacttgctcttctgtgcactgcatgtacttgggttcctctcacaggtattcctgtttttcctctttcttgctccaggttacacctcgtggcgcggcgctctcggagagcctgtggagtggccctgtgtccctccctgacccctggaggattccgtaaggtcacagtcaccgcctccatcccctacttgccatgtcttcagggctaatgcataacaattatcacaatttacagcagccccacgctctgaagagcttctggaggggatactactcaagcggaggaaggcaagacagggacctcctccctcttcccggacctcttctgataaggaatatttgtaggtggttaagaaaggcagcgggagggcgtgaaggcaaagacaagctttttttctcgtaggaacacacatcttctggtctggctgtgtttccggaggcatttccagaggacctagcgaggaccaacttccggctgcgacttccgcgtcttccgagtttcgagacctgctgcttccgcccggagttgttgtgggctccagcagcgagtagccacttccgctaggagtccctagcggccagggcgtggaagcggattctgaggcggctttctcctactgccctccgcttgccaacgcgggacccggagcccaacggcagcggcggtccttgggcctgtggagaggggttctctgtggccgagtcctaggcctggtgaaccgcgcggtgcgggagaggcgcttgggcctcgtccagccccagc

SEQ ID NO: 39956 - DNA, 2300 bp, Homo sapien
tagggtgcattttgtagaataattcacctctccaaagataacgtgcattttaaaagtgaagcaaatgtcttggccagacaaacacaggcagtgttgtacaactcagttttattacaaatcacaaatatagttaatccttagacctgcagacggttaaagagaatggctctagaagtcagtaaactctcatcagaattactttgcaggacaatgtagtgtttacagtgagcctcattatcttccactaaattgggcacaaattactgttccacagtgtagttcaagagctggaacattaagtttcttaaaaaggatttagataacaggttcaggcattttaatatccagtcctagaatttcagagggtctcttctgggactattggtttaaaggaagatgctgtggacagtggattataaagaccaaatgaaggtagaagtaattttattcaagaaaataaagaaaactgataccataagaaagttatagtatcagtatatattttatcatctgagaataaatgtaaatggataaatgagtctttttttttttttttttttgagatggagtcttgccctttcgcccaggctggagtgcagtggtgcgatctcggctcactgcaagctctgcctcccgggttcacaccattctcctgcctcagcctcctgagtagctgggactacaggcgcccgccaccacacctggctaattttttgtatttttagtagacatgggttttcaccgtgttagccaggatggtctcgatctcctgacctcatgatccgcccgccttggcctcccaaagtgctgggattacaggcgtaagccaccatgcccagcctataatgtttttaaagatgatgggtaacataaaaatactatgtggtaataacttagaatactaggtctggaggaggagaacaggcctagcccatgtgaaagaataagcagtagctaatctatgtggtcttgaggtatagtataaacctggaaagttctctgaacctcttcagttctgagggttgcccaattaaaacaacaacaacaacaacaacaacaaaactttatcagatgtactgaatgacttcattctctgataaatttcaaagcttccagaacagaggatcaactattgtaactattgcccatttctggtccaggaaatacctttctgataaagagtgctcataaaacgcttgtgttgttttcattcattctatctagaagtgggcaaataccaaaacctttatcccagattaaggtcggataataagtgaacctgatgacctactttagaatgacaattcaaacagctatccctgaaaccagacaactacacgagttatgccttgaagcagatctttcaaagtgcaacgaaacattactcctgtttttcacttgaggagactaaattatggtcatatcttttccatgatactgattttttatttaacataaaccaaatactgactgaatcaaagactaaaaccccacaaaatttcatcctttaaaacaaaaagcaataaaatcccacccctaaatcaggcctcaaagttcaaagaaatgtttaaaaatcccccatatgggatctgacatgaatgtctattattgtcccccccaagtcttctcaaaaatcactttaaaatcttgctttgagaccctaagttttcttggaaataaaatacatttatagattgttttaaacctactgaattttactatttctgcttgctttcttcccatttaataaaatcaaaataaaaaattttgaccaaataaatatttattgaaaggtcctgccaccaaaaaagcttcaggtttttaaaaacatataatcaaacaacaatgttcttctgattaaaaaaaaaaaaagtacttatttaaatctgaggatccttatatgttcaatagaggattgtggtgatcctttgtattttaaaaatattatttgtggggcctactttacgtatctcctgtataaaaaccagctttcactccacatgaatagagaagatgctgaatacgcaggaatctgattatccctcacgtgattattaccggcccctctggggcaatctgcttgctcactcattctgccaccattctcttcattcaagtgtttaacagcacatttatcaaaggcagctctccgatgcaatgtttaacgagtgtcttctcaggagtgtatccgtgtcatttattcttctcatccaggtaagcacgaacttcacagtactactaaaaatcttcttcaaattatattgataatggacttatttctgaccgtttttggatttggg

SEQ ID NO: 39957 - DNA, 2300 bp, Homo sapien
aagcagtcttaggagttttatagtttaaaatcttacatttagatcttaatccattctgtattaatttttgtataccgtgtaaggtaagggcccaatttcattatttgcatatggatattcagtttttcccaacactttgttgaagagactgtccttttcccattgtgtggtcttggtatctttgttgaagattatttgaccatatgcatattcatttctgtgcactctattgtgttccattggtgtatatgtctgtgttaatcactggaaggctgaggcaggaggatcacatagggccaggagttcgagaccagcatgggaaacataacaagatcctgtctttacaaaaaataaaaaaattagccaggcatgatggtgctcatctgcagtccttgctactcagaagctggagtgggaagatcacttgagcccaggagttccctctccctctctttccatggtctccctctgatgccgagccaaagctggactgtactgctgccatctcggctcactgcaacctccctgcctgattctcctgcctcagcctgccgagtgcctgccattgcaggctcgcgccgccacgcctgactggttttcgtatttttttggtggagacagggtttcgctgtgttggccgggctggtatccagctcctaaccgcgagtgatccgccagcctcggcctcctgaggtgccgggattgtagacggagtctggttcactcagtgctcaatgttgcccaggctggagtgcagtggcgtgatctcggctcgctacaacctccacctcccagccgcctgccttggcctcccaaagtgctgagattgcagcctctgcccggccgccaccccgtctgggaagggaggagcgtctccgcctggccacccatcgtctgggatgtgaggagcccctctgcccggctgcccagtctgggaagtgaggagcgcctcttcctggccgccatcccgtctaggaagtgaggagcgtctctgcccagctgcccatcatctgagatgtggggagcgcctctgcccggctgcgaccccgtctgggaggtgagaagcgtctctgcccggccgccctgtctgagaagtgaggagcccctccgcctggcagctgccccgtctgggaagtgaggagcaccccgcccggcagccgccccgtctgggaagtgaggagcgtctccgcctggcagccgccccatccgggagggaggtgggaggtcagcccccgcccggccagcagccccgtccgggagggaggtcggggatcagcccccgcccggccagccgccccgtccgggagggaggtggggggtcagccgcggcctggccagccgccccgtccgggagggaggtggagggtcagccccccaccggccagccgccctgtccgggagggaggtggggggtcagcccccacccggccagctgccccgtctgggagggaggtggggggcgcctctgcccggctgccccttctgggaagtgaggagcccctctgcccggccaccaccccgtctgggaggtgtacccaacagctcattgagaacgggccatgatgacgatggcggttttgtggaatagaaaagggggaaaggtggggaaaagatagagaaatcagattgttgctgtgtctgtgtagaaagaagtagacatgggagacttcattttgttctgtactgggaggggttcttctgccttgggatactgttgatctgtgaccttgaccccagccctgtgctctctggggcatgtgctgtgtccactcagggttaaatggattaagggcggtgcaagatgtgctttgttaaacagatacttgaagacagcatgctcgttaagagtcatcaccactccctaatctcaagtacccagggacacaaacactgcggaaggccgcagggtcctctgcctaggaaaaccagagacctttgttcacttgtttatctgctgaccttccctccactattgtcctatgaccctgccaaatccccctctgcgagaaacacccaagaatgatcaattaaaaaaaaaaaaaagaaagaaagaaagaaagaaaagaagcagagttggactcagcgggaaaataggcgtgctaccacctcaggagagttccagggaagaaccccacccgcactccaatgaggtcacaatggctggagctctgaggggcccaggctccctgagccaggaggagaggagaaagtccaaggaaagatggctggcagtcacccctacttcaacctgcctgactccacacacccatcgccgccctccgctccacccagcctccgct

SEQ ID NO: 39958 - DNA, 2300 bp, Homo sapien
cagcttcatgtattcaatgaagtggtccggtgtgatagtctaagaatgtcaaaacaattgagatttctgcattctatatatggcagaggccagtagtgttgacatagccctggggcaaaactgtgaaagtagactcggtcctgctagggaaaagcaaactatttctcatgatccttgagaaaataaatttttaacacatttgccatatctctcattgcattctaggtaccagtgactgaattcatgtgctccggtaaaggtagagagacagattcctgtcacttcctactctgctgtcttcttgatgtcactcttgaggttgagtcttcacaagatagtacctgtcctcctaggatttactgccaccacctctcaaggattctatgacaatgaatataaatagaatcaaatctcaacatggttcctgctgtagttccccaaggaattgttcacagcagcttcaggacttggctaatatgtccaaggagaacatgtctgggaatggatcttgagggagcattcggacttgtggggaaaagattgggaaaggaggagcaatgatttggagacactgtcccatgactcagaatttagcgtcctggcaaggacatctggagctgatgcttggaaaaatgatggtctttagtaaatgaagtggggatgccagaacttcctcggcagagtattgaagaatgagtcaaaaggcacgtggaggtgggtatgattgcatgaattcattatatggaccagcttctgttgttctccggagtgtccagaggtcttcccatcataatagcaataagaaatgtgctagtgaggtggcactggccttgttgggaagctcagtggtggtgacctttgtaggctggagttcgttgtaggggaagtggctctattgaaccgggctccatagtgtcaatggtgaggatagaatttcagaatagcagaggacagatggcaacaattaatcttcagtggaaaggtagacataattcctgtaatgggaagcaaagctggaatggtgaccaggggaaccttttccacagcgatctgtggtaatggccaatagaccacggcattcctatggatgagactggcagccaaggaggtcactgctttgccttatacaaaatatgatcaagaatgggtgagttgaaggctgacgtcagctggcacgatgaaaaattacattttttgctcagtttctaaatctgaaatattctaagacccagagtctgtggattgaagacaggtagttccttttaaggagtgactctgcagcaccatggcaactttagacagtagcaatttccttcaatccttctccaaagagacacgtggtcatttaccagaataattttgtgctgggaagaagggagtccatagctcttttgagggctgttagatataacatctgaactgataatgccatgggactcctgatgccaccatgactgcttttagagtagggtcatatagtgtccaggttataggacattgtgtgccccctgtgcaaggccatgtcacagtggcagagattagcaccattctccaggactaaaggatgcaggggtgtcaatccccttaacatttctttttaattcatcagtctgacccctgcaaatccagttaggtcatggtggttgatagtgatctattataatcttaattaagtggtagctccaatcaaacagctgctaggcccagatgttgcacctttactagaacagacctacaaagcctctgacaattggtatactatttatctggcaaatttgttcttttcagaaactattcccttggaagagtcagtatacattcatgatatggcccccggcctttaataattattcattctctatcacaatacagtccaaagggtccttaatcatttggctattctatagaacagggatgagcaaacccagatctgtaggccaaatctggcccgctgcctgtttttgtaaataaagttttattcgaacagacacactcctttgcttatgtacagtaatgtctatggccgctttcactctatgatggcagaggtgagtagctgtgacaataaaatagagtatttacaatctgttcccttacagaaaatttgctgacctctgctctggaacgtcaggctgctccctatgttggtgaatcacgtttgtcagagctggggagcagaagtggtgagtacgttgggtgcctcggtaagactcatgaattccagaggatggaagatagacctagaaaagattcaggggcctgccacattggtggagtttttggagggctggtggtctggg

SEQ ID NO: 39959 - DNA, 2300 bp, Homo sapien
acaaagcttgaagctatggtctgtgaccccgcccgaccggccgccattccccaatgcagaccagaggcagtgtcagcggatcgctctactccgcaacgctcccacctgtaatcctgatgcagggcaggtgagccccaaagtggagcttccaccaggagggttcttggctttgcccaggaaagaattcaagggcaagccagaggtagaagaaaacagctttattgaagaggcagggttacagctccgtgactgctcctgcagagcagggctcccccataggcagagaggagcagctcagggcagttttgcagttttatatatatatatatatatatatatatatatatatatatatatatatatatatatacacacacacacacacatacacacacacacacacacacacacactcacacacacacacttttaattgcatacagattaaggggcggtttatgcagaaatttctagggaaggggtggtaattattgggttactgccacggaaaggggcggtaactccctggtattgacatggcaacggtaaactgacgtggcaccctggtggtcctatctgttggaaagctgctttggccctgaccttgctttagtttgtcctcaatctggtctggtgtctgagccccgcctcctacctcaatcccactcaaggtgagcttgatatcctcttccatccaccaccaagtttgtggagaacggaaaatagctcctcatgatatgataaggagtattacaaagggcagcgaggcagggacaggttgcctgggtcagcattctggtcccccgtggccttgatcccatctcgtcacgtctctgggggtatcgtggtctcggtaatctcaagtctcttgagatgccaaaagtctgaaacccctacctccgtgggcagttcggtagaccgcagaaccgtagtcattttagactgcattaataacacttcaggcggggagactacgctgagcagaatgcacggtgatcatgacctagtcgacatatttcaagggcgccagaggcagagccatcttcagggatcaagtcaagggagaagctgaagaaaacggggcctggctagcccgctaaacaaaacgagacagatttcacaaaatcacagattgttaatgtcagaagacaccttagagttgtttctcccaaaccgaaggcgcctgcaagtcacttggggatcctgttaaaatgcagattccctggttcggtaggtctggagtgggggctgctttgtccagagaccacaccgtgggtccaaccttcacagcacactggaatcgctttaagagcttaaaaaaatacttaggtctgggcttctctatccccgtcccccccagccccggagattctgtcatttggtccgggggcagcctgggcgtttggaggttaaaaagctcccaggtgattgcaatatgcagcggagtttgagaaccagcgccttggacccagcttcttaagctactgcgcgcaccggcgtcccgctgggggcgcgcgagccccacccccagagatgctgactcagcaagtcgggaggggttgggggtgggacctgccaatctgcatttccaaccggcgcccaggtgacgctgactctgctggtctaccgtcttgggggtcacctaatttttcagcgatgcctcccagctggggaggccaagaagtgcctcgctcaaggtcttccaacacccgacctccagaccctcaatcctgggccagctacaccgcaaacctttccagctgtctctcctgcgccctgcgtttcttccccacgtcacttgccagggagccgctaaacagcaagaccgcgcgctctgcggctccagagtgcggatttcggtcgcgtgcggctctgaccgcgtcgccccatccctggcggggccacgcacggacgccatggctggcgccgcggagccgggcgatgcgcgcggactctcccggggccctgactgtccctgagtcctccctgcggggggcgtgcgcggcccgccccccgcggcgccacgcggcccctcctcggccggggattggtgcgccgggcggggcggggcggggcgggataaaggcgcggggtctggctgcgcggggtctgcgggcagctccaactctgggttcgtagtttgcgctgggtgcgcaggaaggtcagtgtgggggtcgcccgacatttcccccccgcggaggtgggagccgagccacatcttggagtggggactggccgcggagcgggttgcccagggccggccgaggtcggggcgagccctgcgcggcgctggagactct

SEQ ID NO: 39960 - DNA, 2300 bp, Homo sapien
agaggcagagaaattagtgtttaattagcgcagagtttcagtttgatgaacaagcgctggagattgactgcacaacagcgtgaatatacttaacgctactgaacagtatgcttagaactgtttaggatggtaaatctaatgttacgtgataggaatcacaactacaacctacaatagagaaaaagttttacagtgttcagcaccaagaagtgacctgcatgcatatatgtatatatgtatctgaagagtgagaaaactcgcctaacatagatcaatattgcccccagagacccagcaaactccaacccccccagcccttgtcctctctccgcctccacttgcaaacgtgcttaaacctattactctcccactgcccgctccttccttccagcctcaggggtctgcaggagcatgtacgctgctggtaccttcatgcctagcccctcacaacgggccttccctgctctggactgggtgataattgcccagtttacaacttcctggcgccaatgccccctgccccctccccacttctaacttaatacttatatgtccatgcccaccttcattttcactgcgttcccccactccaatcttattctgctttaaggagcaagaaggtttaccagacgcattttcaaggcagtctgggctttaaaacctctgactcattacatcatcatcatcaccaatgcatcctcttaatagtaatgatccaaggaaaaatcaggcgcctggtaactacggagcgttggtgaagcatctgctttcctgaactcttcttaaaccctcacagcaaccctgaagctgggaccttttccccattgttcagaatccactgacccgcccaaggtgaggcagttactaactaccaagtgaggtaggtccaccgtgtcccataccctctacttccaccaccccgactcttcccacttaagagatgagatcagatgcctaagaagagacaaagaggaagaaacacccccagggccacgcagggggcacctttcctggcagcctgcacccctccccagggggagagcacggaccagccagggggtcgcggcccgcggcccgcctagctgtgtgcgcctggcttcttgcctcgccaaatctcaagtttccgcgtcctcagaaagggggcaatcaccatgccatcctaatagactgttgagagcgtttaataaaagcagtcaatctatgaaaagcactgtgcaaactgcgcggtcagtgtaaaggctcaatccacattcgctttctctctctctctttttttttttttaaactctctgggctggtaaagtctgaactttacgtggggatgatctgaaagctagaaaggatcgagaaaaatcccaaagctctaagcctgagctagggagggtctcagagggaggtctgactgcagaccgggagtcttctcctcccgtgcgccgctgcccgggacgagaaacccgtggggcatccaggactaggacacgaggtctcagcctgggcaggtggacaagctgtggggtcccaccctccgcaggcgatggcttcccaaagtctgtacaaaccggtttcgccgggccggccatgcccgcccctcttctcggcgtgggaagccctttcaaaagtggaggggagcgagtgtcgcgccctgccaaccccgactgcgcctgggccctccccgcgccgggctccggagccgcccctcctgactctgcgaccacggccggggaccctgcgcgcgcccgggaatgcagagtctccagcgccgcgcagggctcgccccgacctcggccggccctgggcaacccgctccgcggccagtccccactccaagatgtggctcggctcccacctccgcgggggggaaatgtcgggcgacccccacactgaccttcctgcgcacccagcgcaaactacgaacccagagttggagctgcccgcagaccccgcgcagccagaccccgcgcctttatcccgccccgccccgccccgcccggcgcaccaatccccggccgaggaggggccgcgtggcgccgcggggggcgggccgcgcacgccccccgcagggaggactcagggacagtcagggccccgggagagtccgcgcgcatcgcccggctccgcggcgccagccatggcgtccgtgcgtggccccgccagggatggggcgacgcggtcagagccgcacgcgaccgaaatccgcactctggagccgcagagcgcgcggtcttgctgtttagcggctccctggcaagtgacgtggggaagaaacgcagggcgcaggagagacagctggaaaggtttgc

SEQ ID NO: 39961 - DNA, 2300 bp, Homo sapien
gttatttgaaaaaatgaataaaataccatttcctgttttcactgctgtttggattttttttcaattagagcaacaagttacagaagcagatatgaaaatccagtttttttattttatcaaagagaagtataaagtttaaaataatggcactccttccactgaatattttttgtattggaaaactgtttgtttgtttgtttgtttgtttttgagatgtagtcttgctctgtctcccaggctggagtggagtgcagtttcaccatctcggctcactgcaacctccacatctccggttcaagcaattcttctgcctcagcctcccgaaaatatagttattttcataatgatgtttatgttaacatgtttatcggttttaaatgaattaataaaggtgttaaacatttatttgttttctaacactaaatattaatagatataaccaacattaacagtagctttttggagttctccatttttaagagtataaaggagttttaagatcaaaaagttagagaacttctgcctgaagagtattaagtttaacttggcaggagtaagaggaaaagctacatgctgtagatggttggagggtttttaaatttatttttgtttttaatacctatgtattgttaaagcgattctgtaatagaggcagtattgctgcgcggtggttaagaagtaggttttctaggggagtggtgcttgcggtagtgctgtgaagcactcaccagcttttggcatataaacagcaaaaaatattaggtacttataatagtggaataagaagaaccaactccattacgaactgtccgtgttgttgaactaaaacttcacattcaattaacaatttgttgggtgcctccttcatgctttccctttgtggagaaagagatgaatacatttgtacctgttttatatctttagggtttcctttcccccgcagttccagtcttttcaatttttaaattaaaaaaaaaaaacaaaagcctttttaactgtgaccattcattattttgctttcgggaattggaattgtctttcagtctcgaatgttctgggaaatgttgtctctgggcttcctcaatatccctttgcacttgctgaaataagtgactgtaagaatccaagttgttggctgggcgcggtggctcacacctgtaatcccagcactttgggaggccgaggtgggtggatcacgaggtcaggagattgagaccatcctggctaacatggtaaaaccctgtctctactaaaaaaaataaaaaaaaacaaaattagctgggcgtggtggcgggtgcctgtagttccagctacttgggaggctgaggcaggagaatggcgtgaacccgggaggcagagtttgcagtgagccgagatcgcgctactgtactccagcctgggcgacagagcgagactccgtctcaaaaaaaaaagaaaaagaatccaagtgcttacctggtttcaggtgccagcagtggctacagttagtgttcctgtaagggttgcttgaggaaaagctcaggcctttcccgtaatgtggcccatcctggacacctgcctcatcactttgggcctgtgcagtaaaagcagagatgtgccatggtgagaaggttctcttctactcgcttatttgagaacattagctggggtgaagggccttaggtgtcttatagatgctgggcacctggtgggtccagtcactaaccccacagaagccaccaggcaggttccacctgtcttgtcttggagtagtaaagagcaaaaccctcatgacccagaaaggtatgaaaaggcgtatgttttgaaaagacactattttccttttgttttctgtaatttgggttttggtatgattagggattgcaagaaagcttctgctacttccggcatttaacttggaatcactgtcttaaatctacttgaggcactgagtaccttcctgtaagttcatatcttacaggaaatgtctctaactgtggtttgtttactttttttccctttataatgcagaatagaagatggttgaggggactggacacctgaattggctttgaagctcacctgccttttctgttggaagagacttcctcttccagggggcgagtgagtagaggccacaggtcagtgtgagtatgtggtaggcctgcctgtagggagggtgggggggttgctgttagaaccagcaaagcaagctgggcagctctggtttactctcaagacatgcctgcctgggtgctggggacccgttgaagaacatggcagtctgaagccatatgtgactggaccatcttgacctctaa

SEQ ID NO: 39962 - DNA, 2300 bp, Homo sapien
aactaaatgtgggtttttgttgttgttgtttgtttgtttgagatggagtttcaatctgttgcccaggctggagtgcagtggtgcaatcttgtctcactgcaacctccacctcccggattcaagcgattctcctacctcagcctcccaagtagctgggattataggcatgtgccaccgcacctggctaatttttgtatttttagtagagaggcggtttcaccatgttggccaggctggtctcgaactcctgacctcaggtgatccacctgcattggcctcttagagtactgggattacaggcatgagccaccgtccccagcctgaataactaaatgtttttcagcatctaacattttcttctacaggtttgctttaaaaaaaaaataagaaagaaagaaacacttcatgaatttacatgtcatccttgtgcaggtgccatgctaatcttctctgtatcgtgccaattttagtatatgtgctgccaaagcgagcaccagatttgcttttttataagtgttttttaaagaaatggtataatgaaacatacatatagaaagtgcataaaacaaaaatggacagtttcacaaatagttgtaaggcaaagtcctgtgtagcccctaactagcttaagaagcagaaccttgccagcacgcagaagcatctacaaatcttgcaggaggcagcacaggcgcaccattgactttaagctttgcacctgtcctgtgaggtgggcatgctttttcctattttatatatgaggacaccaggatgcaggtgggccacatggctcccccagggccacacagctagtgggcagtagagcgagaatgaaacccaggcgtgttggagcctgacagcactagcgctgtttctgcaggtgctaagggggaggcttggccacaggggtgggcggcagggctggagggccagcctggacggtggacagggagagaatggactcggggattgaggtcaccctgctgggcagggaacgtgggaggagagacacagagcaggtactctgaggtgaagaggaagcctgctctgctccccaagagtccctcctcaccatgccttcccctcacttctccctgacagtgtcaggagagtccgtcgttcagctaaagcttgggagagggcgcccttgattcctccgattagacaaagaggaccttggcaggcaggtctggggacttgctagtgctgggtcactgaggagtgtcctttaaggcgatgggagccgaggggaagacggaattactcccagagagaaggctcccagctacgctagctcacagccctcaagtccactgctatactgggtggcctgaggacttgtgccaagttccaagtgagataagacagaaaacaagtcactggtcaaggacaggtcaaggtaaagccagccagaagagttatcattccaagaagttcacaaggccattatacagcctttggaacgagacatttctgcttttccataagcagctgggaatttctgagacctgtttacagagaattagaacttctaataaaggatatgtgaccaatatcactttcacccttggcctccatctgccctgttcccacacctccctaggtaaactttattctagtttctcatgcatcttttcagagctttaaaagtgcatatctgagcaaatcaaacactagatttgtatttccgctccatgacaagtttaacaatctagaagttgggtcggtggattgtctcctacaccaccgaacctgtctctgagtcccaagcatcagtcagtctagctaaactgtcaacagttgcatcttatttcgggcagcagtgttacaggtgggctgccaccaaagttagacatccatatggcgcgagtatttcacgagaggcatttctatgagaacaaaagaaaaaccaatgttagtaattagaataaactagaaactcggtttttaagctcagaaagcagccaggtgagaagatttctgggttttggctgaaagcatcttcagctggggtgggagcaggccgtggcagtttgacaggtttccccactttacagtttgcatcaggtgttccaggggcgtttctgagtagtccatatagcagcaggcgtgaggaccacgcatacataagttgctgtgctttctctacggcttgtgtcaagtcatccagttttcgttcgcagggcttcaggaatagagcagttctcatttcagtgattccaaaccagaagggtgggagaaaaatattagtttggagacctgtagccagacatttctggaaacgagaagaattcaggatccag

SEQ ID NO: 39963 - DNA, 2300 bp, Homo sapien
agggcttaccacctgggtccaaatcagatgtctcctactctgattcacccatgtccactgcccaccccatggacctcggaccacagagtctggaggctgcggtctcttcttactgggagttagatttctaccctgtgtctgatgttatggggtaggagctggggcttatgcctcctctctggagatggggaggccacatcagatcccatagctgaagtctttaccaaacaggtgctgccatgcgggcacttaggtgaacacgagaagcctcgttctagaacaatgagtcacagcctgcttgtttagccatccagcccaggtgccaccgccttcttccctccacagctgcaggtttatttgcttctgtctctgaagaggtgaggtaaggtgttgttcttggaggaagaagctaggagcgtagagtaagacctggatgtagaaacggctgctggaggacaggacctgtggtgggtggaggtggtgagggggcagtggcacctggacggagcagacccaccttagcctgtgtggggtgcggtttccctgctggctggctctggggaccccccggctgttgccacagagaggaaagacctgtggcctcagattcagacagcctgagcttgtccccacaacttattgctgggagatctcggtgagtcatttaacttctaggatatgtgggttcctcgtgtgtgaaatgagaataaaaacaaatccctgcagacttgctgggggcattaaataagatagtagaggcggagtcgtttttatataaatggtaaaacactgcacaatttttcaattgctcattaacttctctgcattgaattaaggcattaaaatgatctcacttccgtcccggactagccatgagaagcgcagccaccagtccactctgagcctcagtttcccctcctgtggagtggacgtgcccgcctctgagtggcagggcagggatcgggactgatgcggttctcatccctcccacagggtctccagccacctgcccttcccgagaagagagagctctgggccttcttcctgccagtctggtcttcgagtgcgttcaggacagatagaccttggcacaggctgccccgagattcctgcgacgctgtctgttcctgccttctgtggagcatggcacccacaggcttccaggacggatcatagacccgagcctccaggagggcgccctgtgcggctcactgcgcggtccctctcagctcccctgccacccagcctctgaggccggctcctgtcccggaaatgccctcgggcacctggatgaggccatcccagagcgggacccaactgtgccacccaccaagcctccccctgcgccccccgtgccctcgcatgtccggctgccagggcagactgtagaatgtctgtgccccagatccacgtggaagaagtgggtgcagaagagggggcgggagcagccgcaccacccgatgaccacctccggagcctgaaggccctcaccgagaaactgaggctggagacccgcaggccctcctacctggaatggcaggccaggctggaggagcatacctggcccttcccgaggccggctgcggagccacaggcgagcttggaggagggggagcgtggggggcaggagcccttgctccccctgagagaggctgggcagcaccccccttctgccaggagtgccagccaaggtgccagacccctgtccactggcaagctggaaggctttcagagcatcgatgaagctatagcctggctcaggaaggaactggtgagtggctgcccccaagaatccccagaaaagaggagatgccaccgtctctctgtgtctttttctgtctctctctgtctgtctccccacccccaccatgtatttcttcccctctctctaacccccaagtgcacatctgtaatcttcccgtgagttgaaggcaggcgtcatttgtatgtggctggggggacccaggtgtcatcagcccctaattgcagacactaatgaaggaagcaggtgttttctggcagaacctgaacccatgttaaggtgtacccccctccccccaacaccgctcccagtactggagtctggctcctggggtgtgactgcccctccctctgtgctggaacctccccaccctgctgtccaccccagctgcctgccactccggggaccactcttctgcacgtgagcggcctcttcttgtgctgggcgctggccgggtggctccatggggcacagtggctggggtgtggctgtgcagggcgctgctgtgaggagctggctcggtgtggaatgtgctcga

SEQ ID NO: 39964 - DNA, 2300 bp, Homo sapien
acaccacccttgccttggacaggctgcctgtccatttgaggcatgccacaattcccccatgagaaagcatctgcactcccagaaatagaagccataggtcaaacagggagccaggaggtagaggtgggacaaagcatttccagatggggctgaatggcccatccaaaaagatcttggagcattcaccacgtgccagggccatgggcacaccagtgagcaatgcagccaactagggctcagcaccggggctgtggtcagaaacagccagcacccagaaggatgctttatccccaagtccagattgaggctcctgcttgcaaacatggttcatgcccttccggagcctactgcctcagagggagacacatactaatcaaataacctcacaggtaaacttggaattataactggtccatgaaggacataaggcagggggctgccagcacctgtaacctggggttcccttaggaggcagagctgcagcagcctgtcgggaggagcaggtgcacaatgggactggaagagggtctgttgtctggggagcagggtctgtgcaagacaaggccctagagacggacagaggccagccaggcccctgcagccaagctagctgttaatcctcagaggactgggggcgttgaaggcctttaagcagaagcagctgagactggatttccattcttaagagtttcccctgtttgtggaggagtaactggcttgggaggcgctgagagagggtaaagggagatcagtatggagactgcgtgcacgcttggacccgggtggcaggtcccagaactgggtagggcaagctgctggtggcttgggtagggacagtggcagcgggcaggaagaaggaaggagtgatgtttaggagctggaatcagaagatctggatcaaggctgtgactctccaaaagatgcttgttaatacacccgctagcttaggaccgttccctcattagcatgactaggtctgtactggcaagatgtctccttagacgacgtccctcagaggaccttccagtgaaggtcagaaaggaagggagtaggtcagggctggatgcggagttgcagtgaaggacgcgggcaccagagggcagcacgagtgtctcgggcccctgcaggggctaagaccccacagaaggcccgaccagccgcgcacctgcctggagcctgcgccagtcactttgcagccccaccactcagcttcgcgtctggccatgtaggcggcgcctgcgcgcacgcccagggctatcgtgagaatggcagactggagccctttgaaagacgcttccagccccgggcatctaggaaaggtgcttgatgaggtctggggtaagagacccccatccagtaaccagccttggggcctccagtgtctggcctgggcccctcgtcagaagctgggactggtcctgaagacctgcggtccgggcagctcgggctgctgtcctgcctgtgccttagggtttgcagctctgggctctgatgcagcagggactgggtcttagaatctaacgacagccagaggtggccgatgccgcgcccctggcgggacagacaccctgtggttagtggggcaaacgctcgcgtctttgcacctcagtttcctcatctggcagccagagatgcctacacttgccctgctgggtcgttggggggcgtggcccacggtaggcgctcgcgggcagtcgtggccgcgggtcctatgaactcctgccgtttgggggtgggtgaggccctgggcgtggggtccccctgcgccctccatgcggacaaacttctgacagtggcgcagtcacgttgccacaattgggggaaactgccttggtttcgggtttaatgagaaaatggatgtttgggtttggtttcatctggggtttggcgaaggcatgtagttcctctccactcgcgggggctgcccgggccggtgaaccgacagggcgctaggacccggggcgcgctcggacccggggcgagaacgcgaggccgggatcgcggtgaaaggctcgcggcggagagctcggccgtcgccaggcaaccgccctgacgcaacgcagggggaaaaaaaaagtcctttccgaaaggagcagcgccgagaattcaccggagctcggggaggcgaggcgggagccctgagctgaggccgggcagcgcggacccgcgcaggaggaggcggcggggacaccggcgagtccccagcagggcccctgggctcccggaaggtgggttcgcgccggcggcggggactttcccagggactgggaggtgtggccgcggcgggcggcgcagtctgg

SEQ ID NO: 39965 - DNA, 2300 bp, Homo sapien
gtgttcccttccttggctctatcctcccccaccccggctcacatgaatctccagaaacccaggtgcaaacacctgggctcccagaggctttggagggaggtggggcaagtcatagaattttcccaagttgtcctatgtctgagcagaaaacacttgcacaggcctggctcctggctcagggcggaaggctgtgggaggataaacgccgccatcaagcctgggcagggactcatatttgctaccagcactgggtgctagggaggttggtgagtccacgcccagcttcccctgtggcctgggggcacctcgtgaagggatctgagcctctctgtctatagaaaggatgcgtcaaagtttgtcaaagtttgccttttgccgatttcccgagaaagaagatggaatcttctacaactccattttagctccttagaaaagaggcaagatcacacaatcccattaaaaacagtggggagatccatgcctgtccttctgtcattgactggggatgggggaaagccggggggcgggggtgggcactggtggccacatcacatcagcagtgaactaagggtgctgcttcctctggcctctccttcctctcctcctgcttcattcctaaggttggagaggacaaacggcttggctcacacaccacccagcccggcaccaactacccatctggaacattcctggcttccctgggttggctcatctcccacccattccttcttcaacagaggaaactaagcagaagggttattgagaatgcacgctcattcattcatccatttgttcacttgtagaaacatcattgattacgtacccactgcattccagccctgcactaggcactgggaacattccttactcaaagatgaataagaaaccacccctgagctcataggactcgtagtctactgggaggataaccaagaggtctgcgtccacaggggtgagtgtgggagtggcaggtgtcccaggtgatagggaaacacaggtgaagggcagcaatttgagttgggggaggggacatagagcaggggaaaggagctagaatcaatacatttagggaaagattagagaatctgtgtgttctaggacctgcaaataggcacatctgacctgattgagtcagatcatataattggtactggatatgtttgtatgggtgtgcttgtgtggggtgggtttttaaaacgtaatggctcttctgatggcaagaagacttttgcaggaggttcagaaggagtatgatgtgtaaaaggttggatctcaactgtattttaatcttggcttctgcttgatttcttttgggcctcatctgatttcttttagactctgagatcctagaagcctgagtgacttgcgcagctgaacatcagggtgagaaggcccagctgggggtggggtgaggttgagaggcttttatgcagacactctaaagtatttgcaattgccaacagatcgtttttcctcttggaaaacttctaagaaaatccaagtccttcaactctgtgagcatgcacaagggtgcagagaggcccatagggaaaccgagtaggaaaactgaggccaggctggaggggcacagggagggggtcccagaggaaaagccgaggaacctgtcctaaggtgggggcaccacggtgggccttggctgcagaactgttagccccaggctggtctggcccttcctgcaaccactggactgcccagtctgctggatcaaggcctttatgagacagtaagaggggaagagtcctgctcatttgtttattctgacagtgtccaggggactcccatgggctcctcactccaggacacttggctgctgggcagagtgcaacccactctgaacctttctctcttcccttccttttgcctcccttctccctctcccctcccctctccttcatgtcgccttcgctgttgatgttattgtgattcttcttcttcctccccctccccctctgcctcctcatcttcctccttaccccctccttttcctctccctttctccttcctactccctgtctcctccccgtaagcctatggcgtcatcccacagagccatttgtctaggagggctgattgtgaaacattttgatcagaccatgaaacatcagtgggttcttgcagaagtgatttctctgtgtgttcatcagtctgtcctctgcactgtggcttctcgcatcttccaggaccctaggtaagcccatctctgggtgcctgtattgatttttctcttcttttctgcctctagttctgtctgtgaagcagaaaccaagtctcaatcctaa

SEQ ID NO: 39966 - DNA, 2300 bp, Homo sapien
aggaggctggtgaaggcacatggaaggagagctgaattttgcataagtcacctcaaatgtacaaaaataaatggcagaaccagtgatgctgaacgctgaactgggcgtttcagagctagggtctagtctcagtcccgccttgagaaaaccgctttgaggttttctaccaaaaggctccccagcctcccctaacaagtgtcactgttcccatcttctccccggggtcctttccccacctctcttccgcctttctcatgggcccgtgactgtgagggtgaaaatggctgaaattaactttcacttctgctcagacatctggaacccatgagcaaagtcatttccttgttttctttctgagtggctgctggaatcgtgtgtgtgtgtgtgtgtgtgtgtgtgtgtgtgtgtgtgtgtgtgtgtctggtattgttattttccaacctctgtctgttggggtgggcataaaggtgatgtcttatcacagatcacataagggccagcacacctccctgcaaactctcacatcccctcccactctaaccttgggtagacagaccatgtattttctttgtaggatgctgggtttcctgctctccactacattctctataccctcaagtccaagtatataaaagttgtccaaacgtcagctatttaggccctattgaaaaaatgttagaggcggttcaggcagcgtcacaacatcctggttcagtaaaagactcagcctagggatctgtctctgagagtctgtaggagtcttagtcacgaatcatgttcaaagccttctccttggcagcttcccccagtgacccctgatagaattattgcctccgcctctggtctagcactgtgccccgttgaggcctctgtggctacatctactacgctccactgcagtgatctgcttatcaggccccttctccaagctccttaggctgagactctcagaggaggatggagtgtagctgcgttggtatccccagcctccagcaggtgcttagcacagagcaggtgttcagaaaaacagtgctgcattaattgaattgaaataggaagactaagttacctcatctcaaatcagtcactttttaaatcagaagctcgcagagtttggaactcatgtttcatgtttggatccatgtagtaggtatcaggaagtgaatgtaagagtaaattaacaggagctgccatggactgagcaggcccagggttctggacattgttgtgagccctctgctaccacgtggagaagatcagctttgggatttaaagcaattagccacattcacatcagcttccaggtatttgcagtttattatgtgctaaatactgtaatagatactttttatgcatgaatccatttattctcacaaaaccccttggggaagtgaaacagattatttccatagtgtcttaaaaccccagaactctgcgttgctgcgtctattgacatgaacacctgtcaaacctgcaactcatagctcagtattgtctcagtccaatccaaggaaatgaactccttgagaaagctgacattctggaccatggggtagaagctaccctgtctgcctcccacacccactctcaaggatccaagactatgaagggagaagagagagcccaccgagtgacttcctcttataagccaatatcaagacactagtggaaaggaaccagctgaccagtggctcactgtgtctggctggaccagcaagactctgacgtcatcacagaagccttcttggtcccattggtcctttgactgctgtgtacaggatgccacccaccactccagacaccactcaccactctagatgttgggatccttctcccgttacctccattattcttgttctctactcctctgagttttcatagccaagcaaatttccaccattgaagaggctctgagatccaagtcaactaactactggctagggtactgtaaaacacatgggaaattagcttttaccaaacaccaattctatgcccaccattcatacccattctaccatttaatgctgatagtatcctgtgagctagctattattagcatcatttaaagacaaagcaaaaccagtgaggctgaaagaacggctgccctggtgcacacagatggcacatggcagagcccaagccctctccatgagatctgcagcgtttgtccacacggcagggcaaattaccttgtagagtcagcatggaggtttgctaactctgccggacttggtgcagaaaaaataccagccgtgctgttaaaccaaaaccccaggagaaaactttctggtgacagaagg

SEQ ID NO: 39967 - DNA, 2300 bp, Homo sapien
aaaaaaaaaaaaaaaaaacttaaaaaaatgaatgggcacatccataggttctgattttgacacatggccaagactatcaagtgaggggaaagggtgcagaaaaacacatacatgcagcatgatgtacacacacacacacacacacacaattttatgttcatcacacacatgcatatttgtgtaaacatgcagcaaagggatcccagtgataccaaccaaagagagccccgtgacctccgaggagggagcggctggggctgtcagcgcagagggataaggaagggcgctggcattttacccgcattgctggagtcttctgtagtgagagtgcattaatgcattcggagaagaaaaaagccaggccggcaggcagtgatggatggttcggtgcaattgtgcctggtggcagagaatggatgacgtgacccctggggttgggtcccgccctggggctctagcggccccctccagccccttccctgcccacttcctctcccgatagcgccctcccccaggttatcagtggggaggccaccccacaccacactgccttccctgtgcccgccgcggagccctcagaacagtccatcaccgcttatcgtccctgtccctgtgccagagaggctgctggggggtccaggccgtgcacccaccagccgagaggactggcccctcccctccacccaggccagcatcctaatttgggggaggggacttctggccactagggacaactccatggctatgacatcccaaggagggcattcttcagaacccccacttcctacaataacagtcacggcgcctggcattgatggctgcctactagggccaaccactgtgcctggcaagggatgttctttttgttccttttcatctttttttttttttttttttttttttaagacagggtttcggtcttgttgcccaagctggagtgcagtggcgcaatctcagctcactgtaacctccacctcccgggttcaagtgattctcctgcctcagcctcctgagtaggtgggattacaggcactcaccaccatgcccggctaatttttgtattcttagtagagacagggtttcaccatgttggccaggatggtctcgaactcctgacctcaggtaatccactgacttcggcctcccaaagtgctaggattacaggcgtgagtcaccgtgcctggctccttttcatctttacacaatcctaactaacttcagagatggggaaacactcagagatagtaagtaacccaggtcaccagaagatacacagcagaaccaggaccaggtcaccagaacccaggtttgtgctgtgactgcaaacacagtaacaggtcactgcagagtcttctgcccggaaagcaggggtcc[450 bp omitted]ctagaacccaactggccccagtgccagcaactgggcactgtcctcatggaaaccaagcacctcaaacccagttggccccagtgccaggaaccgagcactattgtcatgtagaccaagcacctcgaacccagccggccccagtgttaggaaccgggtactgtcgtcatcagcatcagggtcaacctctggaccctggcttcctcagcattaacaggaaaggttagaagccctgttaggtctcttccaactttgtctataactctgaaaaagcaacgtggagtttctctggcacactctttgaggaaatagaattcgccaaaccaatgcaaatggagaaatatatttcacctgagtagggaagaaaaaccttgtaaaggcttccaagaacctccagaaacctactggatgagcttaccactaatctcttttaaagcaattccctgacaacactctgttaatctctcctgagctcctta

SEQ ID NO: 39968 - DNA, 2300 bp, Homo sapien
cccgctgcagcccatcccgcactactaggagaagccggcgtaggagcgccgcctgtgtccttggctgtggggaggacgtcagatggcaccccgccagacactaagccccaagcccctggcttgttgctaagaaaattcactgcccggtccagactcagcccttttcgccctttaagggtcgcgcgtgggaggcagctctgagaccccgggtagcgctggagccacagatttcctccgagaaaagaaaggccgggatagcttcccgctcgcccaagcccagattttccactctccaggaaggccttgcaggtccctgccgcaggccttggcttcgcgcctctctcgctcgccccccacgaagatgattgccggtttcaaaccgggagcagggagtctgcttccttctccgctgagtccgaaggatcgcagattggagcgtgctccggagaccgcttttccgcagcgccggcctccgagatccccagcaccccttcagccttaagttcccacgtttcgggtccgtggcgccaattctgctaagtagcaggctaggaattgggggaagtcggagaagaaaccctaagtgtgtcgcccccagcttccgggatgcaggcccgccggggtctagaggggcggctgccgtgcgtccagcctgtgcgcaggcctttcgccgctcggcgccccaggcagcctcagtttcctttcctctgtttgcgccccagtgaacctccgcacctctcattcagggaagagaattccccgcgcagccgcgctcgtttcttcctctgggattttcctgagaatccccaggagttggccacgatcccatggggggtttccttctacccagccccgcgtcctggcctcgtccttaacccccgggttgccttcactcaggctgggaatccacgattgatttcctactacggaagcgggtggcgttcccagcctgctttcggagcagcacgggtttcgtgcagggtgttatcccgaccccttcccccatccctctaatctggcttgagaagcccgtgctggagagaaaaacgcggccttaaaaaaaaaaaaaagtttaaccgaaagcgtgagagccacccgccggctgttatctggggctgaaggctgcggtaatcgatgggttatttttacgcggtaatagggccctgtgattgctctattaacctttagacctgtctgagggactctccggctcgcagccccgctgcgctggggcctccaggctctgacgccgactcccaactcaggcctgacacattcccctcccccataccctggaagagccccctccatgaagaagctcccctggaccgcctggctccccagcccttgccacgtcccttggattggtgcagagccgccgcaggctgcagaaaaaagggggaaagattagaagagaggaggccacaggagatgggaagtgtcgccaggaagggatgcagattgcataaatacataaaattgaggctgaggcctgggctcccgaccatctccctgggattttgggaaggcaaaagggaggcttcggtctctacgctctgattttaggaggcagtctgggtgtctcctgaacctccaaggaatccggggctgggaggatccccactacccctgcccaggaactagcatccagccgggcaccccgggtgacccagtgccccacacaagatcgagagttgagcccaagaggtcaccttcttctctactggccccgcccctcgcccgccgctgcgggatgaggaccacaggaagggggggcggggagggagaaagggaactcattaataaagctgaccctgggcaccacagcgaacccaatcgacctccggctgggttgcgggtgattccccgctccctggcggtagcacttgggcattttccgcggagaccccagagcctggactttgcctgctgggggagctttccgcacagtcccgcagcctgcgcccagcggaggtgtagccggggccgcgcacccccgccccgcccttgcacgtgactcccacaggccagtcagcgccctagggccgagttgctgggccggggacccgagccgcgagctggggacttggaggcggccggcgcaggggccgcgagaggcttcgtcgccgctgcagctccgggggctcccaggggagcgtgcgcggaacctccaggcccagcaggtagggcttttttcttccctttctttgctccttcccgcggtcccccaaactcggagcttctccgcctttgcttgtctggaggtagagaggtagctagtgggaggaaaagagacgtgc

SEQ ID NO: 39969 - DNA, 2300 bp, Homo sapien
ggagaaaccctgtctctactaaaaatacaaaaattagctgggcatgcttgtgcgtgcctgtaatcccaggtacttgggaggctgaggcgggagaatcccttgaacccaggaggcagaggttgcagttagctgggatcgtgcctgggttgcactccagcctgggcaacaagagtgaaactatgtcacggaaaacaaaacaaaacaaaaatgtggcccctagaccacagcatcagcgtcacccagcagcttgctggaaaggcaacatcttgggccctggtatagaccttagaatctgcatttaaacaaggttcccaggggattcataggtacattgaagtttgagaagcgtggctttgtgatatttctataataccatttaatagatatcccatttaatgaatgaagtcagagatactgtgacttgcttgtatccccacaactaataatgaagcaatatatgcaaagagctcacaacagtgttttgcacatagtacgcgctcaataaacaataacaatcaatgacagagccaagctgtgaaccatgagattttcaattgcatagccccttagcctcagaagaacccctttaggcaccaggcattcattccaccaggtaaggcgaggactgtggctacggcttccctcccggctcagccactctacagaaagagaaactagggggcccagaagctaccattgtggtgagcctgatcctatagcaggggcatcctgggggtgggggggtcgttattctccagaaaaggccggacatagaaagagggggaccagaggctcttcaagggatgcctcctgcaaaccccatgccctccaacctcatcccctctgcctccagatgcctttctagatgaggaccctataccctaggcctccccaggcctccctctcctcacctcctgccctagcctgttcagtaggtgaccactgtgggaaggccacttgtaacctccctctcaatcagtaggacacaaccatgtctctgacggtgggctgggcttgtttccctgtgctgaccaagtccttccccagggacccctcagctagggtccatggtgacttcaccccagcctatttcctgaacacctgctggggagttccccagactttcctcccaacttcctggaaagtgctggctccccatcctccttcgagaactaaagacaagaaaacatatgtatctttaaacagcctattgttttatctcttttattctatgaaataaaaaatttaatacacaaatactttaagcaaaatttgcttatagtaaaaattcaagtaataaaattcaaataatagaaagcaaaaaaatcccacccgttcaacatttcacgagtcttgaacacctgtttcctttgcacccgacttcattaggctcggaggccaagcagaacccacagaaaggcttgccattgtgggaacacccaggctgtcccattcacacacccattgacttttccctataactgtctccttgagacaagaaatgttccaaaagggccgggtgcggtggctcacgcctgtaatcccaccactttgggaggccgaggagggcggctcacctgagatcaggagttcaagaccagcctggccaacatggtgaaacccggtctctactaaaaatacaaaaattagccgggcgccagtaatcccagctactcgggaggctgaggcaggagaatggcttaagcccaggaggcggaggttgcagtgagccgagatcgcgccactgcactccagcctgggtgacacagcgagactatctccccccgcaaaaaaaaaaagtttccaagagcgtctctccaatgttagtcccagcctgcacccttcttccatccctgctttcactcgcgaccctctaatgcagccctgcctccagcgacccccgggatggaacccctcgcccacccacaaaagagcagcctcgacctagacccactttccagggaatgagccctgcgcctgcgcgcaccccgccaccccctccaggccggagtccacgcccacttgggggaggagccccgcagcctccacctacaggggcgtcccctaaggggacggaggccgcatgggccgccgagccgggaaatctccgcccccagctggagcggctgtgcgggctgcgtagcggtgctgggtcgggccgacgtgccacccacccggagccggtgagtgcagccgcccgccctccggtagatctgcggcctggcggagaagtcgggaggggacaggaagggagggcgggccccgggccctcctccgtctcagccgcctgcggaggtgct

SEQ ID NO: 39970 - DNA, 2300 bp, Homo sapien
aagagtgggcaggtttgtaacggctgtaagggaaacgtgatcacttcgggttagagggaagggctgtagagccacatggcaagcccaggacacctgtgcatttcctgactttccctgacagcatccagtggcttaggataaaaaatggagacattggatgttggattaccccacaatggacatggacgtttgtcagggtaaggatggtgggagacctaagggacaaggagaaacattatttttttaaaattacagacgtcaaaagagtcacacaatacaaagtttatagagtgaaacatgaaagaatgaccttcatccctgccttaggaggatctctggagcagctttgctcatagtgtctctgactgcagtgacttacggaaaaaactaataattgggaaaatactagtacctaacagttgagactaagtgttgtggttggtgccgttggaactccatggaacatgttcctcatggaagaggtggggaagggggaatgtgggcaggtaacaacccacactcccatgcttctctcccagtgagtgagatctaattcaccctggcagtaggtcctcagtgggtttcaggttggttccaaaaggaggtagggcctggtgcagtggctcacgcctgtaatcccagcactttgggaggctgaggcaggaggattgcttgaccccgggagttcgagaccagcctgggcaacatagcgagaccccatctctacaaaaaatacaaaaattagccaggcatggtgatgcatacctgtagtcccagctactagggaggttgaggtggaaggatcacttgagcccaggaggtcaaggctgcagtgagccgagatgatgtcactgtactccagtctgggtgacagagtaagaccttgtctcaaaaataaaaaaataaaaattttaaataaatacataaaaggaggtaggcacgatatgttgtaagtggactgaaagagaggagatggtacagagacagcagggtggagtgtgaccagtggcggttatgccttttgtgcctgtgcctgttgcctggaaggaggagaggttttcgcttgacaggactgtgaaggagggcacggaaatatggggggtcgggggtgaatctaggcttccatcttagtaaggagaggcgggatacgtgtgagaggcggcagcatgctggcagccctgcagcccttgctcgctctcggtgcctcctcggcctcggcgcccattctggccgcgcttgaggagcccttcagcccaccgctgcaccgtgggagcccttctctgggctggcctagtccggagccggctccctcggcttgcggggaggtgtggagtgagaggcactggcgggaaccagggctgcgcgcggcgcttgcgggccagcgcaagttccgggtgggcgtgggctcggcgggccgcacttggagcgggcggccggccccgccggccagggcagtgaggggcttagcacctgggccagcagccgccgtgcttgatttctcaacaggccttagctgcctccccgcggggcagggctcgggacctgcagcccgccatgcctgagcctcccccgcgccgccgccgtgggctcctgcgcggcccaagcctccccgacgagcgccaccccctgttccacggcgcccagtcccgtcgaccgcccaagagctgaggagtgcgggcggatggcacgggagtggcaggcagctccacctgcggccctgcgcgggatccactgggtgaagccagctgggctcctgagtctggtggggacttggagaatatttatgtctagctaagggattgtaaatacaccaatcagcactctgtatctagctcaaggtttgtaaacacaccaatcagcaccctgtgtctagctcagagtttgtaaatacaccaatggacactctgtatctagctaatctagtggggaggtggagaccttttatgtctagctcagggattgtaaccgcaccaatcagcaccctgtcaaaacggacaaatcagctctctgtaaaacagaccaatcggctttctgtaaaatggaccaatcagcagggtgtgggtggggccagataagagcataaaagcgggctgccttaaaaaaaacggtggcaacacgctgggtttgctttacaacgcttgggaagctttgttgtttgcaataaattttaatacttgtctgtttcggtctgcactgcctttatgagctgtaacactcacagggtaggtttgcagcttcactcctgaagccagtaagacaacgaacccactgggagaaacaaacaactccagacgcgccga

SEQ ID NO: 39971 - DNA, 2300 bp, Homo sapien
accttcaaataaggaagaggaacaggctatgacctaatgctttcttggaccactataagcatgccagggcaaatatttaggctaaattgtgagagctaagaacatgaagtacattgatttctttatcatagctagcagatatttaagaatgttagcacaggtctttgaataaagtttgcttctaagagaagttactatttattcctaattaaatggggaggaaagtctttgaagaggaacctctactttactttttataccgtcatggctggaaactaagtttttaagatttttctggggttcccttggccgaggtggggagtgggagggctgtccagtggtagggacttaggatttttagtttacagtagtaggggaaacactctgtaatctaatacataagtaaatgatgtattagaatatggtaaatataggcaagtagacccccactgggattagcagtggtggaaatgtgagagagggcaaacaggtgggtctagatgaggtgtgagcagactcgaggggcacaggagttagtcaagccagtatctgggggatagtgcaggaatagtgaacagctagacaaaaagtcctagggccagagaaagcaaaagcataagagatggaggccagagaggtaatctgggtggaaggctgcagcctctcaggatccctataggtgctttggcttttgttggagagacactgaacagctttgggcagtgaacgtacctgacaggtttcctgtttgtttttgagatgaagtctcgctcttgtcccccaggctggagtgcaatagcgcgatctcagctcactgcaacctctgcctcctgtgttcaagcgattctcctgcctcagcctcccaggtagctgggattataggcgcctgccaccatgcctggctaatttttgtatttttagtagagacgcagtttcagcatgttggccaggctggtcttgaactccagacctcaggtgatccgcccgccttggcctcccaaagtgctgggattacaggcatgagccaccgcgctcggctagacctgacaggttttaaaaggattactggttgctgtgttaaaacagactgcaggatggcttaggtagccagtaggtttttttttttttttggagacgtagtcttgctctgttggcctggctggagtgcagcggtgtcatcttggctcactgcaaactccgcttcccgggttcaagtgattctcctgcctcagcctccggagtagttgggactacaggcgcccaccaccacactcggcttttttgtatttttagtagagacgggtttcaccatgttggccaggatggtctcgatctcttgacctcgtgatccacccgccttggcctcccaaagtgttgcgattacaggcgtgagccaccacgcctggacgggtagccagtagtttctagggctggagagatctaggatgagagaagtttccacattcctgttacaggctctctaaggcttcagctcctttttctaggactaagctggatctcaagtaaacactagagagggggcagctgaagctccaggagtgtgtggggctccctggggctggatggcggtggcgggcaggcgagctgggctgtgctcgggtgtgttacagtaaagacgcccagcttggcgctggcccggccttttcacggttttaggctctacagagagcggctgcagagctcacccggctggcaggagccaccgaggccggacacgtgggcgacttattgaccaagtggggaggaagcagccccgcactgctctcccgactgcggaccaccgttgggctcctgcgcatcctaagccccaccgcctcacctccagtccccacagcgttcgcgctcccagccggggtaagcggaagaaaacaaaggcccggctccatcagggcaccaatcccgctcgtcggcctctttctcggcctccaatgagcttctagagtgttatcacgccagtctccttccgcgactgattggccggggtcttcctagtgtgagcggccctggccaatcagcgcccgtcagcccaccccacgaggccgcagctagccccgctggcggccgaggccggttgaagtgggcggagcggcgggcggggcgtcgccgtactaggcctgccccctgtccggccagcccctcgaagcacctactccacaggtccagccggccggtgagcgcctggggaccgcagaggtgagagtcgcgcccgggagtccgccgcctgcgccaggatggagttcgtgaaatgccttggccaccccgaagagttctacaacctg

SEQ ID NO: 39972 - DNA, 2300 bp, Homo sapien
acctcttgagctcaagggatcctcctgcctcagccccaacaccctccgagtagctgagaccacaggtgtgagccgccatgcccagcatcccctattatatctggcaaccttagtagagaagatacttagaaggaaaacaagctttcaaagagcttcagaatggaatgagagcggatacctttctacaactcagtgagtagaaaaaagcacatagctttatagatagaaaaaatctgagatcacccaaaccacacagctcaggaagtggtcccacaggtaatgaccaagtcaggaaagaagatttccacaggccccactcagaccaaatctctttccagcaggttgttctgtcttaacgtgaactttggcagaattaaatcttagatttcaacacacagatttttaacaacctaccctgaaatctcaaaccaagttttgaggctttaattccttggaaaatactgtcgagtctagctcagtggtccccaagctttttggcaccagggaccggtttcataaagacaattttcccaaggacagagggaggaaaatggttttgggatgaaactgccacctcagatcatcagggactagattctcacaaggagcatgcaacccagatccctcacacgcgcaatcgcacctatgagaatctaacgccgagtggagctcacgtgataatgttcactcacccgccgctcacctcctgctgtgatgcccggttcctaacaggccacgtaacagaaggtttagtgccggtcctaggcctgggggtcggggacccctggtctggctgtattccatgtggcaagttatcttggctggtgacaaatgagtccagggctaagcctcaaatgaaccaattaactgaagtctccctgggcccaaactaattttggtgtcagtggtcacagcaagaaagtgtgcttacaacaatgcaaatccaacgctgcagctcgaaacaactcaaattcaatgattaagccaccatccacgatgggctgcagaagagtagactttatgagtacctgtagcattaatggcttctagaaagtaccgaatgccctagtacaccaattctcaactcgagggtccacaggcctccttgctgcactgagcacctcagtgagagcacatcacaagctctgctgcactggagtagagaggaaggtgaaaccccgagcagaagtactgttctgcccccaagccaatcacctgaagacagcttttgcctttcttaagacctgaatatataaactgataactttagaaaacaaaaactgctgggggaaattttttttttttttttttttttttttttttttttttttttacaattttttcctttttttgagatggagtctcgctctgttgcccagactggagtgcagtggcgcgatctgagctcactgcaagctccgcctcccgggtttaagccattctcctgcctcagcctcccgagtagctggaactacaggcacccgccaccacgcctggctaattttttttttttttagtagagacggggtttcaccgtgttagccaggatggtctcgatcccctaatgtcgtgatccgaccgcctcagcctcccaaagtgctgggattacaggcatgagccaccacgctgggccatcaactccattcttgagctccatcttttccacagtcaggcaggctttcaagcgaactgtacttgacaaatgcagagcaattaaattctttattataaaaatctcaaaaatgtccacctttactggagaccaatcttctaaaaggtcaaaagcaatcctgctgtttctctctgaaagctaaactcctttaaatgagaatacgagaatacccagaattttattcccagcctttgtgtggaaaaggcagtttgcattcttaggaaacatctaactgttacctaaaccataaatatttctatctactccattcaacccaattaaagaaaacaaaatgatgagaaaaataggagccgaacagaaagaaaattcacatcattttctactattacgaacattcaaatggtgcttcaaattaaatacttttaattatcattctagccaggatcatactaagtaggatctcatgacagtcacatatgcagcgacttcacctaaaccgtggcactgaatgctctgccatgagccacaagcagcacagtgatcatcacccacaaggacaggttgctgggatgaggcaccctttcctttcatgtttaggttcttctcacctgcatttcactttcctaaaggtcccagccacacagcgttcttttagggattaaagtag

SEQ ID NO: 39973 - DNA, 2300 bp, Homo sapien
ttgggggattcggggtggggacaactctgacaaggcaagttatagaaactttctgagtcccagtttccatcagtacaaaaatcacaatccctctggccatgaatgatggcgaggattaggtggagtggcgggcagagcatccagcagattgcaagtccacgtgtacaggtggcgaagcagctccctttccctgacatgctggcccgtccgcaaataccaggagctctcactgctactctgcttcaagaaagcatccctttagtgtcagtgagctgtcttaattttgtcatttaattgtggtaaaatacacgtaacagaaatgtaataatcttagcaatcttcttttgttttctttttctttcttttttttttttttttttttttggagatggagtcttgctctgtcacccaggctggagtgcagtggtgggatattggctcactgcaacctctgcctcctgggttcaagcaattctcctgcctcagtctccccagtagctaagactacaggcatgtgccaccacgcccagctaatttttgtatttttagtagagatggggttttgccatgttggacagcctggtctcaaacgcctcacctgttgatctgccttcctcggcctcgcaaaatgctgggattacaggcgtgagccaccgtgcccagcaactattttcaagtgtacagttctgtagcattaagtacattcacagtgttgctcagccaccaccaccatctgtcccccgaactctttttcagctcgcaagacagaaactctgtccccattaacaccaatattgtagcccctggtaagccccactctactttctgtctctatgaatttgactcctagggacctcatacaagtggatcacaacagtatttattttctgggtgagctgtgttttttgttaagaaaaaaacacagccaggtacggtagctcacgcctgtaatctcaacactttgggaggctgaggcaggcggatcacctgaggtcaggagtttgagaccaacctggccaacatggtgaaaccctgtctctactaaaaagacaaaacttagctgggcctggtggcaggcacctataatcccagctactatagaggctgaggcaggagaattgcttgaacccaggaggcgtaggttgcagtgagctgagattgcgccactgcattccagcctgggcaacaaaagtgaaactccgcctccaggaaaaaaaaaaaaaaccacacacacacatacaaactaatactacacattttgcagatttcagaaatgaacccagtttccaggcagaggttcacgggggtgcttctcttgctttaaaagctgagttgggcaaatcgttgaggcaggagagtggggcaagtggctcatcacgcctctaatcccagcactttgggaggccaaggtgggcaaatcacttgaacccgggagttcaagaccagtctggccaacgtagcaagaccccatttctaccaaagaaaataaaagctgagtttgagccccaggagcgtcccctggtgttgagagatcagttgcctacaaggtctgaggtgcccctgtggccctttgaggggactgctgcagagggcccagcccggacatggcagcctcacccggtggggctcgttcctgcaggccttcggggctgtggaagccatctctgaccggatctgcatccacaccaatgcgcacgtcagcgtggaggtgtcggcggaggacctgctcacatgctgtggcagcatgtgtggggacgggtgagtcaggctgtgcttccacagcgggtttagtgctgagagaccctgggccccagcttctcagtggaggggactttgaggacttcctgggactgctgcgagtcagaagtgtttcggggagactccgagagtctggcaggcagggcctggcaaggctgctgcttcctgggaggtgcctgaaccaaggctggcccggcagagctgtctgaggggtggcatcccagcaaaacagtcagtttcagaaaatgtggtggaatgtctggcccctggtctggtttgtgtcatcgcatgttcctttttcctgcttggggaaccagtttggggcatttccttatgtgtagttagcggggatggctccaccttaacaacaaggtggtggcacagaactttctgctccagctgcctgcagcctcgccttggttccgcagtagcggtgttcactggcggctgcagatccgaaatgcctgagggcttaaaaaaatgcatgggcttctcccctaactagttaaatgggaatcactggcgattctcatttcagagaa

SEQ ID NO: 39974 - DNA, 2300 bp, Homo sapien
gttgctgtggctgaccttgtacaatattccactcataggtgtcttcaggcctatggagagcagcttgcgtgggctgggcctgcagtacctggtttgcatagatgattggcaggtgggcagcacggggaaggacctgtgagtggccaacctggttcaggtgagggaggtggagtggggcttctctgcttcccctggttccctggaagcctccaaggctggtgagcatcactgctgcctctgcacacctgtgtgctgggtgggttttctgacaggttttcagttgcttcggggctacagctgcagggagcctgctccatgggacagatgggcctctggtgcccgttcatcaggggactgatgagaccgaggcctgagagccctttggattttgtttttgtccttaatttaatcataagccaagaatctactaaacacagttccattaggggcaaagacgtaacacatcagaggccacagcaaggctgtgattcatactcaaaaaggaaaggtctctgggtcacaacagagcatagttgaggtcagcacactcccacccagtgcagggctgctccagcattgaggtgtgtctggcaggttgaagtaggggaagatgaaactcgccgaagtcttgttttgtggttgcacttaagtggtcaaaacttcaggagcaactgccgttattagcggtgagtgccaagactagtttttatagaagagaaagaaacaaagtactctgggaaggtcttactgagccttcacagtctccccacctttccactgttcccgtgctcttagccgctctgctggcctataaggcacagtcttcatttgtggcttctggcaaaatgtaagcacttgacttttgtttttgttttgttttgttttgtttttttgagacggagtttccctcttgttgcccaaggtggagtgcaatggtgcgatctcagcccactgcagcctccacctcctgggttcaagcaattgtcctgcttcagcctcccgagtagttgggattataggtgcacaaccaccacgcctggctaattttttgtatttttagtagaaatgggatttcaccatgttagccaggctggtctcgaactcctgacctcaggtgatccacctccttggcctcccaaagtgctgggattacaggtgtgtgccactgtgcccggccaactttcaattctttagagctgactatgagaggagccagcagtatagccacagcaccaacgaatgaggaagagcaaaatactgcatgacagctttgctaagaattctttcactttttttgtctatcagccaggagctagcaacttggcttatttggaaattttaagtgtacatatcctgtctccttaaatcctttacagatttaaagtgcagtctacctgagggctctgtgaccatgtaagaaagctttttctttctttttttttctctgagacagagtgttgctctgtcgcccaggctggagtgcagtggtgtgatcttggctcactgcaacctctgcctcctgggttcaagcaattttcctgcctcagcttcctgagtagctgggactacaggcagcaccaccatgcccggctgagttttgtatttttagtagagacagggtttcaccatgttggccaggctggtcttgaactcctgacctcgtgatccgcctgcctcagcctcccaaagtgctgggattacatgcgtgagccattgtgtccggcctttttttttttttttttttttttttgagacagagtctcgctctgttgcccaggctggagtgcagtggtgtgacctcagcttactgcaacctccgcttcctggattcaagtgattctcctgcctcagcctcccaagtaggtgggattacaggcacccaccaccgtgcctggctaatttttgtatttttagtagagacaggagtttcaccttgtttagtagagacaggctggtctcgaactcctgacctcaggtgatccgcctgccttgacctcccaaagcgctgggattacaggcatgagccactgtgcctggccagaaagccttctttattgagcttggtggcagcccaaaactgattctttaagggtgtcaggacttaacacctcctgtgacttagccgcacctcctctcctttgactttcattccacctccttccaggatcgcaaggtccctatttgtcctggaaacggcttcaaggtagtctagggtgccgtttgccgggggaggaaggtgctctggttgatagagtcgcctggccgcacactctttttggcacataacaacgttctacaga

SEQ ID NO: 39975 - DNA, 2300 bp, Homo sapien
gtatttttagtagagactgggtttcaccatttgggccaggctggtctggaactcccgacctcaggtgatctgcctgcctcagcctcccaaagtgctaggattacagtggtgaaccaccgcgcctagcctgtttcttttgtttcaaaagtgatttttacctctcaaaagtgatttctataatgacactgatggaaaattccatcaaatagccataacgcatgtcaagcactctgctctgcataccttctgtcacactctaaggatgagagaggggagagttatcctggttctggctgtgtcctccccattttggccatcttatgagctccttatagaggtctgaaatgatttggagtccagagtccatggctgtcaggatatgactagggtgagcaggcagttgggaccaccttgacctccagcctcctggtcctcagttcctcgggtatcccactctgctgggggcttagtgaccatgtttgggctccagagattattttttccttccactcctatccttagtttgttactaaccaggcgggagtacaggcatgtctctgaagacaggctcagggctgtgtgacagctgacgaccaggctgcagggaaccaggtcccatgcagtcctactgcctttttttttttttttttttttttttttgaggcggagtctcgcttttcgcccaggctggagtgcagtggcacgatctcagctcacgggttcacgccattctcctgcctccgcctcccgagtagctgggactacaggcgcccgccaccacgcccggctaattttttgtatttttactagagacggggtttcaccgtgttagccaggataatcttgatctcctgacctcgtgatccgcccgcctcggcctcccaaagtgctgggattacaggcgtgagccactgcacccggctactgccttcttactgtcgccacagcctggataaaatacgattcttctgagccttttttttttttttaatacagagtttcactcttgttgcctaggctggagtgcaatagtgcgatctctggtcaccgcaacctccgcctcccgggttcaagcgattctcctgcttcagtctcccgagtagctgggattactgacacgcgccaccacgcccggctagttttgtatttttagtagagacggggtttctccatgttggtcaggatggtctcgaactcccgacctcaggtgactcaccggcctcggcctcccaaaatgctgggattacaggcgtgagccaccgaacccagcccctctgagcctcttgaatacaactggggtcatgcctgctttgcaggtttgtcttaaggattaaagctgtttggggagtgtctggaggagggtgagtcttgagccaacccctgcatctcccttccagggcctcccggtaataaaccccaagtaaatgtgcactttgtccgtcctctcggagcaggtctccgggtactcctgtgccaaaccgatttccgcccccaaggtccttctcctcttagaaatcctgacgcagctcctaggttccttcgcagtgacagccactcttttctatttgtacgtagctgtagtgttttgtgggtacgttctctgaacaacaaagtggcccttctaaaggctgttctgtggggtccacagcctcgccacccccagcctctgcagcggcttctgaatgaatgaaataagcgacggcgccctctccaccaccccacccccgccaactcggcaggcagggatcccaggcgcgggttctggcggaggcggtcccgcgaggcggggggacttttctaggcggggtgggggccttgggaccacctttaggggctttttccccatcccctggccccaattcgcagcgtttcgccacccagggcccgcagggctccaagcccttcttccccagcccgcgcgctcaggcccccgcccgcccccggcggtggccccggaccccgagcggaagggggcggggggtgtgcggggccgggaagcggggagcgcgggcggcggaaggtggcgggagggggtgggggctgggaagcaccgtgcgcgggcggcgggagggcccgggcggggctgcgcggtggtcacgtggggcggggccgggagggtacttagggccggggctggcccaggctacggcggctgcagggctccggcaaccgctccggcaacgccaaccgctccgctgcgcgcaggctgggctgcaggctctcggctgcagcgctgggtgagtgctggggacccggggccaccgcagcgtaagtgaccttggcggggacggtgctacccg

SEQ ID NO: 39976 - DNA, 2300 bp, Homo sapien
atcaagactaacagcataatgaactgttgtttgggggaatttgaccatctgattctaaaatctgtatggaaatgaaaagaaccaaaaatagccaagacactcacacacacaaaaaagataagtgggaagatttggctctgttggagacagactcatagatagatagatagatagatagatagatagatagatagatagatagatagatgatagatagatcttatttaaaagtttattaacttattatgaagctatagcagtaagacagcatggcattagtgcaagtatagacaaatagaacaatagaacagattaaggttcccagcatcagactcacgcatatgtggagcctgatttaaaacaaaggtggcacagctagacagtagagaaacaacaatcttttcaataatttttggtcttgaaacaattggttttccataggggaaaagaaaactaaataggacccctaatttataccatacacagaaatcatcacaggtggttatagagctaaatgagaaagaaaaataataaagaaaaaagaaagataatataggaaatagttttatgacctgggagtagggaaagattagtaagcaagaaccagaaaattaagaatatgtgtgcttactgtattggctgggtggggtggctcatgcctgtaatcccagcactttggaaggctgaggcaagtggatcccctgaggtcaggagttccagaccagcctggccaacgtggcaaaaccccatctctactaaaaatacaaaaattagccaggtgtggtggtgggcacctgtagtcccagctacttcggaggctgaggcaggagaatcgttcgaacccaggagatggaggttgcagtaagccgagtttgggccattgcactccagcctgggtgatgagcaagactgtctcaaaaaacaataataataataatattgagtacctactgtatggcagtgtgcgtgcaaagcattttataagctgtatctcatttcatcctgaaaaaaaaccacgcataaccttccaatgcactttttgaggagttcttgaggctgagatgctaaataatgcatctgagggtctaggcctgcaaagcagagtgtacccaggaataccatgctccactgacacaccacacacagccctgtggttgttggctgcctgcgtaaaagcctgccttaagggtcagaacaaaatcaaagttagtgtcatcttcaccctcagacatccctcatcaccccaagagagacaggcctaagggcccttctccagggctgagtctctgtcactccagagaagccctgtctggctccactctggacactgtgcatccaaccttgaacacagcactgaaccgactcttctaagggagagtttcaactcctcaactccaaaaaagaaatctctcctagaaccttcagagtcccctcatcctagccaacgtttcataccagccatttggagaacaaagtccatcagtgaacttttccaggacttttttttttttttttttttgcagtatctgccttcagccaggtaaataagtcagctgctagacaaggaagctgtcccttctccactagttctgagcccctaccttctcttggtcaggccactggttgacaatttgagagactccgtgtgtcggaactgtctttccaggcttaaattcagcctgtgtttcataacaccctttctctgcgctcctgagctttcagtggtgctccagaggaaaggagagacagagcagacattttcactgccatgtttatatcaaagtacatttgaaggcagagggaaagcgctcaggcctaggcatggggatcctggtcttttctcctattctgctatcaggaaacgtgacagccttagctgagtctctggttttcccgcggtttgtagaaaaggaggtagcactgaaaggccagggccttttcttcctcgaattctgcagaaccctgtgatctcctcagtctgcccctccaggaagagtgaggccagggtccagccccacccatcgcagcccagcccagctctataaaggagcctcccaggcagacaccactgggagttccaactctgtgccctcttcggccatgaacctctgtctttctgcattactctttttcctggtgatcttactgccttcaggtaagacagtgggcgtgagtctgaacataaaagtgggtgttcccaaagattgagatgcttaaaaaaccctctaactataagcccagcaacaggacaccaatatcaaatgggccaccatgttaggggcatggtgagcggaccccag

SEQ ID NO: 39977 - DNA, 2300 bp, Homo sapien
tcaccaaggctgccaggaagcagtgtccttagagaaggacctagcattttgccaagacacagagatggaagagtgttcttggggaagacataaagtagaaggtatgtttatagtagaactgtggttctggacggcacagtgggaagggttgagatggagacagagggagtttcttggagaacagaagatcaggaccatggcagctgagagagtgcaaatcaggctgtgcctaatgctgcaggttggaaagtgggtctcaggagagtcccttaatgcatttgtgcttgcttaatcttttctctttgtgctcctcaaaactcaggtcctctattctttctctatttactgattttctgctctgcagttctttatgagtctttcacagatgtgcaatctcaaccacatcgcaaacatcctgaagttggaaaacaagagtccattgaagtggcatacatttgatgcattcttgtgaataaaacagggacagagagagggaagcatgtgttcctagtcctggctatttcactctctagctggagaagcaacatgtctagttttatttctttaaatagagaaaggggtctcactatgttgcccatgatgatcttgaatgcctggcctcaagcgatcttctcatctcggcctcccaaagtgctgcgattacaggcacatgccaccacacctggccaatatctatagttttaaatgtcttcttctgttacatgagtctaatagttccttaaatatatgttctatatgttctataaaggactggccttaagagttacttcatttggccttgcgacaagccttcctgataggtgggaatgatggagtacaacctattttttgttgttgttgttgtttaagacagagtctcactgtgtcacccaggctggagtgcagtggtgcaatcatggctcactgcagccttgatctcctgggttcaggtgattctcccacctcagcctcctgagtagctaggagtacaggcgctcactatcatgcctggctaatttttgcattttttgtagagatggggttttgccatgttgcccaggctggtcttgagctgctgagctcaagcaatccaccttcctcagcctcccaaaacgttagaattataggcatgagcaactgcacctggccaggtgtacaaccttctttccaagtgagaaaactgatggtcagtgaggtaaagtacgtgctttattaaaagcttgtcaagctactgcatgcagagtccagaccagaaagactttctgattctgggttttgtgttcttcatacagtatcagataaagttgctgaaaaacttaaaacacttcaaaaactgtcaaacactgtcgactttagtccctccaagcaagacttttgtcataaattctttgtatgcccccccattacccggcacacagcatatgctcaatggggagccatagactcagtgtttttccctgggtcatgttgcgggtgttatggggacttgctttttccatgctgtttttgaggagctcttattttcctaaagacattacagctataccagaactgggcaaggccatactttagtacttctgtatataggagtcagggaagcctgcttataaatcatgttgctaccatttaggatctatgtgagcttgagaaagtcatttcttctacctgagactctttatttttgtttttaaaatggagagaatcatgcctacctggacttcgtgtgtgtgtaaggttgaaaaaaaaaacaaactctttgtcaactatgtaaggcagccttatggttctctgcacactataggcattttagtggatgtacaatgaagatacacagacacctacacagcaccctaccagggcctagaatagggctgcctacacagtgttcatgcagttgctagcatgcatgtggcacccaggaagtgtgctttaatgaagggatgtcatgttcaaacagacattttgctgattggattgctcagtggagcaggcagatgttcttgttccaaaaggttcactagccatgcagctccccgtctcttcaaagctgcggagagagtgactctccgatgagtcacagctgcttctttgctgattggtatggccacaaggagcgtcctcttggccctcgtggtccttaacttactcttctatgttccaccaggtaaaatggagtccccaccttgtagaattaggaatagtaaagggaaaaaaggtgtgaggttctacaagagtgagaaaaaggcaggacttggacaaaggaagctgcaacagggaggaaagtgagcagagatggacat

SEQ ID NO: 39978 - DNA, 2300 bp, Homo sapien
gacctcccaagtaattgggactacagtcgtgcaccatcacacctggctaattttttttttaatcttgtagagacagggtcccaccatgttgcacaaggtggccttaaactcctggactcaagtgatccaccttccttaaccttccaaagtgctagcgttacaggtgtgagccactgcacctggcccagtttcaaagaatttcttgatttctgccttaattttatcctttacccaaaagtctttaaggagcatattgtttaatttccatgtacttgtatagttttgagagatcttcttggtattgatttctatttttattgcattgcggtctgagaatgttactggcatgcgttctttttaatttgttaaggattgctttatggccaagcatgtggttgatcttagagtatgtgccatgtacagatgacaagaatgtgtattctgttggtgtgtggtggaatgctccatagatgtctgttaagtccatttggtcaagtgttgagtttaggtcctcaatatctttatttgttttctgcctcaagtatctgcttaacactgtcagtggggtgtcaatgtctttcgttattattgtgtggttatctaagtctcttcataggtctctaagaacttgttttataaatctcagtgctccaatattgggtgcatatatatttaggattgttaagtcttctttttgaattgaacactttatcattttgtaatgcctttctttgtcctttttgatcattgttgcttttagtctgttttgtctgaaataagaatagcaaccactgttctttttcttttccatttgcttgctagatctttctccatccctttcctttgaggctatgaatgtcattgcgtgtgagatctcttgatgacaacatacagctgtggcccagcctttctactcctgaatatttgcaaaagaaaaatgaaagcatatatccataccatgacttgtacatgaatgtccatagcagctttattttcaatagccaaaaactggaaataatcaaacatcaatcaatacgtgactggataaacacatagatgtatagccatgcagtggtgctcagcaatgaaaaggaatgaacaactaattcatattatagcaaggacgaatctcaaataattatgctgagtaaaagaaacccaacaagaaagagtatagaatatattattctattcacatgaaattccaagaaaatacaaagtaatctatagtgtcagcagaaaagttgtggcctttagactgagaggtgaaagagaatcaggaggggaatattacagaaggcatgaaaaaatgttagggggaatggatatgttcattattttgaatgtgacaatggtctcacaaacgtatagatatggcaaaacttatccgattgtacactttactgtttgaagtttattgtatgtcacttatacttcaataaaaaatgtttttttaaatagtaacaattattttaaatgaccttgacaaaatattgtgcaacacttaaaaatactatttatgaagtttatagtgacactgatatatagtatatatcaagttacaaaagcaggatacctaattataagaatattgtttatagctatgtaaaacaaaatattaaacaacaaactaggcataaatgaaactttctttagaatgacagtttgtctctgagaagagcagttcatctgtaacttgtccatccttgtcatgtttaatattttaccaattttctaaaattagcaattacatttttattggaacaaaagcctatcaaattttaattttactcatttaaaagagtaagagcacatagttctcaggcctccatgtacttttggaaaacctgggtgggagaacagtgtctttgtcaataggaaaagctgtcaaacaagaaagggctgtccattttttttcctcagatgagcattgccaacacggctgcctcaggggtgttcagtgtagcatatctacctgaagcgaggcataccccagccctgagaggtttgtataggactgtgtgctcaacctcttctctctgttccctgacagccgatgtcagaccctgccactagcctccttaacagaagttcccagccatgaagcctctccttgttgtgtttgtctttcttttcctttgggatccagtgctggcaggtaaaactggcatattttggggggtaggggtgcttcatatagaagaacaatgccactaaacaacccaataaacatacaccacccatgggccctttaattttcaagctagaaaaaagcatcaactagttttgatgtcagcaag

SEQ ID NO: 39979 - DNA, 2300 bp, Homo sapien
ggcaccacctaataaagcaaccccttgccacccaaccacaagagcacagcctaggagccactccaagggacatccagtcacattaaaacctcagccatccagagcaccaggcctggtgatgagaaagaacattttatccttaaaagcatctgaatgcccatgctgcttttcttgcagagaaaagtccaaaataatctgctattaaagaacgaggatggttttggcatttttaccaagctaatggtctacgcagacaaaatctcataaaagggcactctgttcttcttgatccactcagacatggcctgtgagtgaagaaacgggctctcctcctcaaagaaatcactgctgatcctcgtaccagcctgacactgcttcatgggttcttcaaagagagtattcccataggaactaaaagggaagaggaatgtgtctggagggcattgtgggcagcagtgggctttgggccaacttttaagtttgaaaatcaagattccctcttttcaaggggccgccagactgagcagatacaggcaccgtgaaaagagtgtgccatattcagattcaggaaacaaggatggtttctggtcagttcctccatcatccttcaggtcatgcgattcccatttccctctgtggaccaaacaattcagtggggtttctgacttttaaatatttcattatcaacatatcatccttttagcctccagaaagcattttaacatgaagattctggcttaagactcttgtgggtctgtctgtttctctctctctcttttccttgaaacggtctcactttgtgacctacgctggagtgcagtggcatgatcacagctcactgcagcccgacattccaggctctagcaatcctcccacctcagcctccaaagtacttgggactacaggcacacaccaccatacctggctttttttttttttttttttttgggtagataggaggcttcaccatattgcccaggctggtcttaaactcctgagcacaatcgatcctcccctttcggcctctcaaagtgctgggattattggcttgagccaccatgcccagccaagaaccttgtctcttgtgatgcaccccagaacaaaacatcactgcaaaaacacaccagggcatgagttttagtcctaagtctcatttatccaccatacactatgtgccaggcacaacgctaagtgcttctatggacgagcttcccttaatctcagcagtaacaaccccaggcaatggggcctgttgacagatccatttgccactgaagacagtaaggctcagagagggtaagtggcttgtgccatgtcagccagctaaggaggggcagaaccaggatgcaaaccccagccgcctggcttcagactcgcgttcccaaggtcccactacacttggtcactccactgcattctggtatcctggtctttggcagagtccacgtaaaagagggaggtagagggagtgagagggacttcatgcaatagagtttcccggcgttacactgccaccgtaattgtgtccccgaccaggacctctctcttctcatcctttccgtgatcggccctggagaaccttcgaaagaactgtcctccttctcccgggatctcagagaaaattcacctgagttcagtgtccaggtgacccaagctctgaatgcagtaacgtgcacagggagatgaggatgtcaccatgagcaagcctcccagacagcatccgggagcaaccccaagactgggcaggggggctctgatgcagcccacggcgaggagggctgcccgtgctgcctaaatgggttcagaatgaaggccgccctctctcccatgtggggctcattaaccacgaatccaattattaagacaagctcagctgagcaaatggtcaaacataaaaacatgtggaaggaacaaagaggtcaaccccattatccatcaaaaaccatcaaggtggcagccctcactgaggggtacggctctccagtgggtcctcatctgccctccaaacccatgtgcctccccagtggaaggccagcaaagccacacaggaagagtaggcgtaggaaagcacaaagtgaaccccaggaggccagcctggctacgcagccccatcccacacacacaggcccggtgactcaggggcccacgtgtgcaggacaccgggagctcacagggacagcgccccgggggatggaaggaactttgcctctctgtccctctctgtagggatggaaagaggagagcgatttctgggatggaagccatctgcctcctctcaactctcgctgcccaaccagaaa

SEQ ID NO: 39980 - DNA, 2300 bp, Homo sapien
taaaaggctgtgtattcccttggaggcaggctgggagaaagattgacagtattaatttgtggcagtggagcagtgtcctttctgcaggggacctggcttcccattcagacaagggaatccgggtctgtgaactggcttatgtctgggaattgactggggactgtgactctgtttttatgattcagattagacttctgctcacctgatctagaactcttctgcaaacacagatccagtaaaaatgtggcaggcttcttatctatttcacttctaggaaagccacgatcagctggcaccgtaggtctctgagagtcaggctatgctggttgcagctttgactctgctgtcttttatggtaactgcatccaccttgcctttggggattgagtgctctgatcacttggccccagcccctgtagtgtgcgtatgtcacttaccctctttatacctcagtctcctcctctgtaaaatgggcatcctaatagcacccacccccaggactgctgtgaggtatagatggattagcatatggcaagtaatagaagaggatctcaaagtccatgtgtcgttatcagaattatttcatgatggggagagctggaggagagaggaaggtgctgagcagacccacgtgctctcccaccagtgtttcctgagcacctactatgtgctgcccactgtgagagctgttagggttgaaatagggagcacagcagggtaggggctgccatcaggagcttagtggggagaccgttgtgcaacatggttccagcacttggggtggggaagctcagggagtacagcggcctaggatcctgggcagaaacatggaaaggacacagccgccccagcctctcctgcctcccctgcctccctggcctcctctgcttccctggcctctcctgccttcctggcttccccttccgccctggcctccccagtctcccctgtctctcctgcttttgaggtgggccaggagctgctggtgctcacttagcctgtcctggactctgggtgtagcacttcgatgtccagaaaataccccccagttcagcccatcacacaacctaggaaggagctccacactgacactaagggtgcatcctgggctcattcatcagggcatgcctccaaaatacttctccacgtctcctccctttgcccacctgcattgtctctgtgcctcagccccagctggaggcctgcaaggatcccctatctcctctgcccctgcacggctcggtcccaggcaatctgtctgcccaccacacctttctcctcttgcccaccacgctccagccccacagtcctctttctgcttctttcccagcctctgggcttttgcacaggctgttccctctgcctgaacaccctccactgggctgagaacaactctctgaggcctctctcagctgttgcttcctttggaacagccgctgctgctgtccctctcccagctccaagacctgctgagcctcctgtctttttcagttcccatgcccccagcacttcttcttggcctccttttgcccaattgacaatgtccattctcaatgccttcccacccagcgctgagccccactgggtgaaggcaatgcctgtcatgttctccacaatatcccctcccccatcaccacgcctggtccacagtgatgctcaaaaaagatctgttggtaggcaatgggaaggtgcattcatgtcatcctgcaggcggaattctccacgagttttgagcagcctcgggtttcccaccacctccaaatcatggaagacacagggtaagagcaaagacaaggtggttgtggccgatgtccaccatctcggggcgtcctttctcttctctcctccttgggcagggagaccatcgggtgcaacctggctggggcggggaggaggtgcagggcctggccagagcgggcctggccacaggcaggggacagcgactgcttgggcctgggcaggtgagagccgggcaggccagtacccggcgtgtccgcggtgcgcgcaagcggccggcagagggcgtcagagagccaggagcggcccgcggaggagcccgcgcccgccgggatgcccagccccgcgccgcgctgacccaccgagccctcgctcagacgccccagctccgccgagaggccgctcgcgccgggtccttcctcttccccaggtgcaggcagagcccccggagtcatggccagcccttccggcagctccgaagccactggcaagccccgaggcagggatggccggcccaggagggaagaggacgacgtccctcccgaagagaagaggctgcggct

SEQ ID NO: 39981 - DNA, 2300 bp, Homo sapien
cacatactttagcaaaataattcagaaatttgagaaaatatctattcataaaaatgtggcatgtaaatgcataatagcaaagtgaccaaggaataaattgaatgcagaattatataagaaatctcattaaacttttccaaaagaccaatacttacaaatattgaaagaatacaatctgttgttgaaaaaacttagtatgttggtgaagcccttgtttcatttatgcagccctaacaaactgatttgcatctgaactccttgggtgagattcttggtggagattctaccccaacttctgagtctccccagtcttcaacagctctttcctcacagctcacctccctttacttcaacgtccaccaaaaccacttgtttccatccaaccctcgagttgacacaccagggatcttcagccccacttgctagatttctcagtttgtcattgcatagatttagcagggaaatggaggctgtatcaaagacccctagtatatgcatttgggtgtccccagctcttgcctctgtctctgagcagttacctgggatcagagaataaggcagctcttctcttctatccctcagaaggctcttgaaattttgtccctggagcctctctaactggaagtagcagttcatctcatgacaccccacattttattcaggtgagtcctgagttattacacagagacagacacagctgtgctccttttactgcagtccagaagataaaacaccagcatgataaaacagccgaacctgtcagccaccttgcaagccttttctatatttgattcaatgtacttttcccgaagcaaaatgaaagttctcacagaggggccctcctctgccttgtcctcagaattggaaaatgtattgtccgtgaaggagcctcaccactgaacctaaaactcaagagaaaatgtttcctgaatatcaagtgggatgacttgaaattttgtcaaacaggcagaatcttaatacgatcggccttactaaggctaaatggccttatccatggttgaaattgacacatcatcatattaaaaaatctccacgagtgattgattttactctgcagccagggtttatgtcaagtgtgaggataatgagcaagaaattcaagcccttggcaaactggttggagaggcaaggactgtgtccaggcagagctcatatcattatttattgtttaatctatttaattaaatatgtaatttacccacaaactgtggctgacattatatgtactcctgagccacattaagatgtactatttgtgctgtgaaattctatgggatttgacaaatgcatggtggcagatctccagcgattattaaagcgtaacacagaatgcttctcttattcaagctcgtcttccctccacatagagggaatcaatcgacttttgtatactgatttttgaatttgcttctttatttccatcttctttaattaaagcacaagatatcgtactcaatttccatttgatcttccaaaagaaagtactgaataatccacacctgaatttcagtgattcagactcaggtccaccgctaagaccaaacgtcctgtgctgccacctcatggccagcagagggcaatgaaacccacctttccggccatgcagggcgcatgcgcggtctgcctcccgcggcgggccgggtctccagggaggacctgagttttcttcacccattgtcagggaggcgccatcgccctggctttggggctggggcctccggggaggttccggtaggggcgttggagaggccgctctttttgcaaggcccgagacggcgggccttgcgcaggccgccctattccgcgccctcagggcgtcagtatcagcctgaggctggatacccccgctgggcccagatgcccccgctgggcccggagcatcctccggcgctgccctcccagagccacgcagaggctgaggtggcgcgggggcggccctggctccgcgagaagcggcggcagcgagggctggaggacccgggctgcggggctccggggcgtctggcctgggtgggactgagcccatccagggactgggactccggggttctggtgtaggtggatccggggcaggctcaggaccaagtccctctccttccaccaaggagcgcccagaggccggcgggagctccaggttcacctcctcctcctccaggtgtttacttttcctttatttctgtgaggccagaaattgtcgccatccttcacatcggtgaatagggaccctaacactcattacctcaggtttattgttattgccattaacagtgttggtggca

SEQ ID NO: 39982 - DNA, 2300 bp, Homo sapien
ctcagggctcggtagaaccacagaatcttgggtgaaatattgctcaagaacaaaaatgtgcttattcagagtgtttgtgtgtgacatgtgtgtgaattaaagtgcaatgagcatgacacgcaggcaggacatcaattcggctcacctcaaaagcagttatgagcattaaaggacaacaattcctaggtcccgcttaaagagataagaccatccaacaccctgtgtgaagccacggcatctggattgctcatgtttctggggaacattcttctgaaaatggcggctcctttctccctgtggagcatctttctaagcagtgctcctttcttcccccaggacactttacatcgggcataggaagccttctgatgaagcacacctggcccatgaaaagacaaaggaaagaaacagggccaaaggtcacagcccactcatttcatcaccatccttaaaatcatcctaatttcatgggccatgaagccagggctgtttctttacacccagaggccttggcgccgggcctcaattctgccctgttccttactgtctaagacattttgggaaaatccctagagccaggatcttcattcctggtaagccagagagcctgaagacacacccaaatgctgtccctcttagttcagggaacatgtccactttcgtcagcattacaatttttgcatcaaaggtgctaactgcaattccaccatacaatgcataactggaaatggagggaacatctcagagcatgaacaaccgatgcgagaatccaggagatacacggtttatttttgccatttcccagtgaaacaagagccagtattaaaaaggttatgctaccctctgtttcactcactgcttttaaacgtctccgatgttttcttcttcagacagggcctcactcccgtcacccgggcttttctacggtataattttccttgtttgcttttgtcaaaattagaactttttatttcatctctatgaaatgttgatccattatcacgtaagtatggaaatagtatcacccatgctgtgagatacgttgtttttattttcatcagttctttaataaacaaaagcttatagttgggatacctttggatttctcaagttttttgtttcaagttttcttaaactgccgccgcacgtccgaaaccactcactatacaatgtcaggaccatctctcttttctggcacacataaatttggggaatgtcatcaattagtctctcggtgattgcatgatttccccaaagtctttcacagcctactttgtgcactgagtaactcttcaaacttcagtgcatgtttctaccatttgatgctttattatttggcagcctagcttccacaagagcatttcatgcaaagacttgtcttgttctccactggccagtaatttcactcggatagagagtcaataggctgaacgtggaaaggttatccctggaaggtctgtttgatgccacggatatctcctttattattaaggaagaaaatacgctgtgctaaatactatacttcattgactattctcaggtcagaaagcgcacttcagacttcttgtccttccgtcgatgagaggatgacggtagctgccaaaagtacatacttggaagttcatcccagcacaagcacacacacacacacacaaacacacacacacacacacacacacagagagatacacacacggtttcataggtaaagatttcttccctgacattcttttacctaaaataaggcaactgtgtggccactgtcccaacccggttacactcatattatatgtgcctatcaccctgaggagtaatttgattcaggtgttctagaagtcatgatgtgggctgtgtctgttgaattcccagcgatgcaaggggacacaccctgtgactcattccttaattgagtgctgatatttgattggtttatcgcacacctgatgggtgggtggggtgttcgcggttggtgggggtgagttatataagggctgatgcggccagagagctcgtcatttgaagactctcttggaagagatagcgtcttgctgcaacctgcagtcccagcagaaaaaccttgtgatccttgttgcgggcgacatggaggacgactcactctacttgggaggtgagtggcagttcaaccacttttcaaaactcacatcttctcggccagatgcagcttttgctgaaatccagcggacttctctccctgagaagtcaccactctcatctgaggcccgtgtcgacctctgtgatgatttggctcctgtggcaagacagcttgctcccaggaagaa

SEQ ID NO: 39983 - DNA, 2300 bp, Homo sapien
agtgagctgagatcacaccactgcacctcagcctgggcacagagattttgtctcaaaaaaaaaaaaaaaaaaaaagacaccaacgaagaaacaagaaaaataaaagatgcttggaaactactgaaaaattagaaagtttggtatctacagattcacatctgggctccctgccctgctgtgaaactctctgagcctcagtttcccacatgtaaagcagtataagactctatggcagagaactgcagtgaggattaaggagacaagatcgtggcaagcacagggtaaaggcgacgtacccctccctggactccaatacctagagtcgcaagacgagctgaaaaaggagccaggcactgaaggacaaagcggtgttgactttgttcatctgtgtttcccagtgcggtccaattgacggtggtttccaagcgcctcctggaggagaaaacacatgagggtgtggtcagggttctctgctgacagacctaccgtggggaagaaagagaaactctgaagatggatcatggccatgactgcatgtcaaggagaatctccttgaagacactgaggcctacgtcgaggtagagtaaatatggtccaattaaaaggtgtctattttaccacattttttaaaacaaaacaaaacacaaaaacaaaaaagatggaaaaaaagacaagggtacaggcaccagtgttacatgtctgacggggaacatctattcttcaaagcttgcagctgtacacgtaggttttagaacgtctgtcagcagtggacatgatcttagagtgggctgtgcagatagacctttccgggacatgtaattggattaagttaattgcaattaacttacatgtaactgattaggttagggtacgttccacgtcaggtgaccagaggcagtataaaaggcagcctggaaagcagaggtccttctccgccccttcctccgtcttcctggatgctgcatcacttccaggggggctgctccagcacctgcccatctcagcgccagccggtgaaagaaagtagacgtgtaatttcaggttagtttcactgtacagttgtttttttcacgcaatccctgaggggtgggtgggaagagacaaaggacgccgagagaaaccgatcacactgggccttgctgatggggtaggatgtgttctcgttactagtaattcttggaacagaaaacgagaaagcatttccgtctccacgtgtgggagaagaccaagatgggaatgtgaaaagaaatgtactgcagcatgctgaattggtgggtaaatggaaaaaggactttggaaaaaagggtggtttgcccttcagcggtgtaagacgtcgatacgatatggcacttattcaccgtttgtttagatgaattcgtgtggcacgtgtaaaataccagaaaaataaataaagaggggctggagctaaagccaaaaagatagaacaggaaagaccatcacctgctagtgtggtagagaggaagataacttctctctatgaatttgtgtttggaagtcgcctaatgaaatggcaagagtagcgattcaagttgtgacaggaagcatcccttatcccagatttcaaacagacctgccaaagggtgacaaatgccatgccctgtggcttcgatcattctgtccgtcaagggagatagaatcatcgtgtcttctaccggagtgaatcgtaatagacctaagtccagtctccagaatcagttgttagtttggagttgaaagctcaactccccatacctaggccacaggccctgtggcaggcgaagtttactcttggactaggtaatcatggcagaggaacacacaatatctgaggatgcacacagcacattgtgttccacagatttgaccgactggtggtgaggtctcctcatgaccacaccggcaaggagttagcggggggcttcctgtgggtgtgtgaatatccaacgtgcttaaccatccacatgtgtgtgtttgtgtgtgtttcaggtgacccaacagtcaacccctgaaaaaggcggtcacaaaacccccaggagacgaagatgacggcacgtcgtgaccccaaacctggggcaaagagactggtgagagcccagaccctccagaagcagcggagggccccagttgggccaagggctcccccgcccgatgaagaagatcccagggtaagtctagccctggatctcttgggtatcggggtgggggtggggacggggggaggggctatcacacggtcctcagagactgggttggattccaaagagttctgtcaccaccacccaggttgcttttcccatcca

SEQ ID NO: 39984 - DNA, 2300 bp, Homo sapien
tccttcaggcagagagctgatcaaaacagcaaaagcaaagcagtgcccctggcccagttctgaagccaaccttccttaatcacccagacccatccctggttaggacttgctgtggattctcaggtgactccatctcaggatacagggactgagaaggtgtatgcaacatctcagacccagaaaccgttgattctgtctaaaaacacagcaataaccacatcccatcctcttgatttaaatgaaagtgtttggaggaataaaagatgaacctttttttttctttgtcagatcttgcgctcatttggttctggtggggaacaacagctataagagaacaagtgtattcaattagaattaattcccctctcttattctcatagctgagcagggctcaagtgcctctcatctgaaagaggtaataagattttatctgtctcctcatctaccttttgcaagtatacttaacaaattagctctcgggactcttccaaatggagtttgatgaggaatttgctaaggtaaacgttttagactttgaacacagttcagatttcaggagcagtactgaaatctaagctgtgttgctaactgccctgcctttcaactcaagacacaataactttgaactaaaataattatatttttgttgttttccactctgtccccacgtctatatcaccaccacccccaatcccaccccgcaggagctaactcctccttcctgtccctgcaagatcaaaactcctcctgcaagccccgctagctctgtctgctcaccttcgtggtagatatcgttatcgtacttttatcctcatttgtgtgataagtacttcaatgtccacttcttccacgagcacctgagcccctgaagggcctggaccacacctagtttttctcaccgttacatctcccttgtcaggcacatggtaggcgcttaaaaagtatttgatgaacgaatggcttgtttagtgacagtccaaaggctgggggacagagggaaagctccctcctttcgggccccagacgggtggcgctgatggagaggaggctaggataaggcctccaggaccgaagcatgcacccgtaaggcccctgctgaaaagaccttcctgaaggcggaggaactgcgagagtgcctacgttagcccaaggcctgacccgacgatcccagggaccctcgccctaactggccccgcctcccgggccccaaacctggactcggccccgcacgaagctccggatcctgggccccgcccctggccccgcgtcggaagaccatgggctcgctcctgggcctgcctcaaaccctccgcaggtaacgcctcccgaacttgagccacattccgatcccctcctcaaacccctccccgtttcccacaccctggacccctcgctccgtctcggccccgccccaagcccagctaggtctcggcccctgagcccagccccaaccggcctcccagtccctgggtccctcccaacaccggcccctccctaagctccgcctcccagggcccgcctcctgagcgcagcccagcccggactcggccccgcctcccgggcactgggcccctccccaagtgggcccgtcctaagcttcgcctcccagagtccgcgcaccgcctggccatgttctacgacatagtcaacgccccgcccctgccccgcctcctgagcccttctctgggcctggccttagccccgccctaagacctgtctcctgggctctgctctgggtcccgcctcctgaatccaatggcgtttatccgcgccctaatgcccgcctccaggactcttatcctgcccccacgcaaggcaccgcctccaggacgccaccaacctggacgcttccgaagcccagcttccaggatcgccctatcctggccctgccccaggaaccgccaacctggactctacccaggacctgccccgatgtcgcttatcctggccctaccccaggccccgccctcctaacgctcatcttggccccgccctagagtccgcccccaggacgcacctcctgaccctatccccaggccccgccccctctctgcccccgcgctctgccctcggcccgccccctcttcagtccaggcccggcttcctccaggtctcccggcaacggctgcggcctcgcccacgttatggcgcccgaggagaacgcggggaccgaactcttgctgcagggttttgagcgccgcttcctggcggtgcgcacactgcgctccttcccctggcaggtgggcggcggggcgagcggagaggcccgcgggggtcgcgggagtccaggggcagacggg

SEQ ID NO: 39985 - DNA, 2300 bp, Homo sapien
cacatactttagcaaaataattcagaaatttgagaaaatatctattcataaaaatgtggcatgtaaatgcataatagcaaagtgaccaaggaataaattgaatgcagaattatataagaaatctcattaaacttttccaaaagagcaatacttacaaatattgaaagaatacaatctgttgttgaaaaaacttagtatgttggtgaagcccttgtttcatttatgcagccctaacaaactgatttgcatctgaactccttgggtgagattcttggtggagattctaccccaacttctgagtctccccagtcttcaacagctctttcctcacagctcacctccctttacttcaacgtccaccaaaaccacttgtttccatccaaccctcgagttgacacaccagggatcttcagccccacttgctagatttctcagtttgtcattgcatagatttagcagggaaatggaggctgtatcaaagacccctagtatatgcatttgggtgtccccagctcttgcctctgtctctgagcagttacctgggatcagagaataaggcagctcttctcttctatccctcagaaggctcttgaaattttgtccctggagcctctctaactggaagtagcagttcatctcatgacaccccacattttattcaggtgagtcctgagttattacacagagacagacacagctgtgctccttttactgcagtccagaagataaaacaccagcatgataaaacagccgaacctgtcagccaccttgcaagccttttctatatttgattcaatgtacttttcccgaagcaaaatgaaagttctcacagaggggccctcctctgccttgtcctcagaattggaaaatgtattgtccgtgaaggagcctcaccactgaacctaaaactcaagagaaaatgtttcctgaatatcaagtgggatgacttgaaattttgtcaaacaggcagaatcttaatacgatcggccttactaaggctaaatggccttatccatggttgaaattgacacatcatcatattaaaaaatctccacgagtgattgattttactctgcagccagggtttatgtcaagtgtgaggataatgagcaagaaattcaagcccttggcaaactggttggagaggcaaggactgtgtccaggcagagctcatatcattatttattgtttaatctatttaattaaatatgtaatttacccacaaactgtggctgacattatatgtactcctgagccacattaagatgtactatttgtgctgtgaaattctatgggatttgacaaatgcatggtggcagatctccagccattattaaagcgtaacacagaatgcttctcttattcaagctcgtcttccctccacatagagggaatcaatcgacttttgtatactgatttttgaatttgcttctttatttccatcttctttaattaaagcacaagatatcgtactcaatttccatttgatcttccaaaagaaagtactgaataatccacacctgaatttcagtgattcagactcaggtccaccgctaagaccaaacgtcctgtgctgccacctcatggccggcagagggcaatgaaacccacctttccggccatgcagggcgcatgcgcggtctgcctcccgcggcgggccgggtctccagggaggacctgagttttcttcacccattgtcagggaggcgccatcgccctggctttggggctggggcctccggggaggttccggtaggggcgttggagaggccgctctttttgcaaggcccgagacggcgggccctgcgcaggccgccctattccgcgccctcagggcgtcagtatcagcctgaggctggatacccccgctgggcccggatgaccccgctgggcccggagcatcctccggcgctgccctcccagagccacgcagaggctgaggtggcgcgggggcggccccggctccgcgagaagcggcggcagcgagggctggaggacccgggctgcggggctccggggcgtctggcctgggtgggactgagcccatccagggactgggactctgggattctggtgtaggtggatccggggcaggctcaggaccaagtccctctccttccaccaaggagcgcccagaggccggcgggagctccaggttcacctcctcctcctccaggtgtttacttttcctttatttctgtgaggccagaaattgtcgccatccttcacatcggtgaatcgggaccctaacactcattacctcaggtttattgttattgccattaacagtgttggtggca

SEQ ID NO: 39986 - DNA, 2300 bp, Homo sapien
tgatagtttagcagcagtaggggcccaaacacactcactcactcactaatgctttaatgcttttcttttcttttctttctttctttctttctctttctctttctttctttctttctttctttctttctttctttctttctttctttctttctttctctcttttctttcttccttttttttttttttgacggagtctcactctgtcacccaggctagagtgcaatggcacgatctcgtctcactgcaacctccgcctctagggttcaagcgattgtcctgcctcagcctcccgagtagctggaactacaggcacgtgccaccacaccctgctaattttttgtattagtagagacagggtttcaccgtgttagccactgacctcgtgatcccaaagtactgggattacagtgcctcggcctcccaaaatgctgggattacaggcgtgagccacggcgcccggccccactaattgttttttcatgacctatcttgtgtgctcctaggtaagatcagatggagagcaggagaactacctgagacacttttgagggacaggcatgtaggaactgctgcaattagagatcaaagaaaggtagaggtcgcactgtgagaatcggggaaaatcctctgttactggggagtgggttggggagcagagagaaacccccttcactctctgttctcacaggtgcataagaagagaggcctgatgaggtctgaaggcagggcaggacaggtagctgagagaagtagattctctggtctttcactgagtgtgaggcagctactgcccgaggttgggcaagggatggaagccctgagagattcttgaggtgcagagatagaggcttgctgaggatgaaagtggacagaaaagctaagagaggctccaatgctgaccatggcactctgcaagaagagaaaaaatgtgtatgtagaggtttatgagggaaaatcgtgagtttggttttggatatatattacttttgaaatcaagtgtccaagtagatataccagttatgcagttggataatttatttaagcctggagttcaaaaggaggtccaaaaggagaattgaaagggatgagacttgctgagcccctccaaagagtgtgtggtgagggagaagagaagaggaccaggaactgagctctgcagctctcctataggaggtgtgatgcaaaagatgaggaagaaacaaaggaagccgaagtggtagctccagtgagacaggctgagactcaagtgaatgtgccatcctggaagccaactgaagaaagtatactgtgaagaaggaagtgattatttgtgtcaaatgctgctaataggccgattaaagttgtagtgaaaaatgatcattggatctagtaatgtggagattattcgtaactttgacaaaagtggtgtcaatatcatgatcgaaaaagggagaaagagcctgattgggatatatttaagaaacaatgagaggagaggaattgaagacagagagtatggacaactattctaagatgttttgttgaaaagtagagcaaaaaatgggatgacagctggcatcagaagaaaagcaaggaaattctttttcttagatcagaaaaacaacagcatatttgtatgctgatggtaataatttactagcatcaaaattaatgacacggtcatgatatagtgaactgcaacaggaaaatccccaggtacacagcgaagagggaatataatacacaaatttaaaaattatttggatctctgaaacatctgttttgatattaacctttcattcctgcaatagttattttaagcatgttctcattttctcttgttcagtgttgccaggttattataaagtgtattagactttttgaaaaacatttttaaaaatactagttttttctcatttgtttcattaatttatattttgtatttataattttccctttatcttctttagggttattatgctgttttttttcccagaagcccccaaaatgcatgcttagcccattaaattttagccatttttgtatcgaaagttatgttacccatttctgtgtggttacctgtaatataccatgagcagcacttcttggtgtctttgctccttattaattcacttgtctgaagttcctttaactctcctttctacttttcactttcactttgcaaatcattttttattcataaccgcataaaacataatttattttgaaaagtctctcatataattttcacttattctaggattataatttttccgtttgtctcttcgaataaaaccttcagatttgtcaacactcattaa

SEQ ID NO: 39987 - DNA, 2300 bp, Homo sapien
taagagactcttaaccttttataaattacctttaaaatgtttccttttctgtgaagggaagaataacaatttgtaaacaaatgcaaaaataactttaactaaacaaaagaacagttcgttagccttgttatgattagcagagaggatagctgcagacactgtaaaatcactcagcaacaagatttgacaaaaccttaaatatggctctatttttcctgttttatagaggaaaatattaaggctctgggaactgaagtacttttctcaacagtggagtaagtgtcagagtcaaggctgggttttacatcccagctttccctatacattccaccctatggttctgttgtgctgttcctttgtgtgactccgtaaagcctgcttaaaggtgataccatatcaaattgtattaactcagtagcacataacgccagggaattgatttataagatgtttatccttgtggcattgctgaagacccatctgattagtagttatcaagtagtcatcctggataaatatatgggtttgatttttaattttgaaaatgaaaaatattttaaaatatatgtcttacatccatatcccaggaaattctaatcaagttttaaaacttccaaatttagataaactaatggttttttgttttaattttctctcaatgaaaatagaagaaactaattggatggaacagcacagcagaagcattacttatagccaaaaatgggatacaacaagactgaagaagaaaatgcaagacagtgcttaaaaaagcagtctaatgaaaagtgaggtctcctctggatgtccttaggtagacattgcagcagaactgtaaagtttttctggaaggctggggaagagaggaggaaacagagaaggggcaagaggagaaaatagaatgaggctcagaataccaagccttagtgctgtccctatcgccttcctcgctagatcactgggtgatcctgcgcaagtttcttcctttccctcagctcatttcctcatctctaatgtaagtgactagacaagatagcctatgctgttcattgtaactctaacttttcttcccaaagcaaatagctggaaaagacactgtgcttacaatatgcaacaaataaagacaaaagatttttagaaacccctagtgtaacttgaattcttacaaataagcaatggtacatcataattttacaaagcccttttgtgatttcatttttaaaatcacgtcaagttttattttacttcataataagataatgggagataagtgttaaatgggttcatgaaggaatgtttgtaaaagacacaataatccaaaataggtaattgttatattagtagttccctttactgggggggaacagataaaagagtgttaggaaaagcttcataaagtggattatatagaatgtgctttaaaagagtttggtgttttattgagtggggaaagagcaatatggggagttattgttcaagggttaaagctatacaaaatgagtcaattacagagataggctccaaaacatagtacctatagttaacaatgaggtattttgtatttaacaatttgttaagagggtcgatcttaggggttctgacaacaacaacaacaacaacaaagggacgtaggaaacatttggaggtgatggatatattattacctggatattggtgtggtaacaagataatatatatgtgcaaacttgccaaactatatccattaattatgtactgtttgtgtataacaattttacttcagttcctactatattgcctggcaaacgatagatgtataaagtgagatcaattattattgcatgtgcatttcaaaaataataaagaaagcaggtgacaataaagacatcctgaatctttgggaaataaatagcattcacctgctttctcatccattgagatatcaccacatttatgtacttgtgtgtccctggaagtttcctgtgggagatttagttattctcttttcgttaggctctactgaccaagaacaaatcacagactcagagagcatcataaaaaggcctagacccacgatgcccagagactccaggctcaacccacattgatgctggcccttcagccatgagactccatttgcttctccttattctccttcttttttaaattctcttatccccaggtaagttggtagctgattactataaggttctgcagatcagaaggctatatctctggccagacaagatactagaatcagtcctgtgggttcaagaacctaatatttacagcttcactaggattataatagggaaaaatagaaa

SEQ ID NO: 39988 - DNA, 2300 bp, Homo sapien
tgagctgagatcacaccactgcacctcagcctgggcacagagattttgtctcaaaaaaaaaaaaaaaaaaaaaaagacaccaacgaagaaacaagaaaaataaaagatgcttggaaactactgaaaaattagaaagtttggtatctacagattcacatctgggctccctgccctgctgtgaaactctctgagcctcagtttcccacatgtaaagcagtataagactctatggcagagaactgcagtgaggattaaggagacaagatcgtggcaagcacagggtaaaggcgacgtacccctccctggactccaatacctggagtcgcaagacgagctgaaaaaggagccaggcactgcaggacaaagcggtgttgactttgttcatctgtgtttcccagtgcggtccaattgacggtggtttccaagcgcctcctggaggagaaaacacatgagggtgtggtcagggttctctgctgacagacctaccgtggggaagaaagagaaactctgaagatggatcatggccatgactgcatgtcaaggagaatctccttgaagacactgaggcctacgtcgaggtagagtaaatatggtccaattaaaaggtgtctattttaccacattttttaaaacaaaacaaaacacaaaaacaaaaaagatggaaaaaaagacaggggtacaggcaccagtgttacatgtctgacggggaacatctattcttcaaagcttgcagctgtacacgtaggttttagaatgtctgtcagcagtggacatgatcttagagtgggctgtgcagatagacctttccgggtcatgtaattggattaagttaattgcaattaacttacatgtaactgattaggttagggtacgttccacgtcaggtgaccagaggcagtataaaaggcagcctggaaagcagaggtccctctctgccccttcctccgtcgtcctggatgctgcatcgcttccagccgggctgctgcagcacctgcccatctcagcgccagccggggaaagaaagtagacgtgtaatttcaggttagtttcactgtacagttgtttttttcacgcagtccctgaggggtgggtgggaagagacaaaggacgccgagagaaaccgatcacactgggccttgctgatggggtaggatgtgttctcgttactagtaattcttggaacagaaaacgagaaagcatttccgtctccacgtgtgggagaagaccaagatgggaatgtgaaaagaaatgtactgcagcatgctgaattggtgggtaaatggaaaaaggactttggaaaaaagggtggtttgcccttcagcggtgtaagacgtcgatacgatatggcacttattcaccgtttgtttagatgaattcgtgtggcacgtgtaaaataccagaaaaataaataaagaggggctggagctaaagccaaaaagatagaacaggaaagaccatcacctgctagtgtggtagagaggaagataacttctctctatgaatttgtgtttggaagtcgcctaatgaaatggcaagagtagcgattcaagttgtgacaggaagcatcccttatcccagatttcaaacagacctgccaaagggtgacaaatgccatgccctgtggcttcgatcattctgtccgtcaagggagatagaatcatcgtgtcttctaccggagtgaatcgtaatagacctaagtccagtctccagaatcagttgttagtttggagttgaaagctcaactccccatacctaggccacaggccctgtggcaggcgaagtttactcttggactaggtaatcatggcagaggaacacacaatatctgaggatgcgcacagcacattgtgttccacagatttgaccgactggtggtgaggtctcctcatgaccacaccggcaaggagttagcggggggcttcctgtgggtgtgtgaatatccaacgtgcttaaccatccacatgtgtgtgtttgtgtgtgtttcaggtggcccaacagtcaacccctgaaaaaggcggtcacaaaacccccaggagacgaagatgacggcacgtcgtgaccccaaacctggggcaaagagactggtgagagcccagaccctccagaagcagcggagggccccagttgggccaagggctcccccgcccgatgaagaaaatcccagggtaagtctagccctggatctcttgggtatcggggtgggggtggggacggggggaggggctgtcacacggtcctcagagactgggttggattccaaagagttctgtcaccaccacccaggttgcttttcccatcca

SEQ ID NO: 39989 - DNA, 2300 bp, Homo sapien
gtttattcatttattctctggctctcccatgcaagcagagcctcatctatcatgggtactgccgatccatggtgcctggctcacggaaggcatttattaaacattttgagactgaagaaaacactagctaacaccgacacgcatttaccatgagccaggcactgatccgcaggcatttgtactcaatgctgagaacaaccctaagaggtaggtatcattatatcccccattttattaataagaaaacaatagcacagagagatacagtcacttgcccaaggtcacacagggccaggggttgggccaggattcgaagcaggcaggctgtctcctgggtctgaactctcaactacttcaccctaatcaaacaatccctctggtcaaatgtgagtgataataatagtacccacctggtgggtgttgagggtgagcccaagttagcattcagtgtgggcatgtgaacaattatagtcaatattgaatggagacctatgatgcttttatgaaggtttctattttgggttaaaaatgcacacatttctcctgaccagaaatgatctctgagtgctaaatattttatgtcaatggaataatgcaaatgattaagcaacaccccataaaatggggcagacccagggaggaatatatatcccaactgactcatccagtgagctcaatgcacatgaattacaaatggaacggggtgcattaagcccctctgctggcagaagggaggctgctgcctgccatgtgcctgtgctgagaatggcaggtccccagggagaggagaggccacccccttctctgtctcttccatcacaggcgtgaaagcctcagcgcatgagccgattctgtgcagtgctcgacatacagatgagaacactgaggcacgagggacagcctgtgacctggtcaccacgctcaggaggaggtggttacccgcgggcctgagggcgctgactttttagaatgggcgagtgcagctgtgtcccagtgaccagaacgattactgcctttaaaaagtcgtgaaaatgatcgtgaaccgtaccccacaccgagcgcgcgtctaccccctaaggcggtggagacgcccccagcttccgccgccagctcgcggggcagaaggggtgcgagcgactctggccaggccccagggacggggaccgggtctcgcggccctgaccgaggagagcccaggaactcacgtggccggagcgccgggggtttcagcacggagacccatcccgtctgcccctggactcccgcgacccccgcgggcctctccgctcgccccgccgcccacctgccaggggaaggagcgcagtgtgcgcaccgccaggaagcggcgctcaaaaccctgcagcaagagttcggtccccgcgttctcctcgggcgccataacgtgggcgaggccgcagccgttgccgggagacctggaggaagccgggcctggactgaagagggggcgggccgagggcagtgcgcgggggcagagagggggcggggcctggggatagggtcaggaggtgcgtcctgggggcggactctagggcggggccaagatgagcgttaggagggcggggcctggggtagggccaagataagcgacatcggggcaggtcctgggtagagtccaggttggcggttcctggggcagggccaggatagggcgatcctggaagctgggcttcggaagcgtccaggttggtggcgtcctggaggcgatgccttgcgtgggggcaggataagagtcctggaggcgggcattagggcgcggataaacgccattggattcaggaggcgggacccagagcagagcccaggagacaggtcttagggcggggctaaggccaggcccagagaagggctcaggaggcggggcaggggcggggcgttgactatgtcgtagcacatggccaggcggtgcgcggactctgggaggcgaagcttaggacgggcccacttggggaggggcccagggcccgggaggcggggccgagtccgggctgggctgcgctcaggaggcgggccctgggaggcggagcttagggaggggccggtgttgggagggacccagggactgggaggccggttggggctgggctcaggggccgagacctagctgggcttggggcggggccgagacggagcgaggggtccagggtgtgggaaacggggaggggtttgaggaggggatcggaatgtggctcaagttcgggaggcgttacctgcggagggtttgaggcaggcccaagagcgagcccatggtcttccgacgcggggccaggggcgggccccag

SEQ ID NO: 39990 - DNA, 2300 bp, Homo sapien
tccttcaggcagagagctgatcaaaacagcaaaagcaaagcagtgcccctggcccagttctgaagccaaccttccttaatcacccagacccatccctggttaggacttgctgtggattctcaggtgactccatctcaggatacagggactgagaaggtgtatgcaacatctcagacccagaaaccgttgattctgtctaaaaacacagcaataaccacatcccatcctcttgatttaaatgaaagtgtttggaggaataaaagatgaacctttttttttctttgtcagatcttgcgctcatttggttctggtggggaacaacagctataagagaacaagtgtattcaattagaattaattcccctctcttattctcatagctgagcagggctcaagtgcctctcatctgaaagaggtaataagattttatctgtctcctcatctaccttttgcaagtatacttaacaaattagctctcgggactcttccaaatggagtttgatgaggaatttgctaaggtaaacgttttagactttgaacacagttcagatttcaggggcagtactgaaatctaagctgtgttgctaactgccctgcctttcaactcaagacacaataactttgaactaaaataattatatttttgttgttttccactctgtccccacgtctatatcaccaccacccccaatcccaccccgcaggagttaactcctccttcctgtccctgcaagatcaaaactcctcctgcaagccccgctagctctgtctgctcaccttcgtggtagatatcgctatcgtacttttatcctcatttgtgtgataagtacttcaatgtccacttcttccacgagcacctgagcccctgaagggcctggaccacacctagtttttctcaccgttacatctcccttgtcaggcacatggtaggcgcttaaaaagtatttgatgaacgaatggcttgtttggtgacagtccaaaggctgggggacagagggaaagctccctcctttcgggccccagacgggtggcgctgatggagaggaggctaggataaggcctccaggaccgaagcatgcacccgtaaggcccctgctgaaaagaccttcctgaaggcggaggaactgcgagagtgcctacgttagcccaaggcctgacccgacgatcccagggacagtcgccctaactggccccgcctcccgggccccaaacctggactcggccccgcacgaagctccggatcctggggcccgcccctggccccgcgtcggaagaccatgggctcgctcttgggcctgcctcaaaccctccgcaggtaacgcctcccgaacttgagccacattccgatcccctcctcaaacccctccccgtttcccacaccctggacccctcgctccgtctcggccccgccccaagcccagctaggtctcggcccctgagcccagccccaaccggcctcccagtccctgggtccctcccaacaccggcccctccctaagctccgcctcccagggcccgcctcctgagcgcagcccagcccggactcggccccgcctcccgggccctgggcccctccccaagtgggcccgtcctaagcttcgcctcccagagtccgcgcaccgcctggccatgtgctacgacatagtcaacgccccgcccctgccccgcctcctgagcccttctctgggcctggccttagccccgccctaagacctgtctcctgggctctgctctgggtcccgcctcctgaatccaatggcgtttatccgcgccctaatgcccgcctccaggactcttatcctgcccccacgcaaggcatcgcctccaggacgccaccaacctggacgcttccgaagcccagcttccaggatcgccctatcctggccctgccccaggaaccgccaacctggactctacccaggacctgccccgatgtcgcttatcttggccctaccccaggccccgccctcctaacgctcatcttggccccgccctagagtccgcccccaggacgcacctcctgaccctatccccaggccccgccccctctctgcccccgcgcactgccctcggcccgccccctcttcagtccaggcccggcttcctccaggtctcccggcaacggctgcggcctcgcccacgttatggcgcccgaggagaacgcggggaccgaactcttgctgcagggttttgagcgccgcttcctggcggtgcgcacactgcgctccttcccctggcaggtgggcggcggggcgagcggagaggcccgcgggggtcgcgggagtccaggggcagacggg

SEQ ID NO: 39991 - DNA, 2300 bp, Homo sapien
ctgcctcagcctcccgaggagctgggattacaggcgtgagccaccctgccgggccacttttgtatttttagtagagacagggtttgaacaccttggccaggctggtctcaaattcctgacctcaggtgatccacccacctctgcctcccaaagtgctgggattacaggcgtgacccaccgcgcctggccagaagaaatctttatcttggtgtgcagtgtctggtgagggacaaatgtcatctctcttggatctgaatctggaaggatcaaggcactgaagggatttttttgtttcagacagtatccctctgtcgccaggctggagtgcagtggcgcaatctcagctcacggcaacctctgcctcccgggctcaagggatcctcctgcctcagcctctcgagtagctgggactacaggcacgcgtcaccaggcccagctaatttttgtatttttagtagagacagggttttaccacgttggccaggatggtctcaatctcttgacatcatgatccacctgccttggcctcccaaagggctgggattacaggcttgagccaccacgcccggcctcactgaagggatttttttaatgtcacgtggctctcacaggtgcggtgtgtttgggtgcaagtgaagattacgactgatgcttaaaaacaaatgtaaaattccaggtggtgttgctatggggagcagcattaggacaatctgagtggtttcagttgcaagagtgtgcgtgtacgtgcaagtgctacagtcaagattcaactgctggctttgagggtctctttaagaacagtaatgacaacctaaggcagtttaacagtatggaatggttaccttttagaagttaagctatgggcatggaagttcaatcagtgcattgaagtttttcctttatctctcctatggttaatggtttctgcagaaaaggaccaattgatttctttctaaaacgttgcttcagggtgtagagacctttataggtcatgtttcaacttacagaaaatttttatagttcaaatataaattaagttcaatgtggaatttgtaatataatttcaggtgaagtaaaatttccactttccttaggctgtttgcagtgcccagcaggccccatgatatcgagatggaagttctgttaaaggaggagattgatcagggatgggcagaataaggaatatgggcagctcaggctaatgatacaatgattgagatgtagaaagagggtcaggcatgggataacgcctgtaatcccactgccttgggaggccaagacaagagaatcgattgaggtcagaccagcctggtcaacagagtgagacctaacctgtacaaaaaaaaaaaaaaattagttgggcatgatggtgtgcacctgtattctcagccacttggaaggctgaggtcaggggatcccttgagcccaggagtttgaggctgcagtgagctataatcacataactgtactccagcctgggtgacagggtgaggccctgactcaaaaaaaaaattgagtcagggaaaaaatttgaaatcttaatcctcagtacccaggaatgtgaccttatttggaaatagggtctttctagatgtaatcaagtgacaatgagtcatcctggattgggggctgctggtgagggggcagatacaatgactggtgtccttataaaagaagagaatgagggccgggcgtggtggctcatgcctgtaatctcagcacactttgggagggtgaggtggggggatcacttgaagtcaggagttcgagaccagcctggccaataataacaataaaaaagcctttttagattccaagccactgaaagaaaactgtcccttagttaatgtcatgcttattggatccatgaagtctttgaaaatttaaactacaaggacactgctctctgtggtggtggagagaataccaaggatttaaaggtctttaagaaagagaatgtagaaagcgtacccattggaaacagcacgatgatgataatcgtactgacagtaataataagctcaaatatatagagcttactatgtatcatgaattgttctgaatgctttataaatatatgttacctcctttaccctcatgacagcccagtaaaggcgccattccccattttacagctggggaaactgagttacagagcttgtctgcactgagtcatcaggagcaaatgctagatcaggtaattgaacccaagcaatctggttccagagccaaatagatgtattttttatgttatacaaacatatacatatatttttaggggaagggtgggtgtaggatgg

SEQ ID NO: 39992 - DNA, 2300 bp, Homo sapien
tgatttcttctttaaaatggcggaactaagagcatctattttatagggttgttgggacgacaaaaatgaaagaactgctgttcaatgtttagtgaagcgctgtgcacagttttgaataatgaagttggtgtttattttttattatttgtttatttattttttagagacggggtcttgctctgttgctcaagctggagtgcagtagtgcaatcacagcttagtgcaggattgacctcctgggttcaagaaatcctgccacctcagcctcctgagtagctgggactacaggcatgcatcgccatgtctggctatttatttatttgttagttttttgtagagatgacgtctccctttgttgcttgggctggtcttgaactcctggccttaagcaatcctcctgtcttggcctcccaaaacactgagattacaggtgtgaaccaccatggccagccttatttttatttttaaatcagccttatcaagttgaattggtcattaatcttgtataacggtaacttggcgcagcattggttgggcggggggtggggaacctttaggaccctgtgggctacaactcatagtgtgtgcacttattttattttgttttgttttgttatgttatgttatgttatgttatgttatgttatgttatgttatgttatgttatgttatattatattatattatattatattatattatattatatttttttgagatagggtctcactctattgcccagactggagtgcagtagcatgatcttggctcactgcaacctctgcctcccaggttcaagcgattctcctgcctcagcctccagagcagctggaactacagatgcgcgccaccacgcccggctaatttttgtatttttagtagagctggggtgtcaccatgttggccaggctggtctcaaactcctgacctcaggttatacacttgcctcagcctcccaaagtgctaggattataggcgtgaaccaccgtgcctggctgtgcactaatgtttgatttttgcagaaccacccttccctaatggttgtctcctagatctaaggtgactttattcattttagaatgaacttaccccattgatactgtaaccagagttggcatacatcacgattggcagaacccggtcatgtttagcgatatggaagtgttctggaaactcctccttcttgtagacgtggaggtgacggtgcgcattcttcagtgcctggtaaagggcttcctcttgccccaacttgggcaggggcatcccaaagccaccgtagcgcacaatatcaaacttgaccaggtccctgaacttgacgtagttggacaaggggatcttgttgacattgggtctcttctttacggtggtcatcccacggtctcatgtagtgatgacgctgaggtgctctgcaggctgtgcttctcagtggctcccaccagatacccgatggtcctgtcgatttgctgaatcatcaacttccttttctctgcctctggcccgaatcgatgtcccacgttatctggctctctgtagcacagagtcacaaaatcaaagtcttccttggtgaaccagttcatgacgatatcgatgttctccttccgctctgtctcgttgctgcttgggtgagtgtaggaatccaccagggaccacttgacagcctcaccctcatatttagcacctcccctggaatagtggaatgatgccgctctgttcccctgtaagtacaagaagaaaattccatcagggccatttgtcatacctttctcacaatcagcaaagctcgagttgtctacatctgtgcccctgtccaaaggtgtaggaaatatgtggtctttggagtcagacagggtggagttagattctgggcttccccaggatctcatagcatctacaacactgttagttacaagatgtactattattttatgggctactgagcagaaaaatgctgtcaatgagaccgtgacattccagtgattgtaaggtgtattacaactacagagatggcaatatgaaaaatagttccttagaatagaaggagacggtaatttctgagttggtgggggtgaatttgtgcatgtgtgtttttatatatatacacatatatatatacacacatatatatacacatatgtacatgtatatatgtgtacatatactcacatacatatatacatacacatgtatatgtgtgtgtacacacacatatatacatacacatgtatatgtgtgtgtatacacacgcatacatacacatgtatatgtgtgtgtgtacacacgcatatatacatacacatgta

SEQ ID NO: 39993 - DNA, 2300 bp, Homo sapien
gctacagccagaaaacagggagatcttgaggcatggcaatatccggtaatgttacaacagatgccggccgggaaaggcagtcaagcaggagttaaacaatatggacctaactctccttatatgagaatattattaaattccattgctcatggaaatagacttatttcttatgattgggaaattctggctatatcttccctttcaccctctcagtatctccagtttaaaacctggtggattgatggggtacaagaacaggtacgaaaaaatcaggctactaatcctgttgcttatatagatgaagaccaattgctaggaagaggtccaaactgggacactattaatcaacaatcagtaatgaaaatgaggctattgaacaactataagggctatttgcctcagggcctgggaaaacattcaggacccaggaacctcatgcccttcttttagttcaatcagacaaggctctaaagagccatatccagactttgtggcaaggttgcaagatgcagctcaaaaatccattgcaggtaacgcccgaaaagttattgtagaaataatggcttatcaaaacgcaaattcagagtgtcaatcagccataaagccattaagaggaaatgtttcagcaggagttgatgtaattacagaatatgtgaaggcttgtgatgggattggaggagctatgcataaggcaatgccattggctcaagcaattacaggggttgctataggaggacaagttaaaacatttgggggaaaatgttataattgtggtcaaatcggtcatctaaaaaagaattgcccgggcttaaataaacagcaaaaaaaaaaaaaaaaaaaagagccacctggcctgtgtccaagatgtggaaaaggaaaacattgggctaaggcatgtcgttctaaatttgataaaaagggacaaccattgtcgggaaacggcaagaggggccagccccaggccccgcaacaaagtggggcattcccgattcagccatttgttcctcagggttttcagggacaacaacccccacagtaaataccaccatttcaggaaatcagccaattacaatacgacaattatcctctgccacagcaggcagtgctgcagtagatttatgttctactcaaatgatttctttactccgtggagagcccctgcaaaagattcctacaggggtatatggcccgctgccacaagggatggtaggccttattttaggaagatctagtctaaatttgaaaggagttcaaattcatactgggtaattgactcagattataaaggggaaattcagttagtgatcagctgtactgttccctggagtgccaatccaggtgatagaattgctcaattactgctcttgccttatattaaaattggggatagcaaaacagaaagaacaggagggtttgcaagtaccaacactgctggaaaagctgtttattgggctagtcagctctcagagaatagatctgtgtgtacagttactattcatggaaaacaatttgaaggattagtggatactgggtctgatgtttctatcattgccttaaatcaatggccaaaaaattggcctaaacaaaagcctgttacaggacttgttggtgtgggcactgcctcagaagtgtatcaaagtgccaggattttacattgtctaggacctgataatcaagagagtacagttcagcctatgattacttctattccaattaatttatggggccgagacttattagaacagtggcatgcagagattactattccagtctctctgtacagccccacgagtcaaaaaatcatgactaaaatgggatagctccctggcaaaggactagggaaaaatggagaaggcattaaagttccaattgaggctaagggaaatccagaaagaaaaggactagggtatcctttttaggggtggccactgtagagcctccaaaacccatttcattaacttggaaaacagaaaagcctgtatgggtaaatcagtggccactaccaaaacaaaagctggaggccttacacttattggcaaaataacaattagaaaagggacatattgagcattcattttcgccttggaattctcctgtgtttgtaattcagaaaaaatcaggcagatgacgcatgctaactgatttaagagccgttaatgcagtaattcaacccatggggcctctccaacctgggctgccctctccagccatgatccccaaagactggcctttaattataattgatctgaagtattgcttttttaccattcctctggcaaaacaggattttgaaaaattgg

SEQ ID NO: 39994 - DNA, 2300 bp, Homo sapien
ctgcctacactccaggggagaggagattacacctggcatttatccagggcaagaacctaaggggtcatctcagaattctgccttccaaatagatcctcggtggagctcacgagcctgggcgagcaccagcctttgtttaaaggcaacagagaatgatgccctggctcagatctccagcaagcctccagaatgatggtccagtctctgaaccctgggccaaggcagcaggaggtttgggtgcacatgggagcttcccccactttgaagtgagtcgtcacatctgtattagaccctagctgttgcttaggcaaaaatgatgatttagaagaagatggagagaagaggagagttaatttaaaagtacttgtattcggccggacgtggtggttcacgcctgtaatcccagcactttgggaggctgaggcaggcggatcacgaggtcaggagatggagaccatcctggctaacacggcgaaaccttgtctcgattaaaaatacaaaaaattagctgggcgtggtggcgggtgcctgtagtcccagctactcaggaggctgaggcaggagaatggcgtgaacccaggaggcggagattgcagtgagccgagatcgcgccactgcactccagcctgggcaacagagcgagactccgtctcaaaaaaagaaaaaaaaaagaaagtacttatgttcattccctagggctgccacaaccaagtaccaaaagctgcgtgacttgaaaccagagaaactgattgtcttgtggctctggtggccagcagtctgaaatggaagtgccagcagggccacgctccctcctgcacttgtcggggagtcctgccttgcctcttcctaccttcctgtggtctcctggcagtcttcagtgtttcttggtttgcatacgcatcagtccaatcttccggccaatccatggacgccttccctgtgtctctgtgactcggcgtgtcctctcgtcttttataaggacaccagtcgttgacttagggccctccctactccaagatgacttcatcctaatcaatagcgtctgcaataaccctatttctttcttttctttctttctttctttcttcctttcttttttctttatttctttctttcttttttttcttctttctctctctctctctctctctctctctttctttctttctttcttttgagacggagtttcactctttttgcccaggctggagtgcaatagcacgatttcagctcaatgcaacctccgcctcgtgggttcaggcgattgtcctgcctcagcctccctagtagctgggattacaggtatgtgccaccacacccagctaattttgaatttttagtagagacggagtttctccatgttggtcaggctggtctcaaactcctgacctcaggtgatccgcctgcctcgacctcccaaagtgctgggattataggcatgagccaccacgcccggcccgcaataactctatttctaaataaggtcacattctgagctactagaatttaggatttcaacatgttttgaggaggactcaatttaacccataagaatactatgtgggccacacatgctgcttcacatctgttatcccagcactttcggagtttgaagcaggaggatcattgctcagggcataggggacaccaggtgcataagaccacagcgttgactggtgtgggggctcacacctgtaagtttgggaagctaaggcaggacgatcacttgagcccaggagtttgaggccagcctgggtgacatagtgagatctcatttctaaagaaaaaaataataataataattagctgggcatgggggtagcagcctacagtcccagctactcaggaggctgaagcaggagggtcgcttgagtccagaagatcaaggctgtggcgagctgtgattgcaccactgcactccagcctgggcaatagagcaagccctgtctcaaaaaaaaaaaaaaaaaaaaaaaagtcatctcctttgtcttctgattccgtgagctctcatagaaaggaagtgaagcagtgaaagcatccccccaaaagggagttttcaaaaccagcctaagcaacatagcaagaccttgcctttagaaagtatttaaatttgaaggaaaaaaaaaagcagtactatagcacagaggtgacagctacaggtgtggctacatccaggtcctaaaattatatcatcagaatgacccctcaccctccccccgctttccattttactttcttaagcatgaacatgaaatttccaagattgtctctcctttggctaatctgcttctcagacccaa

SEQ ID NO: 39995 - DNA, 2300 bp, Homo sapien
agaattcaatcttgtcgttaccagtattcctttcccttctccatgggcttatgtaagaattctgggcttacacactgttggaaagccaggtaggaactacatcccccgaactctccattcttccagctgctcatgatccatcaaccttctttgggccacctgctataacaagaccctcctcacagcatcattccactgacccacaggctcagccccagggaccctcactagaacaggtctccactatgcataggaactcacaaaaaccttctcttcatcttggcttctgctgatatccagccactcccccaattctcaccttaaacacagatggcagctccttcccattcttccaaacctgggggattgtccagacaaattctctgcagacaccaaagcttcacccgccctcttcagggaggtgatgcaagggcatctgagatctttggaagcccaattctggcctctctttggggtgggctgagagtgggaagtagactctcttttccaaatgtcatgtttatcttgttcatcattatattatctccaatgcctggcacatagtaggcactacagactgacacataggaggtgctattagtgtctgtataatgggactcttgaggttgaagctatcagcagaaacctgccaagcaaaaggatggaaaaccaaccaccaaaaaaaaaaaaacaaaaagaaaacaatcgtggctttgagctctaaacacacaaggcaccagcccaagtttgggcaattttactacaacagccattttgcctccaaacaaactggcactggaaacctccctctgcctcttaaagagaaccagtttccctttctctaagtggacagcatttctccccggtggcagtacccagcccactgccaccagcaaacgactgcagccaggagccaagagcttgatagtttaaagaatagatcttatagggaaaaacaaagtaacatccacataaatctggaactaccaccactttccagaggccgaatcccatttgtaaattctcttgcgtgtcaagcaccttgcagtcagctcaactacacacttttgggattcgttgcagagaagagtgaaggttatctgcaaaataaaggaaccagggctcagaattcccagagcaatccatgacagaggaggtgagttgaaaagggaagggtgaagtcaaaggagagaagtcaatgagttggccaacaccaagcaaggatcatgggaccctctccacggccccacatctcaaatgaagtcaacaaaacccatcaatgcttggtgtaagtgttgtatgctcctggaaatgaaagcaggggccacatttcaggtcagtagggtcaggggtagaggcagctgtcatggacttgtgggccctggaggatgggatgattctgagacattgaatccctacactgatctcagtagaaatctcaggtagggcttcaacattcgtcgacaaaggactctgtgggcatcagagcaacagccttggtgcatgtccaagctccatcaatcccaactggggctttgaagaagttacttattttttttaactaacgttattttaattgacaaatcataattgtacccatgtatgtgatgttttgatatatgtatacaatgtgggatgattagatcaaactaatgaacacgtccatcccctaatttactgacaattttcatgatgcgacatttgaaatgtacccacttagttattttgaaagatacattattattgactatagtcacgctgctgtgctatagatttcaaaacatataatccagcaacccaacttctggatatagaccaaaaaaaaatcaaaatcaatatgtcgaagggatccctaaattcctatgttcactgcagctctattcacaatacccaagatatagaatcaacctaagtgtccatgagtggatgaaaggataaagcaaatgtactatatacacacaaaggaatactattaacccttaaaaaagaaagaaatcctgtcattttcaacaacatagatgaacttgaaagacattgtgttaagtgaaataagccaggcacagaaagacagatactgcatgattttattgtatgtggaatctaaagaagttgaactcacagaaatagagagtaggacagtggttatcaggggctggggtgaaggaaagggaggggataggagacactggtcaaagggtacaaagtttccaataggaagaatagttttaaacaagctaatctcctctgaaagctcagttcctcatctgtagagcacggatacatcattaaccttctaagga

SEQ ID NO: 39996 - DNA, 2300 bp, Homo sapien
aaaaaaaaagatgactgaaatacagactccctcagagttgactctaacacaaactaggtaagagcccaaggtctggctgggcagacaccttgatcggcctcatcctgcagcgtctactagaatgaagaatacttttttctttacccatgaaaatgttttgtgcttcatacccacaagtgcaatttgtgttaattctgcaaaatttgcctcataactctgcctgtattcttagcatttttcctttgagagatttctcagcacatcatctttggactatgtggaattggaaatttacttagagtcaacaacaagtacaggaaagtcagttcttagtcaagagttaggttttcaaagacagtggataaaataaaaaattaacatttgatgtacagttaagattatacgtgcaaatcccctcatcattcataaagtttagcagtcagtcttaccgtggctcaccaggtccaatccatacttcttcctccacgattggagcagagggtgattttttttctgagcaactgatgaagtcatttagagaccatttgcagtagaaaccatgtgtactagagaccaatcaatgtgctctcatggcagcatttctgcctctctccgtctttgttcttgccaagtacccacagttcattttccatagattgaaagagcccaagttgggcctatatctaggagtacaattgctaggtcatttggtaactctatgtagaattgtttgggaagttgttaaactgtttctcacagtggctacaccattttaattcctaccagctgtgtatgaaggttctagtttctctgcatcctcaccaaaacttgttattttctggttttttttttttttttttttttttttttttgagacaaagtcttgctctgtcgcccaggctggagtgcagtggcacaatctcagctcactgcaacctctgcctccagattcaagttactctcctgcctcagcctcccgagtagctgggattataggaacctgccaccatgcctggctaatttttgtatttttttagtacagacagggtttcaccatgttggccaggctggtctcacactcttggcctcaggtgatccacctgcctcggtctcccaaagtgctgggattacaggcatgagccaccgcaccaggccaattttctctatcttcgattctagccatgcttatgggtatgaagtggtatctaattgtggttttgatttctgtttccctgatgatgaatttcattgagcatcttttcatgtgcttattgaccacttgtatgtcttccttggagatgcgcagtattttcatattcaaaaatgaaagcacaggtccacacaaaattttgtacatgaataattacagtagcatcactcctaataacccaaagagagaattaatccaaatgcccatcaccagatgaagagatacacctattgttgtctacccacatggtggaatattatttgatcacaaaaaggaggatagtacatacgctacagcgtggatgaaccttcaaaacagatgaaagatcacattctacatgatttcattcagatggaaatctacagaaataggaagtcgattagtggttgcttaggggtggtaggggcatgggaggatggggctgttagctaaagggtatgaggtttctttttgaggtcatgaaatgttctaaaattgactggtaatgtttgtgtatatctctgaatatattgaaaaccattgaaatgtaaaaaatgcaaagaaaaaacagcccaagttgcaattttattcaacgcttgattggctttaaaaatagattccaggctgggcatggtggctcacacctgaaatcccagtgctttgggaggctgtggtgggaggattgcttgaagccaggagttccaggccagccttggcaacatggcaagaccctgtctgtacaaaaaaagaaaaaataaataacagctgggtgcagtggtccacacttgtaatcccagcactttgggaggcagaggcgggcagatcacctgacatcaggagttcaagagcagcttggccaacatcctgaaatcccgtctctaccaaaaatataaaatttagccttttggtactccaagcagcaccatggcggttgttaagaacaagtgccttatgaaaggtggcaaaaagggagttaagaagaaagtagttggtccattctctaagaaagatcagtatgatgtgaaagcacctgctatgttcaatataagaaatactggaaagacttggtcgccaggacccaaggaacccaaattgcatctgatggtctcaa

SEQ ID NO: 39997 - DNA, 2300 bp, Homo sapien
ttttatgaacgagtaaaaatatttttttaatttgagaaccaacataaggttgctatcttttttttcttttgggtaagaaggaacttttttaaactaccagttacacacacacacacacacacacacacacacacacacacacacacacacacagaaattccaccacgattggtcagaataggtgaggttttgctgcaataacaaacaactcccaaatcttggtaacttcaaacatcagaagttgtttttctcactcatgcttcatctgcagggaggtgtggggtgctctgtttcccatcaaacttgccctaagactaaggttaatgggggttgcaatacctcgagtatcaccaagcagggaacagagggagaagaatgttagagagtcttgtactaagaattaaatgctccaggctagaagtctaacattgcacctctgcccccagcctcttggccagtactagccacatcccctcccccaccacagggcaatacatgaagacaggagaattggatacattacaaatttctaccccatggcatttcataaaagagaaaaaaatgccaacacaaaaatgttttaatagaatagaatatatacatttttagaataaagaacaatcctccaaaaaggacagctggtggtctctcaacaatgggcacatttctgtgacattttctctgtttttccattttatccttgacctatgaacattttatacagatggtccaaagaacaccatttggggaccactgctgtaatcaggtgatgaaaacggccccaagaacagagcacagtctctttagcaaagacccagcagggccagggtgaccatgttctcaccatcaatgtgcagacatccacctgcagcatcctcacatcccaacatcaaacagtggctctttatagcttgattctaatgccctttgatcttcataatcattgtaaagctctctggccccaagatctaacatcgccactctagctacatcctgcaactgttcacctctcctgcctcctcatccctctaaacttctcttcacaacctcatgtttccttcttgctttaccttcctgctcagcctggaccttacagtcaccttcttcttgtaatgtgctcctaaactctttcttcccttccttcaaccacacccacctggaaaatctccataccccattgacgacttgcctcgcaactgcccaagggctgctgaatgatactggaaagaatcacaacagggatctggtagttccactaaataatctcaccatccaactctagggcagacttcacttctgttcagcaatatttttaagcatcacaaataaattccaaaccatatttgctataacaattgactgtaaacctcttccatatctcaaagccccccaaacccagccctaggggtttcagagcccagagttgagttctctcaactcacttccatctcacccctagatcactgtatcttgatcctcttcctctgcctttcccatgttataaggagaagcatccttctcctttcccaagctaccttctccacttgtgcctcatttgagacctgcctttatcacccgttcccttggaactcccatgactcaccaccttcacttgtcatttcactcataaatattttgcaccgtgtatgtgccaggcgattaacatataatcatgcttaagtctccacatgctaacaagaaaaaccttgattatccctgctatgccctcaagtcattaccctccccgctcctttcctgtgttcccaaactttgttgatcttcatcaatccctctgatgcagatggctccgaagtttgcatcctattaggttggtgcaaaagtaattgcggattttgccattaaaagtaatggcaaaaacagcaattatttttgtagcagcctagtatcttttctccttctaccaaactttgtccctgagacatctcatcacctataactacctcctccatgcagttgattcccagatctgtattattctactgaaagtccattccccaattttctcggctagaataacagaaacccaattagaattcatgctaccagtttcccaccaccaccaccaccgtcgtcctgccattgttagcaaaaccatctcttgagtggagctcaaagatttgtaatttcccaatccccagaaagataacttcagactcagcttagaagtaaagatcctccagatatggcctcaactaccctccaacccatgtccccagtgcatcccgttgatgcccccttcagtggagttaaaatggagtgagtgtttttcttttcacata

SEQ ID NO: 39998 - DNA, 2300 bp, Homo sapien
aggcagtgctcttgtggttgggtcgcaaggggttgctttattcggtggtggctagaggatgttttagcagataaatcgggaccccaggagcccctgagtgtcaagtcctgctgcagggcatgtgtttatggtggggaggtgggggtgggggtggaggatgggggcattgatttcctgccaatatcagaagtttcacaggcttcttgtgtatccacaaacacccaccccattgagaagtcctagaaaatctgcccctccccaagcctttattgaccgcttgtgaatgatcccagggtgtgtctgacccacagctcctgctggagagagagaaaagtctctcctaggtatttggttgtcaacctcaaccgcttgctgagccttccccaagaccaggcaccttggcagagatttctgggttgtcaggcagaaccgagcattcaagggtgataactcactggagtccctgaaatccctgatggatgcaccaggtaaaagcatccagggttgaaaccagatcaggaaggttattgtcagcctggggctcctgtagaggtgcatccacgttgcaggtattttccttcttgctgaggagaaacctggatttctcagctttggcaccgtcacaacatttggggtgagaccattcgtggtggtggtgggggggcatcctgtgtattgtaggacggttagcagcatctgtggtctccatcctctaggtgccattctaccctcccagttatggctaccccagatgtctccagatggtttcaatgctgtggggcaagggagtgttatgtgagcaaaaccaccccagttgaaagccattggtctacacttgtataaatgtttgagggtgagagtgtcgaccttgggtccctgctgtaccctttatgagcaatgctgtcttggaaagttaatagtactccaggggcctcagttttctcatctataaaatggagataaatgagatacagtttcataggaaggttatatgggatttactgagataataagacagtacatggaaaatactgggcatagcctttatttatttaattttttcttaagacagagtcttactctgttgcccaggctggagtacagtggcatgatctctgctcactgcaacctccacgtcctgggctcaagtgattctcctgcctcagcctccagagtagctgggattacaggtgcccaccaccacacctggctaatttttgtatttttagtagagatggggtttcaccatgttgggcaggctgatctcaaacttctaacctcaggtgatccgcctgcctcggcctcccaagttgctgagatcacaggtgtgagccagcacactgggcttgtcatcgcattgtaacacagacaaagcacaaaatacgtggacaatatctttttacatttggcttgtctagactccatcctccatcccctcgtgcactggtgtggtgcagaccagaatatcgctcacctagactgcagagtggatttgggtggcatcttggctttctgcacaagacttgcctgctccccaccacatccccctggttctcagggttcaggattccaggaggccgggatgtgggtaggcaggtcaggtggcccacccagttcactctcacactggggacctgcagagccagctccctgagacagggtgttttgaccaacatctgatttttttgatttccatttgagcacagctggactacacaggctgaagctctctctgccgagatatagatatttccctggcaatgatctttcaagttgacatgaagacatggccatccgctggaacatcgtgggtctgccgtagtgctcttgtaatttgtgaggcaggctcctgatgaatgcagtgcgtaagtgggaaatggtaggatgttctcccatcctccccttgccgaaagtgctgcctgcgcaggttggtggacggtcctttgagcaggaagaagacacggagcacattcctgttagctatgacagagaggggcagggtacacactggacatttcaagcccctgtagagaagcaagtcttactgtgctgggagttcttgtggagtgggggctgtgttgccctgggctttaattatttcaggaacatttaaccacagggccagcaggctggatcttgatatgtgtttcttagttggaaagattttggaccatagagaaatgtcttctcaattcttttaatttcattaaggtggtcatttttcttcttgtggcctctggaatgtgacacagaactcaagggacaggaaggagatgagttggaggctgggacaggggtcc

SEQ ID NO: 39999 - DNA, 2300 bp, Homo sapien
acctggctggggcggggaggtggtgcagggcattgccagagcgggcctgtccatgggcaagggacagcgacctcctgggccaggacatgtgacagctgcgcaggcctgggcccggcgtggcagaggtgcgcgagagcggccagaagagggcgccagagagccaggcgcggcccgcggaggagcccgggccggccccgatacccagctccgcgccgcgcggacccaccgagcccgcgctcagacgccccagctccgccgagaagccgcttgagccgggtccttcttcttccccaagttcaggcagagcccgcggagccatggccagcccttccagcagctccgaagccactggcaagccgcgaggcagggatggcagtcccaggatgggggaggaggacgtccctcccgaagagaagaggctggggctgtagctggaggggggaagcgcacagcccgaggactgcgaggacggggaggacccgccgctaccgggcaggaaggagaccggcacccagacaggtggcgacggcaaaggagtaagtgatgcgggcgcgggggtccgggagtgccgggggctcgggggtgccggggacgcaacgaaggggcgtcgggaggctccgtggccgtccccgggttgaagttgggagtgcagccttcattctgaacccatttaggcagcacgggcagccctcctcgccatgggcaggatcagagcccccccgcccagtcttggggttgctcctggatgctgtctgggaggcttgctcatggtgacatcctcatctccccgtccacgttaccgcattcagagcttgggtcacctggacactgaactcaggtgaattttctctgagatcccgggagaaggaggacagttctttggaaggttttccagggccgatcacggaaaggatgagaagggagaggtcctggtcggggacacaattatggtggcagtgtaacgccgggaaactttattgcatgaagtccctctcactccctctacctccctcttttacgtggactctgccaaagaccaggataccagaatgcggtggagaggccaagtgtagtgagaccttgggaatgcgattctggagccaggcggctggggtttgcatcctggttctgcccctccttagctggctgacatggcacaagccacttaccctgtctgaggcttactgtcttcagtggcaaatggatctgtcaacaggctccattgcctggggttgttgctgctgagattaagggaagctcgtccatagaagcacttagcgttgtgcctggcacatagtgtatggtggataagtgggacttaagactaaaactcatgccctgatgtgtttttgcagtgatgttttgttctggagtacgtcacaagagacaaggtccttggctgggcatggtggctgaagccaataatcccagcactttgagaggccgaagggggaggatcgcttgagcccaggagtttaagaccagcctgggcaacatggtgaagcctcatatctaccaaaaaaaaaaaaaaaaaaaaaaaaaaaaaaggcagttatggtggtgagtgcctgcagtctcaagtacttgggaggctgaggtgggaggattgctagagcctagaaggtcaggctgcagtgagctgtgatcatgccactgcactccagcctgggtgacaaagtgagaccgtttcaaggaaaagagagagagacagacccacaaaagtcttaagccagaatctccatgttaaaatgctttctggaggctaaaaggatgatatgttgataatgaaatgtttaaaaggcagaaaccccactgaattgtttggtccacagagggaaatgggaatagcatgacctgaaggatgatggaggaactgaacagaaaccatccttgtttcctgaatctgaacatggcacgctcttttcacggtgcctgtatctgctcagtccggcagccccttgaaaagagggaatcttgattttcaaacttaaaatttggcccaaagctcactgctgcccacaatgcccgccagacacattcctcttcccttttagttcctatgggaatactctctttgaagaacccatgaagcagtgtcaggctggtacgaggatcagcagtgatttctttgaggaggagagcccgtttcttcactcacaggccatgtctgagtggatcaagaagaacagagtgcccttttatgagattttgtctgcgtagaccactagcttggtaaaaatgtcaaaaccatcctcgttctttaataacagattattttggacttttctctgcaagaagca

SEQ ID NO: 40000 - DNA, 2300 bp, Homo sapien
ctcattagttccttttctcctgttcagtcatcctggtaaaggctgtgtattcccttgggggcaggctgggagaaagattgacagtataaatttttggcagtggagcagagtcctttctggaggggacctggcttcccattcagacaagggactccgggtctgtgaactggcttatggctgggaattgaatggggtctgtgacactgtttttatgattcagattagacttctgctcacctgacctagaactcttctgcaaacacagatcaagtaaaaatgtggcaggcttcttatctatttcacttctaggaaagccacgatcagcaggcaccataggtctctgcgagtcagggtattctggttgcagctttgactctgctgtcttttatggtaactgcatccaccttgcctttggggattgagtgctctgatcacttagccccagccactgtagtgtgcctatgtcacttaccctctttatacctcaatctcctcctctataaaatgggcatcctcattgcacccacccccagggctgctgtgaggtatagatggattagcatatggaaagtaatagaagagggtctcaaagcccatgtgtcgttatcagaattatttcgtgacaggggagagctggaagagagaggaaggtgctgagcagacccgagtgctctcccaccagtgtttcctgagcacctactatgtgctgtccactgtgagagctgttagggttgaaatagggagcacagcagggtaggggctgccatcaggagcttagtggggagaccattgtgcaacacgattccagcgcttggggtggggaagctcagggagtacaggggcctaggatcctgggcagaatcatggaaaggacacagcctccccagcctctcctgcgtcccctgcctccctggcctcctctgcttccctggcctctcctgccttcctggcttccccttctgccccggcctccccagtctcccctgtctttcctgcttctgaggtgggccaggagctgctggtgctcacttagcctgtcctggactctgggtgtagcacttcgatgtccagaaaatacccccgggttcagctcatcacacaaccaaggaaggagctccacactgacactaagggtgcatcctgggctcattcatcagggcatgcctccaaaatatttctccacgtctcctccctttgcccacctgcattgtctctgtgcctgagccccggctgggggtctggaaggatcccctatctcctctgcccctgcacggctgggtcccaggcaatctgtccgcccaccacgcctgtcgccccttgcccaccacgctccatccccacagtcctctttctgcttctttcccagcctctgggcttttgcacacgctgttccctctgcctgaacaccctccactgggctgagaacaactctctgagacctctctcagctgttgcttcctttggaacagccgctgctgctgtccctctcccagctgcaagaccggctgagcctcctgtctttttcagttcccatgcccctagcacttctccttggcctcctttggccgagttgacaatgtccattctcaatgccttctcacccagcgctgagccccactggatgaaggcaatgcctgtcatgtccaccgcaatatcccctcccccatcaccacgcctggtccacagtgatgttcaaaaaagatctgttggtaggcaatgggaaggtgcattcatgtcatcctgcaggcggaattctccacgagttttgagcagcctcggttttcccaccacctccaaatcatggaagaaacagggtaagagcaaagacaaggtggctgtggccgatgtccaccctctccgggcgtcccttctcttctctcctccttcggcagggagactatcggggtgcaacctggctggggcggggaggaggtgcagggcctggccagagcgggcctggccacgggcaagggacagcgacttcctgggccaggacaggtgagagcggcgcaggcccgagcccggcgtggcggcggtgtgcgggagaggccagcagagggcgccagagagccaggagcggcccgcggaagagcccgcgccgcccggatgcccagctccgcgccgcgcggacccaacgagcccgcgctcagactccccagctccgccgagaggacgctcgcgctgggtccttcttcttccccaagtgcaggcagagcccccggagtcatggccagcccttccggcagctccgaagccactggcaagccctgaggtagggatggctggcccaggagggagga

SEQ ID NO: 40001 - DNA, 2300 bp, Homo sapien
ccaaactttgagatctgagattgaaattggaagaggggtgttcagggccaaatcctcaattaatgaagatactgactgggagcacaactgagttggtgtcgggagggtgaaaatctcggaggcaactttgggattcggtaaggcaggccactctgcaaagaacacagcagctgatggagctgggtaggcagggccaggcattgcttgttgtcccttttctgtttttctttcccgtttttctccctttcttttccctaaatgtctttccctcttgtgcagtcacttgggtctctttaaattttattaacgggtttttaatttctttatttcttttactctcttttaattgaacacactaaaaaacaaaattataatttgtatatgctgttttatttaacaactttttgtttccattgattttcaaaatataaattgaacattttgtatgtcactttctaagaaaagctgtgcttgtagactcctttatcaacatgtgcccatcagatgtcttcagtgagccaggtgccttccacagaagaaagatttccactctttatagaaatagatattgatttgtcttctcacagaattgatattttattgtgtggtttataaaatgatatgacaattatgaacctttctgatcagtgctgaagcatctagatttaagaaaactgcatttctgcttttgaaaatttaaacatggtgacacaaccagccagcccacggaagagtggtagactcaaaggacagaggagggagacacacagagagctgcgcattggagagaagagaagcgacagggtgtccagctgcttactaatggggctgtttcttaaaacacatattttaaacatgtttcaccttatgtttatataagtaattgatggtcattttgaaaaaaactcaaaaatacaaatgagcttttaaaaaaagccataatctgcaactcaaagggaatcaactattggcattttggcatacatatttccaaacttgaatgtagtatgtataaataggctttaaacaaagatgggatcatgttattcatgatcagtatctaaaacctgctcctctcattaatataagcatttcttctaattcagttcatacacatcatcttttaatggaaacatagtattccgttttatggatgtaccataattgatcttactagtctcctctttatgattctacaatttggttactatccacattgctacagtgaacattcatatagcacttgcctgcttatgtctgaaaataagctggttggttccaagaacatgaacatttcctgccaacaacgtaaggtttctgctgtctgtagccatgttctttagcgtgcctgtgctgtttcagagtgcccccatgctgccatttttcccatacctcagacagaactgggcattgcctttatccttctctttctttctaccaatctggcaatgaaaaatgttatatcattttaattacttggaaaaaatgttatctcatcaaaatatgttttcttatccttgcgtttgaaaataatggctgagaatttttaagtatttgctctttgttgtgggagttcactttttcttgttatctaagagtaactatgagtgtttgggataaaaggtatttattgtcatgttataaatatttaaaacagattttaatataaaatattacttataataaattctcttgattcataaacatacttagctctgtaagataatctggtgtcttaaaattcagtttactcttataaataagaggatcacagcagattttcagtattaatatttcatcagtgtgagcttagtgaacggggtgctgattcttgttcttgccaagaataaaaaccaccttatttagaactaattctttttttgctttacattagttcattactgttataaacctcactcattttttgtatgtgttcggtaatatttttcttgtatgaattctaataattaaactgtttttcccttagcttgaccaagaatgttccaatatttgtttgcactatggcctaccccactgtgccttgccctctccatgtatttgagccaagatacagattgatgattcgaagaagtatacagactggaaccaaacagtttggcatgtgtgtcagtgatacacaaaataggtatgctttttgtgaacctaaatatttgtatttatgttagacctctcaatatggatgagaacttgcatgtttatgtttcaactttgttactaatcaaggttttcttttagttttgcagattatggttgtatgttacaaattagaaacgtgcatt

SEQ ID NO: 40002 - DNA, 2300 bp, Homo sapien
ctataaatacagattgtttgaccaccaaaaatatcagaatccctttcatttcattctagccatgttcttcccctatcttaacctgtttctgttggagttttaggcatattcctgaggtaagcacccagaaatttgattctccagctgtctcccagcttatttcctcgctattatagggaagctgccatggggtgcttctaaccaagtattgggcagcagtaactgcccacacaggttagttattcagtgagaaattaaattgagtgtaagtacagggaattttgtagttttgtagttagaagtccaagtgtagttcacataagtgccccaaggccaacttcgtaaatatacattgaggtgaaccatgaactattttgatagcatagggctcactaagattcagagataaatatttaatatgtcttttaagatctttttatagtctttgtgttgaaagatcagcctttatcctgagtcttactactcccatgctttcctttcaaagttttgaatcatttgtttgcgggtgatttgaccccatgaggcacacctaattttgcaagacttttgaacttacagtgttgcttaccttgttcccctcctgctcattaaaaaaatgtctgctacaaactttctacatattctttattaggtaaatttatacaaaattatccttaaccaaatattttatattttctactacttttaatatttctcttacagattttatgtgatttattattacctgaaaacttaaaagaaggcctgaaggaatcttcctggagttcattaccatgtactaaaaacagaccttttgattttcattcagtgatggaagagtctcagtctctcaatgaacctagcccaaagcaggtacggggtgagacaaggttatcatgagtttagcgtatccatttctttacgagttaagagcttcactttcctagtttcaagtactagcacctacttaagtacttttaacctggttagttatcatagtagaattttttccatagcctttactttacactaaaatcttttatgtaaaatatttgctaatgaatcacaattttaggtcccgtgaaagaaaacttttagttctttaaaaatatgtatagaacattgcatttatgtttcctcagggtagtaacagctgtgttatagcataactacttttaaacctcattataacataagtcaccttgatttctagggctgtgtaagtacagtcatcccttgtatctgtgggagattggttccaggacctctcacagatagcaaatccaaggatgctcaagtccctgatatattaataaaatggcacagtatttgcatataacttatgcacatcctcctgtatacttaaatcatctctaggttacttataatacctaatacaatgtaaatactatgtaaatagttgttatactgtattgtctagggaataatgacaagaaaaaagtcgatatatgttcaggcttttttttagaatattttctatccccagttggatgaacccacggatgcagagcctgtggatacggagggccaactgtgctggcaaaaatcatttacttgtcacagtgttggaatcaagttagtgctattaaatgaacattaaaatgagcattataaggcattgaaatttcatttcagtttgattcttggtgagaggaataaaggatagtaaagaaatacagttacctttgtttattgtatttttgtagagtgaagaaataccagaggtcacttcagagcctgtcaaaggaagcttaaaccgtgctcagtcagcacagtctataaattcaacagaaatgcctgccagagaggactgtttaaaaagagtgtcctcagaacctgttctgtcagttcaagaaaaaggtgttctgctgaaaagaaagttgtctcttttagaacaggatgtgattgtaaatgaagatggaagaaataagctgaaaaaacaaggaggtaaaaattttgctctacacttatataaaataaatttatttagtcagaatagtctttaaagtttttcctaaggaagaaaaccccatgtctttgttttaatagaaactcccaatgaagtctgtatgttttccttagcttatggtgatattccagaagaattaatcgatgtctcagatttcgagtgttctctctgcatgaggtaagcatataaaactttatagaagatgaatattttatgttagtatacataaaataccgtgtagataaaggtaataatagacaatgtaaagtaacacaatgctggaataaaaatcaaaagacatgaattttag

SEQ ID NO: 40003 - DNA, 2300 bp, Homo sapien
gaaaaattctttgagaaaatctatgctaatacaaattcagggtcccagtcatgatgctttcctgcacatactcaaaacatgccacgttatttatcagtgtttcttagagtgtggctttttgtcagaatcatgtggggatcatgttaaacctaaagagtcctgggcccaccaactacaagtctttgattcagaatctctaaaattggagcagtcatttaagaagcatcccaggagatgtttttgtaccctgaagcatgagaactttgagattgttctcagatctcagccgccttaagaatccagctggcattggtatagcctctatgaggtttgtttgtatatacattctagcccactgatttaagaagaaaatgtttactattgtctgttttctgactgttccatgttcgttagtgttatcttcttggtaagactgcaaactttaattttaagagcatgtgtttctgcattttgcatgctgccagacatccttctatttctgtaactatttgtttgctggttaataggatcaggtagatgcaaaacaaataatgctttagaatattttgtttttctccaatatactttttctaagttgtggtataatttacatataataaaatgcatggattttacacgtcagtgagttttgaaaaatgtatgtacctgtgtaacagcatcccaatcaaaacagagaatatttccatcaccctagaaagtaccttcatctcctttccagtaaatcctccatcccctgctcctagaggcaactactgttcagatttttgtcactgtagagtagtgttacttattctagaacttcattggaatggaatcatacaatatatactgttttgtgtctgggtttgttttttttttttttttttgctgaacatattttttagatacatctagtcattttttattgttttttaaagtattccattatatgaacataatggaatttgtggttttcagttagtagtgattttcatttggattgtttccagtattttttcctgatataaactaagctgctatgagtattcttgtacaagtcattttgtggacatatgtttttacatccctttggcaaaaacttagcagtggaattgctgggttctagggtggatgtgtgtttaatttattttttaaaacagaggaaatgtaaatgtgtatatacagatttttaaatgtttgcttattaaatggagtatttgagcacctaccaaagatacgtgcttttatctacattgtttatatttccataaatgatttgtgatttattttgatttttgtgtatttgaaagataacagctgaaaaaccgaacctccaatttagactttaatatgtgctatacctataaatacagattgtttgaccaccaaaaatatcagaatccctttcatttcattctagccatgttcttcccctatcttaacctgtttctgttggagttttaggcatattcctgaggtaagcacccagaaatttgattctccagctgtctcccagcttatttcctcgctattatagggaagctgccatggggtgcttctaaccaagtattgggcagcagtaactgcccacacaggttagttattcagtgagaaattaaattgagtgtaagtacagggaattttgtagttttgtagttagaagtccaagtgtagttcacataagtgccccaaggccaacttcgtaaatatacattgaggtgaaccatgaactattttgatagcatagggctcactaagattcagagataaatatttaatatgtcttttaagatctttttatagtctttgtgttgaaagatcagcctttatcctgagtcttactactcccatgctttcctttcaaagttttgaatcatttgtttgcgggtgatttgaccccatgaggcacacctaattttgcaagacttttgaacttacagtgttgcttaccttgttcccctcctgctcattaaaaaaatgtctgctacaaactttctacatattctttattaggtaaatttatacaaaattatccttaaccaaatattttatattttctactacttttaatatttctcttacagattttatgtgatttattattacctgaaaacttaaaagaaggcctgaaggaatcttcctggagttcattaccatgtactaaaaacagaccttttgattttcattcagtgatggaagagtctcagtctctcaatgaacctagcccaaagcaggtacggggtgagacaaggttatcatgagtttagcgtatccatttctttacgagttaagagcttcac

SEQ ID NO: 40004 - DNA, 2300 bp, Homo sapien
gaatgatacttcaacaacctcttactggtttgttgagtctattcaactaccttgattagatgtgatctacaatagaaaaaccagattaagtccaaagaaaatagttcttaaccaggtggaggaaaaaattttggagaggtctgaacttcaaaggctaagcaaaagttaggatgaatgattaacagtttataatacttcactaaagtgaagaattaattttaaaaatacatgtgatgtatacataaatataaagttaggttatctggtattttgactaaatacatgtagtgttgtacaatactaattaatttatatggttctcttttttaggtaagtagtaattaataatttagcattagggttggtgcaaaacttattgcagtttttgccatatatgagctggtgaagcggcatcattggtctgtaatacccaacgtttgttgccttgcgccaagggaatcaaggacgcagacacacaaacagtgaggttaagagtggaggtttaattggcgaaagaaaaggaagagttctctctcctgcagagagagagaggggcaccccagcaggtgttccggttcacagccaagtgcataagattttatagatgagcttgaggaggcggtgtctgatttatatagggcatgagagattggtgagaccaggtgtgccatttgcatagctggccaccccaccctaatctttaattatgcagttggttctctacctggccagcgccatgttgcctgtttctttactgtacacatggtgacaaagaaaagcgaagatggagcctccatgttgaacctacctggcccccaggtaggcttcccctattgcaatgcacagccgccgtcattcacctgtgcaagcttccagcttggttatctatgtctgcagcttgattttacaggctgctttttgttagaaaagaaattatctgggggctgctttttgttaaaagggaagccttgccaaggactcccttactctcactctctgcctaaataatttctttttagctcctgtatcactgatagagagtcaggtctgttttggcagattaagtccattccgttgatcagacatgtattgactttgtatattgtgcaagacagctgggtggggatggaagagataaaaaaatgggcagctattgttgcagtctcagcaagtgaataatcaatgggaagggataacttaggtctacaaatagatataatttaccatattttgtcatcaatgctaaaatatagctacaggcagtaatagtaggctccctttttggtgaccgatggatacttgccattatactatttaatttatattatgtccattaacatgacatgacaagtccctatatgatattttaggaaactgagtaacaacaacaaaaaaataagtaatttgctcaaggtcagagctaagaagccaaggagccaggtttcaaatgccgattgccagatccttgctctggggcacactttggacacgcaaataaaggcttaactgtttctggcacagaaacagagtgtctcatagaagtggcatctgagctgggtcttgaggggtacgtatgttaatgatggagtgaggaaagggaatcaagtcatcaaagacacggagatggaaaagtacagagattgtttaaggacctgaaaagaagtctgacttggtagcagcagagtgagagtagagggagatgaaacggagaggctgaagccagctgggagtcaggtggccgcgcaatgatgtcaagtcatgggtttctagaattgtgggaaggcccagggcaaatcacagggcaaatcacagctctgtcgactggtttcctctgtaaaatagaaatagagtaagatcataaactcacgttccaactctggatttatgctttcctgtccaggaacatttagtctccccttcccacttcccacctcggtccatgagggaagcaaaatgtgtccattcttctgcccacgcccagtcctgcactaactcctccccaaagcagagtaagtggtttcctggtcggtgagaacatgagagtgtcactgcactgggttttacccatggtcggaattgctgaaattcctgagtggttaaggacaaacccacccgagtcactctactgctgtttcctgtgtccacatggtaaactctcagcttctggccaaagaccttggtggaccctgctgacttgctgtaagatcttcttacatgttttttttttgtttgtttgtttgttttgaggcagattctcactgtcttgtccaggccagtctgcagtggcacaatcttgacac

SEQ ID NO: 40005 - DNA, 2300 bp, Homo sapien
aattttaaaaaactgaaaaacgttaaacctcacaaataatgagaaaataatgcaataaacccccatgtgtacacccagcatcagcaactgtcaatattttgacagtcattttttatcctttcctcctttttgctgagatgtgaaagtgaaattctctggtacaaaaataacataaatggcttaaaagtctagctatgtttctctggtgtacaaattttctttacagtacatttttctttcctttcccacaaccattacccaaattctactggtggtcactgaaatgccgcttatgatggcctcaactagaaaaatctctttatttttctacctgcctccaaacaagaaagaagttggtaactcatgtcatagttcacaagtctctagggattctacatgtctgcttcaagccgtcagtgaactttcagaaaacaaatgcaaatattttacatttgtttattatataagggggtttcaaagcttctatcaacattttcataggggcctattacctacaaaaggttaagaatctctgcctctattatgtcttgaaagcatatcaaatatactttctcacttccactccctagttaattctatttatttatttacttattttgagataggttctctgtcacccaggctggaatgcagtggtgcaagcacagctcactgcaacttcaagcttctgggctcaagtgaccctcctgcctcaacctcctgaatggctgggatcataggcatgcaccaccacgcccagctaatgttttgtatttctttcagaaatgaggtttcactatgttgcccaagctggtctcaaactcctggcctcaagcgatcctcccacctcagcctcccaaactgctggaataacaggcatgagccacctcacctagtccttagccaattttttatatctaaatcagacattggacaccacttccaggatgccttccctgacaatgtcacctataactgatttcccttatgttttcctacaaaagttaaggtaggttactttcctgtttatcacagtctttcaatcactggacgagtatttatcaggtcctactatttgccaggcactatcctatactttaggtatgctttgtctcctaatgcactgttagaagaggacaaggaacatcacagtatccaatacgtcttctgtgtccgaagacatattgtagttgtagctccagtgaatggaagcaaggatgagctgctgcatttctgtagctggcattcagctcaagaatacgtaaaaccagactcgtggttttttctttctttctttctttctttctttttgaatgtgaggcctttacagaaaaagaaaatgtcagtctgattatccagggcatgaggataaagagaagcccaaacaaaggtttcccccactccaccccacccaatatactgtggcactagaaaacgattccagaatcagaaactatatgctgacgtccattagccctcttagtagcacctgaaatagaccagcgtctatgtgagacctgtagttgtgtcctcacaaataacctgttatagaccagcgtctatgtgagacctgtagttgggtccccataaataacctgaactggaaacaacagctcgacatgaactctgccccctacgctggggatcaggagcacgaacctctatacaaagggcggcagagcggttactaaatgtgctcatttttcgtcactaagaacgtgcatttttaaagtgcatagatccctgatgataacggagttgtttgataataggcggttgaagatactattacgttagggacctggaagaaagtagttaacgctattgtcatagaagcaatggggggaggaaaggtttgtgtccagttttgggcaaaaacttctaagttccaccccgccttctgatggatgcttttttgatggggctcgttttgcaaaactcagcagattaggcatgttgtgtagtggaatgatttggagcgtctaagccgtggcaccctacttaacccccccatctccagttatcccaatgaaccgaccccgagggggcatttccgctgaagtccggggctgtaaaaaattaagtgagaagagccgcgctaaagccaagcgtcgtcgtcacccaaggtactgcgctgatgcgctgcgggccgaccaggtgctcccgccggggcgtcttctcctacgcaggaagggccacgccgagagaggcaggcaacaagggcacggctggaggccggaaggtcaccccgtccccggcggggcgggcgcggcccagcctcacttcccgggcacgttcgg

SEQ ID NO: 40006 - DNA, 2300 bp, Homo sapien
atatcattatttcataaacattgggctcacggccagcacactataactctttcgtgaacaaagcttatctaacacatatattttgtccatcagagacatcccagccttcttatgttcaggaacactagacggcatttcagccccaggcttaggccatttgaaagagcaaaatcaccagtaaaaactgtacaaatggagaaattgtggccctaaatagattatggaaaggacacttgattacggtatgggagctgaaaaaaggaggctgggtatgtgggtctcagatgactcaaatattttgctgcactgtgagtatttaagtctaataatgacaatgcaaggctgtagtattgacgttggggttacaaataaatttcagcaggtacattaactgcaaatatggaagctgtaatttatgaggattaactatattgacagataactttgaccctataaaaatggaaaagttccacaagacaaaaatctagacagacatacaattcaagtcaaaagaccaaaatcaaactaagtaaaaatatctgcaacacatgtcatagaaatctagataatttttttttcttttttgagacggagtcttgctctgttgcccaggctggagtgcaggggcgccatctcggctcactgcaagctccgcctcccgggttcacgccattctcctgcctcagcctccctagtagctgggactacagttgcccgccaccacgcccagctaattttttgtatttttagtagagacggagtttcaccgtgttagccaggatggtgtcgatctcctgactttgtgatccaccgaccttcgcctcccaaagtgctgggattacaggcgtgagccaccgcgcccggccggtaatttttttaatctactaagcattcttcaacatcactgtaaaaaaaggaccagcatcctgtcatttgcgacaacacggaggaacctggaagatattatgctaggtgaaatcagccaggcacagaaagacaaatacccagtgatctcacttatacatgggatctaaaacagttggactcatagaaggagagattaaaatggtggttacctggggctggggtgtcgaagcgggtggggtaggtgtaggaaatggtaagacgttggttaaaaggctcagagtatcaaacagaaggaattaaattcaaaggaaaaaaaaagggaaaactatcaacaagtcacaagaaaaatagggaaaggatgtgaacaaatggttcaaaatgtgtaaaagtattttaataggtaacccactgatacggttcggcaacaaagtacaaaagaatgcttagtgtaaaatcttctcccatcccagtccctggcgccaagcaacccacaccagaggcctctgacgctgttagcttcttgtatgatctttttgagatgttttatgtaaaaataagcgtatttgtgcctgtgagagtgtgatgggtaatttcccttttttggttacactaatggtagtatactataaaaacaattataattatacacctaggttttgttatacttttaatatattgaggaaatcattccatatttatatttattatagagctacccagtattaaaacctgcctagcattctatgctaatagtgccatattaacatttaatacatgttgtttgctgtattttgccgctacaaattacactacagataggccaggcgcggtatctcacacgtgtaatcctagcactttgggaggtgtggcgggcagatcttttagctcaggagttcgagaccagcctggaaaacatggtgaaaccccatctctacaaaaaatacaacaacagtaaaaataattagctaagcatgatacacgtgcctgtagtctcagctacttgggaggctgaggtaggaggacagattgagtctgggaggcagaggttgcagtgagccgagatggtgccactgcattctagcctgggtggcatagtgagaccctatctgaaaaaaaaaaaaaaagtctcacaaataatattctttaaatacctctgtgcaaatcaacaactacatctatagtaaatatctttttgccaatttgtatcttttgaattttgtactatatacattttttaaactattcaataaatagggtcatattttcattgcaaaatgaaagatgcattttaatgaaattgaagttaaagaagaaagaaatgaaaaagaaagaagttcaaagggatgaggagaagaaaagacagatggtaatatgactgtcctctaaaggaaatggtttctgttgctaggtttttccacttagctaaagtcatc

SEQ ID NO: 40007 - DNA, 2300 bp, Homo sapien
aatattctttaaatacctctgtgcaaatcaacaactacatctatagtaaatatctttttgccaatttgtatcttttgaattttgtactatatacattttttaaactattcaataaatagggtcatattttcattgcaaaatgaaagatgcattttaatgaaattgaagttaaagaagaaagaaatgaaaaagaaagaagttcaaagggatgaggagaagaaaagacagatggtaatatgactgtcctctaaaggaaatggtttctgttgctaggtttttccacttagctaaagtcatcagctgtttgatgaatagacaatagtttggattaaaaaatatttaaaattcttttattgttcacattcaagatttaaacatgaaggccattagaaatgaataggggcaaatcaagagttctagggcactggaagcatgtcaggagaaaagacctctgtttccttcttattacaaaatgctctctgaacaggccctcctcattctaaagatgtatgagtctgattttattaatatcattgaagtaactttccctttcatttctcctaaagtatccctcgagccaatgaaaaagcaaatgaattgcaaggttatttttcttaaaataggaccatcgtcttttgaaatacacaggattttaattttaaaatactttgtgaattatattttccccatgattgccttcaaacagagggtactttttctcataatcattattgggaacagtgtggctacgagatcaaagaaataatatcatagaaataatatggtcacatttacgtagaaataataatcctggaattgttttctttttcttttttgagacaaaatctaactctgtcatcacctaggctggagtgaggtgatgctaccccagctcactgcaacctccacctcctgaatttaagtgatttttttctgcctcagcctcctgagtaactgggattacaggtacctgccaccacacccagctaatttttgtatttttagtagagaggggtttcatcatgttggccagactggtctcgaactcctgccctcaagtgatccgcccaccacagcctcccaaagtgctaggattataggcatgagccaccgcgccagaccccaaattttattttttattcatatattctccactgtctcagctggcattaatgaatcttaagtttgcttttactgtatcataattttgaaagtgcctagtaaggaggggttattagtgtcctgatgtatttcagaagcagcaaactaatcatctttgaatagtggtagatatcttttcaggtagaaaaatttcatcagtaatgccaataagtacaaatataggctctaatgatttcttttaatatttctggaaagtaattagattatatatctgtgatagaatataatactaagtattagactgtagaaggctttgtttcaaggtggtttattcattcatgttactacctacctcaatcataacatcagtaagacctcaatgatctaaatatttgggctttgtaaatcctgaattacttaggtctctgctactggaaagtgaatatcaaaaattgtctatttaagaaaaaaagtagtttttataatctgagttgtatactggacccatagagatcattttaaatgtagcaatgaatagagattggataaaaacaatgttaaaaattcttttctaattcaagttcaaattttaaaaatttgaaaggcatgttttagtgtataaataatagaaaagttgttgacagttgtttgttttgcagtcagcaagtggtaagaatctttggagagacaacaggagaataaaagccgaaacatgcgtatatacaaaatgaaatatgaatgtgagcttagaggctacacgtggtctctcggatactagaactatctttcttgccttggaccagctaacgtgccttggttgcgccagtgtactgagccctgtggacatcacctcattaaatattcaataaatgttatttttttcctattgcctttctctcttctatatgagaatctgtaagtattcgccgaaggcttttcttttgcttttgtgaataccttcacaccatgttgtattctgtcttggttagttaaaaaaaaaaaaaaagttggccaggcacagtggcttgcacctgtaatcccagcactttgggaggccgaggcaggcggatcacctgaggttgggagttcgagaccaacctgaccaacatggagaaacccgtctctactaaaaatacaaaattatccggtcatggtggcacgcgcctatgatcccacct

SEQ ID NO: 40008 - DNA, 2300 bp, Homo sapien
ttctcccacctgaggctccagagtggctggactcctgagtaggtgggactacagttgctttccaccacacccggctagcttttttttttttttttttttttttcttttttcctttttgaagagatggggtttcaccgtgttaactaggctggtctggaattcctgggctcaagagatccacctgcctcggcctcccaagttgctggaattacaggcgtgagccaccacgccagccactctctatattcttgaggccacatttgatattgttgaagccagtggagtcttaggaaattatcagcgtgggtgggttgattgagttttcagctctttgagtgacagattgccagttgatggggtgagaatgcattactcttgcatcacgtggtataggcacctccttcccaatattaagaataatccactataagtaaatgtatgcacagtatcagatcgtatttttggatggaggaaaaggaaaacaataagatttaatgagaccatctttgaaattcttgatttacagtacctggtcttataaccgtattcatgcctgtttttagaaatcattttggggcgggtgtggtggctcatgcctgtaatcccagcattttgggaatctgacataggtggatcacatgacgccaggagtttgagaccagcctggccaacatggcgaaaccccatctctactaaaaatacaaaaattagctgagtgtggtggcatgcacctgtaatcccatctactcaggaagctgaggcatgagaatcccttgaacccagaagatggaggttgcagtgagccccaagataaggctactgcactccagcctgggtgacagagtaagactctatctcaaaaaataataataataataataataataaatttggatgtgaatatttgtagcatccacctgtgctaaagaattcaggttactttttttctagcaaagactgtctaacagtgaataattattttaaggaattcactactctaacatattatagactcaaatgtagagatgaaatgcattgtacaaattgttcataattactttgaaaaatatagctccttagtatatagaatgtgaggggtaggctgtaaggctagatgggtcatggatatcacctaatctgggtacatcttaatttttctgctatcagtgccaagcagagaaatgtttctagattgacatctcagtgcatttttcagtgtcatctgggaatccttaagtcttttcagtaatctgagtgtttattatccagtcgcacactaccatatttgataaaaatggagaagccgcccatttcattagtagcactctgtagcaaacccaagttgcttgagaaagtcggcaaagcaaggaaactgttctttttgtctccagctcctcctctccttaggactcatagcagatttaacttcagcatcaaagcacctcccgttcaaaggctgttattatgtgagccttgctaaatacagaagttgtttgttctgaatgacagaaataagtattgaccggtttatcctcacatgcttcagattctcggtggggatcgtaatgtgttcttttcacattccgccgtcgggcttttctcccccgacaaagcgagtattatgcacacttatagccatgataccacacacttaactgtatggaaatacaaacttaactttgctctttcgttttacctttcctggagctataaacagtaacatgccatggctgctggtgagcattcaaaaggcaaagcagtctgtcttctctggagttcctctgtgcttagagtaatattttccctgctggctatttaaaactgcatattttagattctcatttcggagtggcccacccccatcccaccaaaccctcaagaatctgaaagtccataatacttcttgagttctggtcagtgtttccagtgactcaaaaccaactgtaaaagcctcacatggtgggatctgtggagcagggaggaatcctacacaaggttcttttcctgtttggccttgccctttcgggtcctgttcagagaggtcatttggagagctggaatttctgcttgacagcctgaaatgcatgacatgggtttcctgctgttgcatatagtgctggggtggacctggtttcaggacaccagggagcctggggtcggctcacaaaacccccattgttccttttccatcttcctttagaaacctaaagatgtaatgttctccgggtcatcagcagcagattttattttgacttcaggtcattcactgttgagctctggagttggctcccattgtgtta

SEQ ID NO: 40009 - DNA, 2300 bp, Homo sapien
gaccatcttggctaacacagtgaaaccctgtctctactaaaaatacaaaaaaattagctgggtgtggtggcgggcacctgtagtcccagctactcgggaggctgaggcaggagaatggcgtgaacccgagatcgtgtcactgcactccagcctgggcgacacagcgagactttgtctcaaaaaaaaaaaaaaaaaaggcttctcactgtttatcactcctaaggactttccttaacatagtcacgcaggggactgaaacttcttgcttttactttcctggcctcccgttgaatcacactcccccttgctggtgacggtgggctcttgggcagctcctccggctcccacactcatgagggcaactgcatcatcttgggccagatcagatctccatttcctgggccctcacagcaccgctttttcatacaaccctgttgcttcctcccaccaggctgtagcctttgcaccctcagcagttaccagtaggtaaaaagcctggaaacatctgttgaacggaggagtcccataccctttagagctgaattctgctttgggtaaattagggagccagtagtggaagttagcttatttatttatttatttttgtacagatggagtcttgctatattgccaaccctggtctcaagctcccgggatcaagcaatcctcccacctcggttcccaaaagcgctaggattacaggtgtgagccactgcattcacccagcatttttgttttatcaaaatttatgagggaaatgggagaagagtcttctgtatgtaaactaagatatcgctatgaaaccaataagttttaaactataattaagagactaaattctcctatttgtatttgccccatttaaaaacaaattgtgcccttccccagctccaatattacctccctgctttatgtatctccatcagacatactctatatatctcatttattttgtttgttatgcatttttcccacgagaaagtaacctccaggagggaagggatatttgtctcttttgctcacttctgtatctcccagtctacagctgtgtttggcacatagtaaatgctctttctgtatttgttgaatgaatgagtttagttcagtagtcttccttgcccagagatagcaggcaaaaacatcaattaaccccgaagtaaattttcatggaatccagttctggattttttaaaggctcttaatgcaactatatttagctgtgatcccttcacattaggcttcctaatacatcaggggtcctcaaactacaggccatcagaatcatctgagagcttgtaaaagttgcagattctcatcatcaaagattggaattatgcagtcagaccccagctaagggcagttccaggagctgcattcggactgtggcccaagggccagtttgagaaacacgggctgtgacccccagcacgtgccgagtgaaagctcaattcctctaaggcagtatttatcacctacattggctccgtacccatgcgggttttagcaataaataaccaatgtccaagggacaggtacccttcgctcgtttttacagatctggaaacactgaccatcccttcctctccgcttcccctccgttcccgcaaatttacgtggttcccgccaggataaaagacaggtaaaaagtacgcagagctaccaagaaaaagaagggacgctcaaggcacactagggtccaggccggacacctccgccaagtaaatgccttgtgacctttgcctttgcacccggggccaatagttggcgacttttcggcgcttcccgctgggaacgtggaggcccgtgggggaaacattccagccttcggcggaggaggcgcggggcggggcgggggggaggagggaaccgagggggcgggacagaggagaggcggggcctgggcggggcggggctagagggcggcctgaggctgcggccacgaggaagaggggcggggggcggagcctgggaatggggcggggccggagaacagcccgtcgctaaggcctgcgacccagacagcggggaggaggcggtgccgcccgctctggccccgcccctcggggggtgggcccagcgggagggcccggctggcggagcgcgcgggagacagttcgctccgactgcccgagcgagggcgcttcgctcccagccaggacatggccgcacctctccgcatcaggagcgccggctcacggacttctcgcccaactccctgagcgctccctcgtttcgatctttagaaaaccccgctttctttctggggccgtgacgaggggcagggagcggcgagcaaggat

SEQ ID NO: 40010 - DNA, 2300 bp, Homo sapien
tagatctagactggaaactcaggtgagatcagtgcctaggaggagttaggaatccaggctgcattttcctttgtgttcctgtaacattggaacatgcttctaccttgaaacttatcacattattttggaatcacttttggtcgatgtgatatttcctcctcgaagacagagttgaggtcttattcatcctaaagttccgcaggcctaaaacagcatctggtgaagggcactacccatgccatgggtacttcatgccattcctctgcaaaacaggtccagatgacatgattcaacacgcttcaaggtgcccagacctctttgaaggagaaacacacacaaactctggggacattgttttagaatggaaccaggcattaggcaatcatattttctgaaaatctttaatagaggattttcatttggaattggcccgtgcaggcacggaggtctgtctacatcagcagttagcatgcattctctcctaatctgtgtccagtccaatgataaggcaaagacgtggatatctaccatgaagtacatgctcaatgggggacattcatgagctttaacagtttgggaacaatacagtttaggacatacgggttattaataagcattggtactaatgttagttataattcatgagcacaatctcactattttcataatcatcctttgtataattaagttgttaaagatatatgtgaaaataatgcgtgttgtagaaattagaagactcaggagatcagtgtgggttgaaaatgactttgtgtgtaaaaataattatggtaataattagcatttgcatggcttcttgaaatttacaaagtgtttttacaacattatctcatcttgcaaaggttatgaactggcctttagatgtcttatgccaatattaagcttccctgccaaaccttgtgcattataaggtaagatttgctagacagaaaaaaaaagaggattaataatgcatttaaaaggcaaaaaatctgccaaatttattggcgtagaaatagatttatttggcattttagaaactaaggcgcatatcttgtaaaagaagcagttggctcatattttgatttcatagtgcttggaactttttttacattttgggggatgagtttttgatgtgcaattgtaatgaggaagttcacttacttggaactagaagattcataaaatcaggggatatttgaaactttttaaggggcaaaacctagagtgacttgattaaaccactgtaagtagaagtatggttagagagaaaatgtgaggagctgatcagtattttgtttaaaactcaggtgtccatttccttattttatttattttagagacagggtcttgctctgtcccccaggctggagagcagtgggggtgaccacaggtcactgcagcctggaactcctgggctcaagcgatttttccctctcagcctcccaagcagctgggaccacaggtgcatgccaccacacccgcctaatttcttgtaggggtggggtcttgtttgttgcccaagctgttctcaagctcctggcctcaagtgatcctccagcctcagcctttccaggtgctgggaacaggcgtgagccacagtgctggcctctcaggtctccatttcttagagggaatccagattgatctgtaaagtgctccttccagccatatcttccttcccacaaccacaactaaaggttgaacttcctatctcatcaaccgcctaatctaaaaccatgagttaatgagataaaaatgagtcactaaaatgcaaacgttcttgagaatcaaccttgaaagttaaagacaaggccacctgccagccccaccctcccacctcccctgcgtgcttgcctgcggcgctgcgtttccctttgaaaacgcgaggtcacctggactgcccctgaagggaagacctgctatgtgacccaggagcagcccggcgcggacccaggtgagtcattgggttgcacaggaagcgagacgcctccggatagctgtgctgcagctcgcgcgccccgcgagggtgtcgccggcgcagggtaagtctttccagatgtggccgccgcgcgcgcttggccgcgggccaggaggccgcctgcagttggcgcttcccggggccgcagtgccagccgcaatgccggcctcctgaaggcaggcgacagcctgcggccgggagcacagcgcggggcggagtaccgaggcatggtcgcggcgcccgggctgcgctgaaggcgtctgcgagcggatgggggaccccaaggcccacgtgatggcgcgccccctgcgagcccctctcc

SEQ ID NO: 40011 - DNA, 2300 bp, Homo sapien
gttctcggatgccaaaatctcctgcccaaaggtttaaagaaaataaaatttatgtttatcctccctaaaggcagagaaatggactaaattacctctctagaattgtggcaacactatgattctagaaaaactaactgaatttaatttaaaaatatattacagttttttcatattgcacttactacttatataaattgtttaaattattttttctttgtccttattgcatgcatgaatacatttttgtaaaatattccctacctatcaatgttatacaagattttctttgagatacagaataaaaattgtcatcctttcttttttcttttcttagagacagggtcttcctttattgcccaggctggagtgcagtggcacaatcatagctcactgcagcttggaacacctgggctcaagccatcctcccacctcagcctcccgagtagctgagactacacctgagcaccaccgtgcctggctgatttttgtttgtttgtttgttttttgttttttttgttttagtgatgagggtctcattgttttgtcctggttggccttgaactcctgcactgaagtgatcttcctgttttagactcccaatatgtggggatcaacaggtgtaaacgatcatggctggcaaaaataaacattttctaagactgaaactgcttaacgagggcatttcaagatgcagtgggaaatggctctcctgcttgtaacagaactacccttcatgtgttctcacccgcccccttatttaaaatatagctttatttacaatgtgtacaacaaaatttatagtaactcaaactaaatgggttccctaaatggtttcaaatgacacattctccttctttacctaacatcactttgttagatatctacaaacatgtttattttatgaggcttcacaatagagtagacagctttaaaagatcttagcaaacacagagttattcagacacagaaaattttcaagtgtcttctctgtgtgccagacaccttatacatactgggaaaacagtgatgaacagaatttgaaaagcccctttgctcatgaggctgaccttccagtggggaagattgcctaacgacatggaaaacaaataagtcaatgtcatatttagataactgttaggaagaagagaaaataaggccatatggtggagagcgagggatgcttggagagggggtgagaagtggctttagtcaaggttaccagggacgtcagctctcatggtggtgacatttgagttgcaccatgaataaccaggagatagcattgcaagcagtgacacagaggagagaagcaggggggagttgcagatgcggagaccttgggagggaaaggagcttggtgtgctcaaaggacagagacaaggctagtgtcactgctagcacagtggaagatgggggagaagagagggacaagaggtcagggagcagggacaggccagatctgtgagcccccctggaggagttttatgttggcagaaatggggagcagctggaagttctaagcaagaagagtatcataagtggattaataagcagaaagatcactgtgcacatggggtagactgcgcaggcaggggagaaggcaggagaccagctaggaaacaatggggaccaaaccaggtttgtgggagacagacatcaattgtctctgggcaaggacaaggcaagaggaaaacatcaggagttattttgtagataaagtgggcaggacttactaacgcatggactggatgagtcatttgaagaaaagagaagaatcaaaaattccttctgggtgtttgatcttggctgaaaatctggtgtatcagaaggtacagagggaaaacaccagttgtcctggttttgtcatgttaaaaatgagatgcttgttagatgtccaaagtagagatttaagtcataatcatagctattatttatcaatgcctattatgtggcaggcgctgctctaagcccttttaggggcaatagctcatttatgcctcttaactttatctggaaatagggactgctattgtgactgttaaggctgtaataaatggcagagtctgaattagcccacagaaaatctggctcaggggctctagctggttgtcactgtgctaagccaaggagggagagacaagtctggactcaggagagaggtccaagctgcaggtatacattttagaatcatcagcctccaaggtgtttttaagactatgggggcaggatgagatcttccaaagagaaaagagacaggaagaaaggatggctggagaaaatgccttggggtctgccacaat

SEQ ID NO: 40012 - DNA, 2300 bp, Homo sapien
ttaataaagaaattaagtggaagtcaaggaaggcagtttatggagaaaaaattaaagcacaaagcttggagctagaatatctgagttccagtgtggacctgggcactttgtatcatttgactgtgagaaaattgcttctcaatactttatttgtaaaataaaacatatgaatacacgcaaaattgttggaaagattaaataggcatactgtcagtagaaacactttgaatataaatataaatactttttaaagaatttatggaagaacagacttctttcttggcctatggttgaagattaaattaaagaaacctaaatgctcatgtttttagtcaataagactttgatctaaacttttaaagctgcttctgaccaaacgtttttatttgactacttctcatcttcaaactcatgcacagtataagtcattcttgccatctaacatgggtctaatatggttcatgatttgcattaactttgagagattttagctacctaataaggaaaaaaatagtagttagaaccttgtgcatctttgagttatcacctacccaatattatcaaaaagtactacaagatagcccttgtgatatacagggatggagaataacagtgaacaatgaaaactacttacaatttcagagaagaacaggatagatcttagggccaacaagtttaagatgtcttttacctctttatatgttactcattttatcacatccaactggaattattcttgcacttcctattattgaaagcttctagaaatttgcaagaagcagatagacctaataattaatctgatcatcagtccccccccaaaaaaatgcttgagtcataaatagcagcgaaatccattgattgtaaataaagtagaagggagacatgactgagccatttccaccaagcaagataattaaagtcagagatgctgtttcctgcttccctggtataaacaatgaagctgctctactggcctctccacagcctggatgtcccaaaaccacctccctcttctttccttccacattctctaaagaggattctgggtcataaaggaaggaaaattggtgtaacttttttcctgaaacgacttcagcttcctctgtgtttgtatttgtgatatcttattataagacgagctaacatctattattaattgatgcactaattaaagccatacttgcagtttccattagcttattccctaaattctccagagttgcctgtctggttttaatcaaaaccaaatggtagtccaaattcccaacctggagcagctaggaggaagtcattcaagggaggcacaagaaagcagaaaagataaacagatgatagttcacaaaatttgtgacggacgaaggatgcagataccatgagcggctttagagatgtgattcaggaacgctgccatgctagatggaagcagttgtaagtgtttaatgtcagcaagactctaatacgatcaagatggagcctgtcttctgctccagcactggatttttgtaactggaggattctgactagaggtaatgcgctgctgcatttgccataacacgaactattttaattctgtgaaggattcttgtgatcagagagatctggaagaaatcgttctattaactggatgcttgggattttacttacagatggtctcagggacagaatgaaaagctgcagcatttccaattttaagtcatgttcaaaaaaggttttgccatttagaagaattatggtattaaggctaaattcatcttgctctcttaaaagatcttttgaaatgagagcaagcacaggcattttgattaagctgtgcatatacatttaatatagtggaaaggttgtggatagagagaaaactacgttttctttctttctttctttcttttttcataagcagtgtgggatagaaaaagctctaggactttatgactctacagctaatcacctcaagagctttgacaaaactcacttgagttctgtgtaaaatcagaactcctaaaacgcccaggcggctgggctctcccctcctcccctctcttcgtacagcctttctagcatgcacactcctcagaggcaggaaatactttccaggcaatctgggcctggttgtggaggccccttttgcaaaacctcagtctgaatttagtagacagaagtcactaggaatgccttgacaggatcctgccttagctaaggctccctccagctgcagagggtgtttttgttagactcacacactgcgtgaaactgctcagaatagagccatgatctcaaccacgaaatgggaacttagattt

SEQ ID NO: 40013 - DNA, 2300 bp, Homo sapien
tgatcattaaggaaaaagctgggagaagacccttggccctgctctctgataggaactaggaagaagagaaagtagctgcagaacagtaacaggaggggcatagcaaggttaggccaagagagcctgactggactctcttttctattcttcatatctcccaatccccaccacaagcagccttcagccacagcttggtccacaaagcattttgacattcccaacagcccctgagagatggcaagaagattgagatttccaaaggaaaactattactcttcatatttgtttaaaatcaaactttgacctgtgttttcatgaatcttatttgataaatatagtactgttgagaaattttcttccttagataacacacttactagaatgtaaaactgtccactgggtcacgctgaatattacaaggaaattaattatagaatttcccacccacatatatctccttctaggataaagttatttttaaaaatcaagagaaatttaagacacgattataaaaaagacagattaccccagacatttggcatgttagaagacacagatagattttattttaagtatagctcccttgttcaatgttatggataagatatagctaaaacatgaatagtgtgtaaatatgaatgtgtaaatattcagagaatgaggcagagatttgaaataataaataaggaaaatattgagccctattggaaattacttggagttactcacaaattacatgccacctcttttttaaagactaccattatatgataaaataaaatttgggttgaataaatgaagttggagtctccttatcttcaacaggaagctggctcatatacttgagagatgctttttgaatatttgactttcactttttgccagaatgaacatttggggaatatatctggctagacctgaataataccccccaatccccaagaaacacaggaagaaagagagagagagacaaaactgagaaagaagggtgtctaggctcttaaaattatcctagacattgactaagtcctagactcaagaactattataacctaggaaaagtccatctctagagttaacattttataatttctcacgataattaataaaactctactgtgttttttaaatgaatccattaataaaaaatatatcctgtgtaatagcctaagtttggggattcagttagaaaaaaggttagagttccctgaacttatagtacttatttctccaaatcctctggacgtgtgtaaggtaagatttatttgttccatagccattcactcaacagagatttcttgaacacctgctatgtgtctgctgattgctgggctcatactagtcggcaacaccgacatgatttctgccttcagccttcataatcagatactcatacaatcacatagttggacactatttaaaaaaaaatgctggaaagagtttaaggcaggggtgggtattaagcccttcctgaggaaatgggactcggaggaggaggataaattaacgatattaagagtgaggacgggcgtggatatgctagccagaggggacctgtatggacaaaaggccagagaaactgatttggaaaattaaggtcctcccccgcccctgctccccacccccgaccccgcccaaacttcgaggtcctcagaatgctggagcacagaacactacttcttacagaatggtttctgtattttgacttttccccaaagacatgctctacaaggaggtgtctcttggctataaacactgcagacaagtttttgcttgtgcatcttgtccagcgcgttttgcttgatttttaaatctagatgcatttaggcgggcgtacacgttcggatttgtcacaggccacctaactctattggtctcacacacgtgtgccacctgtctgacccctgggaaacagagtttgcaaggttttcccgttgactactcgactttagcaccaaagagaagcaggagtgcagaagacagggcaaaatcgccaacccggcgcaagcagcgcaagcgcagtgggcgctggggagcgcggaggaaaaggcgggacgccgcatggtggccagtcactgcgcatgagcggcccgcgttgccaagacagctgggaaggcgtctcccggaagacgacctccgcagagctgatggcattgagatccattcccggaggggtcagctcctgacgggttcctgagccagtcttaacctgggcaaaggagatgaggagccgagcctgatgcattgtgatggccatctgcccagaattggcccaaacggacaaaagtgctcttgcaaac

SEQ ID NO: 40014 - DNA, 2300 bp, Homo sapien
ctcataagtgggaattgaacaattagaacacatggacacaggaaggggaacatcacactctggggactgttgtgggctggggggaggggggagggaaaacattaggagatatatctaatgctaaatggtgagttaatgggtgcagcacaccagcatggcacatgtatacatatgtaactaacctgtacattgtgcacatgcaccctaaaacttaaagtataataaaaataaaataaaagagttccttacatattctggacaagaatcttttgcaaagatatgtctgttgcaatattttcctcagtttttggcccatcttattctcttgacagtgtcgttcacagagcagaagttttaaattttaataaagactggcttaccatttttttctttcatgaatcatgcatggtgttggatctaaaaattcatcaccatacccaaggtcatgtaagtattctcccacattatcttctaggagtctcacagttttgtatctcacatttagttctatgactgattttgagataattgggtggaagaatataaggtctgtgtctcaattcttttttctttttttttcttttgcatgtaggcgtacaattgtttcagaaaggtttgtagaaaagactgtctttgtgccattatttttcctttgctccttcatcaaagttcagttgaataaatttctgtgcctctatattttgggtctttattctgctccattgatctgtttgtctattctttcaccaataccacactatcttcattaccatagctttataataaatctagaattcgagtagtgtcagttcgctgactttgatatttttcaatattgtattagaaaatctgggtgttttgcatctctatataaagtttagaatctgcgtgtcagtatccagtaaaaaactttctgatattttgattgaaattgtgttgaaactgtaagttggagagacctgatgtcttgacgatattgagtcttagccacaaatatggaatatctctcagtttatttagttctttggtttcatcagttgtgtgctttttattaaaagcatataacttgggaatattttgtaaaatttatgcctaagcatttcattttcttagttttgctaatgtaaatggtattgtgttttgaatttcactttccacttgctcattgctggtattgattgataggaaagcattttatttttgtacattaatcttgcatactgaagcctttctataattgcttattagttccaggatgttctttgtttgtttgtttccatttcaattttctacatagacgatcagtcatcagcagttttattttttcttaccaaatcactatacctttctttttttttttttttttttttttttttttttttttttttttgccttaataaggacttccagtacaatactgaaaaggagtagtgagaggacacttacttgccttgggaaagcttcaagtttctcatcattaagtataatgctagctgtaatttaaaaaaaaaaagctctttatcaagttgaggaatctcttctctattccttctttactgagaagttttaacatgaatgggtgttgaattttgtcagatgcctttcttcatattttgatataatcatgtgatttgtcgtttttacccagttgatttgatggattacattaattgattttcaaatactgaatcagtcttacattcccaggataaatctcacttggtcacatatttcttttattcatcattattttattgctaacattttattgcaggtttttacatctatggttatgagagataatggcctatagttttcttttcttctaatgccttggtctgattttgtattagggtaatgttggcctcatggaatgagttaagaagtattccctctgcttttgtgttctgaaagagattgtggagaagtggtatcatttctaccacaagtatttggtagtaaacccatctaggcttttctagatgctttctgttttggaaagttatcgatcattagttcagtttcttttgtagatataggcctattcaaattgtgcatttcttagagtgtggtagattgtacctttaaagaaattggaccggccgggcgcggtggctcacgcctgtaatcccagcactttgggaggccgaggcgggtggatcatgaggtcaggagatcgagaccatcctggctaacaaggtgaaaccccgtctctactaaaaatacaaaaaattagccgggcgcggtggcgggcgcctgtagtcccagctactcgggaggctgaggcaggagaatggcgt

SEQ ID NO: 40015 - DNA, 2300 bp, Homo sapien
caaacattatggaaaatagtggggagattcctgaaataattaaatgtagaactaccatttgatctagcaatcccactactgagtacctacccagagtaaaagaagtcattatacaaaaaaaatacttcactttcatgtttatagcagcacaattcacaattacaaaaatatggaaccagcccaaatgcccatcagtcaataagctgtggtatatatatgtacagtggaatactactcagccataaaaaggaaggaattaatggcatttgcagcaacctggatgggattggagactattattctaagtgaagtaaaagtaacttaggaatggaaaaccaaacattccatgttctcactcataagtgggagctaagctgtgaggatacaaaggaataagaatgacacaatggactttgggcactcagggggaaatggtgagaagtgagtgaacgagaaaaggctacaaattgggttcattatagactgctgaggtgatggatgcataaaaatctcacaaatcaccactaaagaacttactcatgtaaccaaatatcacctgtttcccaaaaacctatggaaaaaaaaattctcaacattttatctacagtaggattgagtcaatgaacattacaatgataattgtatagtacatatattttatattacttaacatataatttaattacttattaatattatttttatttgtgtataatttattcagaagtatttatgttagattcgtcatttaataagtataaaagcaatctgagaaaaaactgaagagataataatgaacaattattgtcttatagaaaattatattttataaaaatcagtttccatccttctggtaataaatatgttattctgaaaattgtacacttaagacatattcagtgcttattcatattgttttactcttcttatccatatttctaagttgtataagacagtaaaaaatgcatttgcttattgaaagaattaattctagaacctgaatgtatgcattatcaaagaatatcatctttagtttttcagaactgacttctaatttcattacattatgaaatagtatggtataatatatagtgttcttagagttaaatatttttttctgataactcattgaaatacaactaaaataaccaacataattctgaataaaacttaatttgatagctattgtctacataaatctgcacaaatgtgaattttctttcataggttcttgcaaatacactaatatttttactgaagcatatatactgaaccatttgtatcctgcatttttagagaaaggtacagaaaatccttgtggtagactcagtctctctctactgcaaagaacaggtaaatcatagtctaagtgtagcttggtgtattcatctattcttgctctggtataaaaaaatatttgagacggggtaattgacaaagaaaagaggtttaattggctcctagttctacaggctgtacaggaagcatagaggcttttgcttctggggaggcctcaggaaacttacaatcatggtggaaggcaaaggggaaacagacacgtcttatatggcaggagcaggtccaagagggagtggggaggtgccacccacttaaccacgtcccatgagaactctattaccagaacagcaccaaagggggaaattcactgccatgatctcatcacctttcgccaggagccatctccaacattggagagtacaattcaagatgagattttggtggggacatagatccaaactgtatcacttggacatgagtagagttctttagttaccggtaactggaggtagacctgagcctcccaagggaaaaacttactgttgaaatgggacaaatctgactggaaataatatatatattgtggatataacaatgaattaaacatctctaaaaaactatattgaacaaaatgattcgaagttttctataacattttaattacacaacaatagttatttgaatgctcactgccaattattttaacgtacattgttcttttgtttcaaaaaaatcatgggtttattttttttaatgcttctttttttttccttctttctctttctttcttttttctttttcagatgacacgagaacaatacatactagcaacccaacagaataacctgccaaggactgagaatgcacaactttacccagtgggaatttatggatggcgaaagaggtgcttatacttctttgtccttctgctgttggttaccatgatagttaacttagccatgacaatatggatattgaaagttatgaatttcactgtggta

SEQ ID NO: 40016 - DNA, 2300 bp, Homo sapien
actagggacctcccatcagaccacagccatataggtaaatgccttattacaccatgaccaaataaggcaaacgtagctgtagccaattaggtaatttccttactttgtttttatgtttagtctattgaagcttgctctcaggccactggagctgagctttctgaacacttctggttcagagtgctgcagatttatgaattgttgtttgctgaaataaggtgtaaagtttattttgtctaaagtttttaacaggagtgataattcaggcaaaatgttcacataatagtgggaaatcaaaagcttgcgatacagaaaagtgatatatatttgtaaactcctttaacaaaggcatcgtagcataagcatgactgtagagccagactgtcaatgttcaaattttttctgggccttaatttctttatctgaaaatcgttaacagtggaacctagttgatagggttgttgtggagcaagcgttcttaatctggagtccatgaaatttcagcatctgtgaactttgtattgaaaaaatcgtaactttatgtctattaacctcacaacagtttcgtttctttgaattataaaggcaggcaacaaaccacagtagtattatcagtacctacaactttgtttcctacagaaattattttcatactcagtaagttgttgcagatatcttgaacaattatacgtatatattccttaagtattatatatataatatttttatattctgtatatatttttggagacagggttttgctctgtctcccaggctggagtgctgtagcatgatcggaactcactgtaacctcaaactcctgggctctagtgatccttccagcctcagtcttggaatagctaggactacaagtactccccaccatacccagctgttaatttttttttttttcgtaaagacaaggtctcactatcttgcccaggctgctctccaactcttggacacaagcctcctgcataggtctcccaaagcattgggtttacaggtgtgagccaccgtgcctggctaatactatgtatttaatttcatgcgtttagaaatatgtgctattttaagaaggcgtctacaggttttatcacattaccaaaggtgttcatggcacaagtgaagaaatctctagatactagagtaataaaaaccatgatgcattagaacggatcaggcccatatcaaacgttcaacatacagtctgctgctatggttctttttttttttttttttttttttttgagacagagtctcattctgtctcccaggctggagtgcagtggagtgatctcggctcactgcaacctctgcctcccgggtttatgccattctcctgcctcagcctcccaagtagaggaactgcaaggcgctccaccatgcccggctactttttgtatttttagtagaaatggggtttccccatgttacggcaggctggtcttgaactcctgacctcaggtgagccacctgcctcagcctcccaaagtgctgggattacaggcatgagccaccatgtccagtctgctatggttcttaaaatattcatagaatagaaattgaagtaagtctattcgtttttatattaaaagtagctagtacggtgctctgtacttatgcactccatggatgctgaatgagtcattgaatgaagtggagtctaggttgtgcctcaggccttccagtggggctggaaggaacagttgtgaagttgtggggcggcttctgtgcatcgggggactctggagttagatggtttcccagggctctgaaggagaagagctgtgttcctaataatgatctcaatgggaatagagattgctggggaccgcaggggccaggttgtcattccccaaagcttccccttcatcatccaagaaggcattcaggtctttctgtgctaggccccaggtaaagtgctggactacccagtaattgggttcagtagcaggatggcctcagattgaggtcccagggccaaaggaccactcctctcctcagcgctggtccgggaaaggcaagctccgggcgggagcgcacgccgcgcccccgaagcctggctccctcgccacgcccacttcctgcccccatcccgcgcctttccaggtcttctcccggtgaaccggatgctctgtcagtctcctcctctgcgtcctcggccgcggcccgggtccctcgcaaagccgctgccatcccggagggcccagccagcgggctcccggaggctggccgggcaggcgtggtgcgcggtaggagctgggcgcgcacggctaccgcgcgtggaggagacactg

SEQ ID NO: 40017 - DNA, 2300 bp, Homo sapien
ttatggggataaattatataatcagttcgtagtccctgaaatgtagtaggttctcaataaaaagtactcactttcacttacctcctcttcagctatactagccatttcagcaactgattattcagtagtactttgtcgcattatgtttttcattaagtattcatttacagttgtttcatgtgtttgtcttttttttctagattataaggtatttgtgtctttgataaaaaccttttatatatctccaaagtgctaagcacatagtaggtgctcatcatatacttgttagttgaatctgtttacttgaaaattttattccttgtctacttccattaaatgcaactggaaccattaaaatacaaatacagtgaggcttattggcttgccacagctccagaagatgcagtccataccaaatgacaccccctggagttgtcaggttgttcttcatagttgaaggtgtgtggaaaaatagttagttattccccaaactcgagctctaaagctaactatcatggctgggcgtggtacctcaggcctcacgcctagcacattgggaggctgaggcaggagaatttcctgaggccaagaatttgagaccagtctgagcaagatggtgtctctacaaaaaatttaaaaaattagcctggcatggtggcacacgcctgtagtcccagctactggggaagctgaggtggaaatatcactcgagcccaggagtttgaggctgcaagtgagctatgattgtgccactgcactccagcctgtgccacagactgagaatctgtctctaaaaaaactcgttcttaaaaaagaggtatcgcagttccaattctaagctgggtgataacaagtgaaaaacagaatatataaattaagcttacagtggacacagaaagtggcttccattgtcttaaaacgaaactgatagtttctaatgtcgttggttaccttgagatgaaaatggaatgatattcagtaaggaaatgtacagaataacagctaaaaatgaaaggcattcataccaattttgaaaaaagtatgatagtgaacaagtacagcaaggcaaaaattccagcatgtagagggtatagcaattttgcattgatttgtacatcttaacaaccttaagctgtacaaatagaacaataatatctaaatggtgtgatgatcagcccacagtacacatcattgatgagaatttcactggtctcaacctttctcatgctgagtcctggctttgtaaaatgacttataaaggtccaaggatttagagatgattaagagataagctggcattctgtaaaggcaccatcgtctatcccctgtcttatctagataaagaatgtagtgctaaatcttgtaataatattgtacaaatggaaattcaatcttaaggattattttttccatattgttgtatttcattgtggtgtattggaaagtgatctggactttgagtgagaagatgtgatttggaccatggcacttaaaaactctataacctcaggcaagtcttttaatcttctctgagcctcagttttcctcatttttcaaatatagagagtataacatttatctcataagacaagttgtagtaaattactgttttacaaatgtaagataacttttaactgtgagattccatattccagtcttacattattatgtttatctgccacagggagaagtcctcagataaaaatgtctaccaaaagactgacacgtggagttaatcatttgacagatgcaatgcttccacccccaacaaatatactttcttaacttctgtttgttatcacttagggaaaaaaggcagtcaacaaatatatttcattctatctaggaaaaatgtagccaaatcttttttcccattaacaaataatgtaagccttaatattcaagggtaataaaaaatacaagtcttccaaacagttaacttactgaaaacttttttaaaatcaacatttgctaaattcagaaacagatagtaggtactttatttatatatatataaaattactgtcaattttatatatatataattttacataaaaatataattttatatgtatgtaaaattgacagtaattttttgcagaaaattcacaatccagttttttgattccacactgcacatcccaccccctcaagaccagagaacacagggtctaggctaacacatcaaaagcagctctggagacttaattccattgtggtaatacagccttcttactctggcagaagctccataccgttcagcaacccactgaacgtagggaaggaatgggaagctcctg

SEQ ID NO: 40018 - DNA, 2300 bp, Homo sapien
taagggtttttttcctttattagggtgatgagatgacagaaatttcatcctaacatatctataatattattaaaatgttttataataaaaacaaaaaagtaaggtatatggttcccaacaaattaaccttgaaattctttcattatgaatttcctgtaaacttttcatccacttgataaaatgctgatattacagaaacgtgtttcacttctcatgagcacgtgcttttaatagattacacaaactccaaggattttacaatcgtttatcagcacactgacatttaataggaagagtaactttatgtgaagctactttttgtcctaactgtggaactgatattaaaaggcacacttgaacagtgtgagttgttcactgcctgctaatgaaggctcatgcaagtatgtatgttcacgttactaaaaaattacaatgattataaccagagtaagcagctgaaataatctggtaattttaataataaatgcttttgaagcaaagtgggttcactgagggtaatattttttgtttcagtttgctagttacgtgcagtgcagagagaaatattttattttccaatatgtaacagaagaatttttaaaatccctactttagtgaaccacaaagttttcttgaggcataacctaagatataaaatccagtcatcttgaaaaatatcttgcctttcatttatttatgtaattttaaatacggcattatgtatgtaatgagcaccttcaggaactctctgatccctgaaccaaagagatcaaaagtccacatcatggatctggcttggatgagagaagacagatgatagacaagacaaataaggaatatatgtttttgggggaaagaaaatgaagccagggtggggaagacaaagccccaaggggttgtaggttgaaaatggatgttcaggaacagtcagcttgcttgcttgcttgctttttctttctttcctttttttttttttttttttttttttggagacagagttttattcttgttgcccaggctagagtgcagtggcctgatcttggctcactgctacctctgtttcccaggttcaagcaattctcctgtctcagccttctgagtagctgggattagaggtacccgccaccacactcagctaattttttgtatttttagtagagacagggtttcatcattgggccaggatggtctcgaactcctgacctcaggtgatccacccgcctcagcctcccaaagtgcaggaattacaggtggtctgcttttttgagtcagactttaatgacggcctgagtgagacgagaaggcattcaggggctttgagcatgggagtgactcaatctgccttactttttaagaggattcttctgggaagtgtgtggagaattaattcaagaatgtaagcgtgaaagtcagggagctattaaaatcaacaaggtgaggccatgctcaatagctcatgtgtgtaatgccaaaaatttgggaggctgaggtgggtagattgcttgaggctaaagagtttgagatcagcctgggcaacatagtaagactgcatctctagatgggcatggtggcatgcacccgtagacccagctactcaggaggctgaggtggaagaatcacttgaacccaggaggtcaaggttgcagtgatgtgatcacacggctgcactccagcctgagcaagagagcaagaccttgtctcaaaaaaaaaaaaaagaaatgtcacggtgaaagggatgatggggcttggacaggatgctagcaaggaagtgacaagaagccctcagtttctacatagcgtttgaaaacaaagcaacagggttggatgagagattggatgtagtggatgagaaaaggcgaggaaaagaagacctctaggtttgcaccatattagaattctaagcaggggtgttgttaggcagtgcatatatgggtttgtagttgagagacgagctatgggcaagagataaagacttaagagtcatcagccttctagattatatttaaagcaatgaggctagtgagatcaccaagggagtgaaaataggagagaaaacagaacagaaactggaccctggctcactctgctgttgagacgttggggagatgaggaggaatacccagaaataaataaaactcccctggatgtgctatctcagtgcaatcatcagtatctctcttctcaacaaaaaaccgtgagcatgaacaactttcatttatgcactcagggactttcatttttatacatttattactgccaatcttgcaaggttttatttctgcttctaccacacaggaaaa

SEQ ID NO: 40019 - DNA, 2300 bp, Homo sapien
caattaatcattggcttgaactgaacatttttaacatggttccctgctaaaggtgtttttacatatagtaagacctaatagataatattatgttacataatctataattattatatataaaactatataaaattatatagtacctatttagacatataaaaagggaagttttttaatgaaaaattagattggctgaagagtgtggaaatcatcacatagggaagtggtcagcactgtggatatacaccaaacagtattacagagacatactgaaaataaagcacactgacagaaagaaacctcattaggatagaattttgggagattggtgtcttgttattcccagagtctgacttttctaatcacgtagcattgtcagggatatctaaattttaaacttcagattttgtacaaaaaaacctaaaaggactatattttaaaataagaagcatgtacaaataattgtaaaggaaagagtgtgagttttgtagtctccagttctgtgtcagtaagaatttgatgaggaatagccaatagcatttatgctggtccaggctggatcaaattgtgatcgtacttctagtcttcaagctgcctggttagaaattatgcagcttactttgatgcctgtcctactactactattagccttttagtggttaccttaagaataactgaataatactgttactttgcatctctcaaagaccgtgcgctgttcccgcatactttcttgcagacgtattgtcttctgaaggatggtgcccatgggcacagcaatttggggcatcttttggtaggaagcatgatttctcctgtttgggcacaaaagagtgactacggaatataagctaaacaccttctcccagaaatatcagttgtaaaacttagctcattaatgtaatgttgaacgttttcatgtgagtcatacttgaacttcttgaatgtgagtaaataacggagttgaattgtataaaaccctgatggatggcagaagggaaagaacatccctttcatctgatccatgcctgagattccttccctctactatactactggaaataaacaacttgtctggtgctctaaaaattaatgctattatcattatagagagaacaggagtgagtgcttttaggttattacttgttcttactaaggcatcatattctttcttcacgtgttttgtgtttgaggctagggataaaggtacaggaaaaaggatctaagaaaaaaactcgaatctctaaacatggagtctttttttttttttttttttttgaggtggagtctcactctgttgcccaggctggagtgcagtggtgcgatctctgctcactgcaacctccgcctcctgggttcaagcaattcttcagcctcagcctcccgagtagctgggattacaggcgcatgcctggccaatttttgtatttttagtagagactagtttcaccatgttggccaggctgttctagagctcctgacctcaagtgatccagccacctcggccacccaaagtgctgggattacaggcatgagccaccacacctagccaaacatggagtctttactcaacattatagtaacgtgaaagaggagatcatgagaattaatgtatgttttagaaggcatagattacttataaaaaaggaaagatcaggctgggcacggtggctcgcgcctgtaatcccagcactttgggaggccaaggcgagcggaccatgaggtcaggggatcaagaccatcctgaccaacatggcgaaaccctgtctctactaaaatacaaaaaattagccgggtgtgatggcacacgcctgtagaacctgggaggcagaggttgcagtgagcggagatcacaccactgcactccaccctggtgagacagcgagactccatctccaaaaaaaaaggaaagctcaatctgctgtaaattatgtgcttgtttcaacaacccttgtttcttttccttttcacttctcttttttttttaaagcggcctaaatggggtgaagagtgagttatctgacaaatttagattttgcaaacctgtgcattgatgagagtgctattgaaacacattaagaaagattttcaacgcaggaatgtgtcatttcctttcttcatgtaccagatgctgaaatactatgagataaagattttaggtttcaattgtaaagagagagaagtggataaatcagtgctgctttctttaggacgaaaggtaaagaaaaaaaaaggcttattttaatgttttttccagaattgtttctattgattgttatgtgtgtactctgtgtgtgtgt

SEQ ID NO: 40020 - DNA, 2300 bp, Homo sapien
ttctatgaatgattttgatgtactattcaattgagcattttatttctcactctttctacttctttgcacattttttgttttttctcatataaagtaagaatattaagtttggaattttaatagtttcatatagaacaattaatgtgacaacctcttagttatttggtttatggcttagtaggacaaagtataaaatttcatgaatgtgattatgagaggaggtaattctgctttcctttgcaattatttattgacaccatctccatggcttataactgtatttgttagccagataagaagtaatcatagggttggatttgtgcagaacagaactatttaggaattcttttggctaaggtcaaggagagggagggagaaagcaaaggtaattttttactttcagtattacaattgtattatatcagaaaaatcccaccagagcatatgacagagaggtttgggtgctagagggaatagcaggttgactgctgtgtcatttagagcagtaacacagatacgaggctcaataatgcaggacaaagagaatttgaatacatatttgttatgctaatattaaatttcttatgttacattaatctttctttagggctgaggtatatctttttccatggtgaaattgtcccaaaatgatattaacatgattaatagcttctccagacctggctaactccctaggcttgcaccaaggtaggtgtggaggtggggctgaggtatgaaaatatctccccctccacccctacatcacagagcaatactttcttatttctaagaggaaaaaatcagtaatatattagcaacaaaaaaatatgaaacatgagagtttatggaaatacattaaaaaacaagtaagaatcaagtgaaacttcattttgtttgaggacagtgtgaataatgactttactttctctaatgagcgaatttgttttccaaaaccatagaaatataaataccttctgattcatttcctggcaagagctaactgtattactgtagattattattattttttctcactgcttctgttgacactgattactatagattatacctctccaattgtattacttcttttagtggctctggttgtaatttgtaggacaggagaaaggatatttaggaagtgaaaattaagttccacgtactcttacagcagtattgtaaagaacacgcactcacgtcacctataaagggcaggaatatcctgctcacacttcctaagcagaaagcttgcattttattttaaattacagtattccccctttatccacggttttgctttctgcagtttcagttatccatggaccatcatggtccaaaaatcttaagtgaaaaattttagaaataaacgattcataagttttaaattgtgtgctgatcggagtagcttgatgaaatctcatttgggtgcttcaacacgctttgtgcagtgcatccgcactgtctatgctacccatccgttagccactaagagtcatctcagttatcacatggactgttgtggtgttcaagtagcccttatcttacttaatgatagccccaaagtgcaagagtactatgtctaatgtataaattaaactttattataggcatatagtatagaaaaaaaacactgtacacaggattcagtactatctgcagtttcaggcatccactggtgatcttagaacacatcttctgcagataagccgggctcttgtactccttcaccttcttcctgttaatttatagtaaatggaatagcagtattgaactgtatcaaaggccagtgagccctatctgacatgtccggaaggtattgctggatcagggtgaagactgaccaaaggaagtcacccaaagagaaaggcagtatcagagagccttctcgtcttcccgaatcaccttttccttaaagtgggggaacagttgatttgactcaagaaattcctgagagtctagtgtcactgggcttgtgtggaatgtggctccttcctttttctgtgtttcccaaggattggctatgcacagctgcgctgggctcacctttcagacgaagtcctcatgaggtaaggaaatgaggtcaggccaagtcacttcactgtgctctttgttcagcttcctttcctctcatgacatatgttaattcaggttccacagtcactgtggtctcaggattggcacaggaagcatttttattagggttcatgctgtattttccatctgcttcatcaaggatccctgtgatgatgctgatgagtctctctgaaattctttctgttctttttctacttcattgcaca

SEQ ID NO: 40021 - DNA, 2300 bp, Homo sapien
gtgatcagtggatgtactggctacttcagttatcctgctacgagattcacacaactttgatctaagtttctttgatttaacactgcaattaagaagatttggttcaaagtaaaagctcattggttgatgttttacactgatgtgataatgtttacacagatgtgtttgaaaccttgattatggtggatttggggtcctaccacaagacagactgctgttatttgaaaggtgaaataatacaacatttacctggtgcaacctttaaaacagacttagcaatatacgtttctaaagtgatttatctgtttattgtttttagccagcgtttttgttttatttcatatctatcaacagtaaatcacttgctttaagaactcttttataacttggttacacaagggtcagtagttaggcctgtagtgatgaaaatgtgtaactatacccactttagagcacctgccaattaattagaaaaaatccttcagagcaaataaaataaaccagtcaaatccaactgagctgccaggcttatgctttttttaaacagatcatgaaacaagactgagaaagtaatcttcatcagttccctaaaactttttgctcagaggaagcataaatctgcccaatgattctcaattcttctaccactgaaaaattttaacagaaagatcttgaatttaactagtggtgcaaaaccagtttcaacgtttaaatgaacatgtatctaattccttggcttccatggtttttgattttacaaatatgctcaagcactcttcaattttaccagtaacttttgaagtctcaaaacacatcaagcctcaagactatttccatttagttatttttagattttataattaaaatgtaaacaaaaacatctagcttttagaaaaacgcaactaagaaaaacaggaaagtgctcttagattgtataagggcccaagaagccactcatcatttatgacaatattccagatattcattttctattcacggcaaaatatagagatgcaaatcatttctttccagcctatttggatttactgtaaatcctttgattcgtgattatattttgctttattttacactaattagaagttcatgaccttagcacacaattaaaaatacatatgtgtattatgtatatatatatatggcaattttggttatattatgtgctgagtaaaggtaaacattaaagagaaattgtaaagagggggagggagggtgttccttacctaaccttgattatgtaaagaaaatcccccatctaaatgataaaagaaaggagcaatgcttgtacattttattagtgttttaaaattagtgagttaaactgtcaaagctttgatttttctttcatgtgtgtctgggcaggtctgtaagccccaggtaacgccctttttccttctcccttgcttacctttctttgcacctgtccactgcaggctcccaaggagtccaattctccttttctctttcctcctcctaccaatgccctccttctctttctctccctccccgccttccctccctcctcccttcctcttcttctatatccctgccaagttgggctccttttagaggcgatttatcactgcaaagctcacatcaaagacggttgcacggccgcagctgaacagcatcaccgctgtcccaaggacaaccccaaagaggggcctcgactgcacctcctcgaagttgctggctggctttggccaagtgcaggaatggtttttgtgagggcatggatggagaagtgccaagggccccttttggtcacttccgaagagcaaaaacgtgttgagaggagaccggtttaagatttcaaacagaacctccccagcgcgcatgaaaggacttgattagcatatgtcaagaggacccgcttatatactcggtgtgtatgtacacaggactctgatctgatcagtttgcggaattggagccccagccaacagccctagtcctagtattggcagcggcagctatagatatttctgcagagccagcagccggctcccacctacccaaggagagaagatcgctccaagacagtgagagcttccctgccatttcagtgcaaagtccctccggagcgacctcagaggagtaaccgggccttaactttttgcgctcgttttgctataatttttctctatccacctccatcccacccccacaacactctttactgggggggtcttttgtgttccggatctccccctccatggctcccttagccgaagtcgggggctttctgggcggcctggagggcttgggccagcaggtgggtt

SEQ ID NO: 40022 - DNA, 2300 bp, Homo sapien
gactataataagaatttatgagaaaatcaggaaatcatgttcagttcaaagtaaacagtgtcagaactattattataattttttttttttgagacagagtttcgctctgtcacccacgctggagtgcagcggcacagtctcggctcactgaaacctccacctcccgggttcaaacagttctcctgtcccaggctcctgagtagttgggactacaggcgcatgccaccacacctggcttttttttttttaagttttttgtatttttagtagagatggggtttcaccgtgttagccaggatgggctctatctcctgacctcatgatccacccgcctcggcctcccaaagtgctgggattacaagtgtgagccaccacgcccggccaatatgattattatattatatataatatatataattattacccagaagataatttatttggggaaactaccatttcacagaatatagagaaagcataaattgaggaaaatttggtgataaagcaagacgctatcagagtcttccttaggcattgactccataaaacccacaggctgaaactgaagaaaactcagagacaggttttaaaatacacaaaatttgttcatctgctacagaagatttttcttcttaccgcttttagcagctttaagaaagcaaaatgccattaacctctattaaaataagaggtaacagggtgtacctgatgtgctatttacatgcaaggtgttaggaatagaaattgcaggacctccaggagttcgaggccagccaggccaagatggtgagacccccatctctactaaaaacacaaaaattagccaggcacggtggcgggtgcctgtaatcccagctactcgggaggctgaggcaggagaatcgcttgaaccagggagacggacgttgcagtgagccgagaatgtgccactgcactctagcctgggcaacagagcaagactccgtctcaaaaaaagaaaaaaaaaagggaagaaattgtaggacctgagccagaaaaaactcatttggtcgtctctgaaagcctttagtctttacaagaattgccagaatcaactgatggtgtattctcttgtcactgcagcccaattgagaccactgtatttagttgtctgtccccttagatccacaatattttagggactcctggcaccattccatagtaggaagaaaaagctaacataattcaagttaccaaaactggggtctggggagagaaactgataggaacttcatctacactttctcataaaaactgatactgataacatagcaaacaaaaagtacagtaaaaacaaaaagatgacacaatacgcttctcatttattttatatttatacaaacagcgcttccctgaaaaatcagggtatcgttcaagattttatctttattcacagaagttttaaaatttttaacttttatatgcacaagacagttctgatttgttgaattaagtgaccgcgggtgtgctaatgcttctaaaaaacagcattagccttctcccatcaaaagtccggaagctgcccttcagtcgtcaaagtgtttgccttaatttgcaatcgttatgacttgagccaaatgcttatacctcatttgtgtcgtatatgtgaagatacaattgcaaatcgttcacgaccttgagtcaagaccttgagtttcctgaggtcaggagaccgttagggaatgtgagtgtcccagacgggcgctgagcccagctcggagacccaccccgcccgtagcagcggcgcgggccccagagagccccgcactcggccgcgcctcagttacgctgactcggctgtgcccgcagtgtcgcgctgtcgcgtagccaggtgtcgccgggctggcgcggttatttatgactgcgtggttgggctgggggttcggggccggggagcagccgggatccgccgcctcttccatgatcttcccgggccgaaccacgggaccgctacgctgaaggtggcgtcgcgggtccccggggccgcgcgagtgtaggggtcgctctcggccggccgcgaagctcgcggcaccgacttctcgcgagatttcggcgacccccccccccgcccccgcccctccgttctctgccccctcccagctctggtgtgggcggcctccgctatggctgcgctgcgaaggctcttgtggccgccaccccgggtgtctcctccactctgcgctcaccagcccctccttgggccgtgggggcggcctgcggtgaccaccctgggccttcctggccggcccttctcctcccgagaggatgaggagagggctgtg

SEQ ID NO: 40023 - DNA, 2300 bp, Homo sapien
actgtacctctaaagtaaagacaactcttgacctatcctaaaattaaaccttgacaggaccaagctatcctatcagtaccgcagctacctgccagaacaaaactcaatacctgcacaggaagacagcaaattcctactgtcaacagtgtagtatccataacatccactataaagtaagccaatattaggctaagcaggaaaatgtgacccttaaaaaggggagaaagtcattcatagaaaaaggcccagaggtgacccacatatttgaattagcagataaaaactttaagaactattataaacatgttcaagggtttaagtaaaaataatagcataataggtaaagagatggtaattacagacagaacaatgaaaactataaaaaccaaatgaaaattttagaattgaaaaatacaatacttgaaataaaaattcattctgtgaacctaatagaagattggagacagaagaaatgatcagtaaacttaaaggcagggaaatacaagctatccaaactgatgcacaaaagaaaaaactattgaggaaaagaaaagaatagcacctcagtgaactatggaaccacacaaaacagactactgtaagtgtaattggagatcaagaagaggggaagagggtgggagagtaaaagaaaaattgaaaaagtactaaccaaaattcttcccaaatttgaagaaatgtgtaagagtttcaagaagtttaaccccaaacaaacccacatctgttcatatcctaattaaatggctagaaagcaaaaacaaaaattttttttcagagacaaaagatatatacaagggtaatgataagaatcagtgctgacttatcagtaataatggagaacagaagataattgtataacatctttaaatggtggaaagaaaaaagtgttaaactggaatagtatattcagtaaaatagtcttttaaaataatggttatataaagacaccttccgataaatactgtcggagagaatgtaaccagcagacctgcacactggaagagttaaaagaacttctttaggcaattggggaatgaaactagccaaaaattttgatacatacaaaataaagttcaccacgtaaatgataaatgtttagtaaaatatacaatgttttcccttaagtgtataaaaaggcaattgagactaggcgcggtggctcacacctgtaatcccagcactttgggggactgaggcggtgggtcgcctgagggtaggaattcaaaaccatcctgggcaacatggtaaaaccccatctctacaaaaatacaaaaattagccgggcgtggtggcgcatgcctgtaatcccagctactcaggaggccaaggcagaagaatcacttgactgaggtggaggttgcagtgagccgagatcgcaccattgcactgcagcctgggagcaagactctgtctcaaaaaaaaaaagagaaaaagaaaaaggcaattgactctttaaaatgaaaataatgcattgctgcgtttatcattaaattatttggtaatatcgcaaaggacagaaaggggtaaatagaagtatactgttgtaagattgtattgtaggtgcaatggcatagtattaattcagttaatatagattgcgacccatagaaccgtaagtgagttaaaatgcagtaattttttttaaatggctaacccataacgcaggaaaggaggaaacaaaaaaatgggtacaacaaatagaataaaatagcaaagtgattacataaattcaaccaaattagtaattaatgttaaatgtaagttcactaaacattccaactaaaactcagatgttaatcagtttttaatgaagattatctgctgccttgaaaatatgtattttatatataaagacatggatagagtacatgtaaaatgatagagaaaaaagatcctatgtaaacagtaataagaaactggagtggctgtattaacatcagacaaaatgatgccaagacaaggagtattaccagatgtagtagttggggtccagttaggagacaaaaaccaccatttaaacaaggaaattttaatgtaagaaatgattagaataatggcaaattgactagtgaaagttaagataattttaacaaataaaagactagcaggtatcaggagcaaccgttatggctaagactgagatagagctcccaatatagagctttccccctactagggctgaaatccagatgtctttggaaagggcacacctttgattcactggatagtggagaagtcactaaggtgcctcgtaagtgggagcataagtgggagttgctaga

SEQ ID NO: 40024 - DNA, 2300 bp, Homo sapien
tgaaaatttgagaggtgaatgatgttgctagaccgctgagtgcaaggagcatacaggcagaggcctagcgaggatggagtcatggtcattagggactggatgaacccagcaagggggcttttctcccgttctcagtcactcccctcacccccctccttgcctggctgtccgctcgtctcttctcttccttagcgtcgccttcttcctcctttgctgtggctggctttctttttcataagtggtcatatcagtttaatcacagttatacatgaaacctacaatttcttatgcttattgaacatttaaattaaaattcgtgagttgaatcttctgtatttctaaacagtaagtctctagtgaagtttcttcttgtctatgaccttcaaattattttttctgtttatgtagtcctaaagaaaaagaaaataaatcaaaggctctctatacctcaaaataaaagctctccttccactctcatcaaagactagtatctagagattggctactcaccaaagagcttacatttgtgcgtgctgcttatgcctaattagagactacgcagagatcaatcctgttatcttgtggctgtggagatgcttcttcctaatccagactttttctgtatttaagataagagaacttgaaaaacccagtaatagtagtatccttaaaatggcaataacaaaaaaaagttgaaaatatttcacaaatatttattataaataggaacaattaaacaacatcttagatgagtaataaaaatgtagctccttcaaagatatgacacctgcatacttttccaaaagggtagatgatgtgaaaactgggcagaatgctattccatttccgatttcaagaccctgtaggactgtgagaggaggaagagcacagggcatcgtcgcatccaggatctacagaggcactatttgcactttctccaccgtttccagtatggaaaatccgattccttccttttcataccttgatggtctctattgaccttcagtcactgatttgcttctctttgtgagggtatttcagtcccaggaggaagttttaattcctgttttttactctcttctgattgggggggaacacaggattaatattcatggaaaacattaaggaatccagagaagttttatttttacattaatatacagaatatccacagagaatataaaaggctacagcaaaatcaagtgattcactgggacataatatgtctctcttttcaattatttaaagtcccacagaaacttgactgacattttctatgcatttttgaagagaaatggaaagagatgtggggtggggggctgtaacatagtagctatttcgggagagattagcttgttgtgtaatccagtcacagaaagataatcgcagacaccagagctaaatttctttgactgaattcatgtaaatcagtattttttttttacttctacacatgaataagaagtaatttcattcactgtggttgctgtgtggtgtaaatacacatattcactaatgttaagaaaaattgtgcctattatgtatagtagtgatgcacataatttacacacactcattgattgaaatgtttccctgtggatcaggtgcgttcataatcagatgaaggaaaagcaaaggaggcatttgtttattttccatttcgtgaatcataaaatcagaggtttgggctgactacctttaggttcccttacggtgttttttgggaaccgctttggagtcagctatctgctaagtttggaattgccaccacgaaagtaaacaccgtagtgaggagcgggttgaggaaaagaataaatagttggtggaaggaaccaccgtacttgagggaggggacagtgggaacggcccctgtcacaatcatttatccaaagcatcaacattctcagagcaaagaacttgtgtttctaactccagaggtgcctggattcacagccaaaaatgcttcttcctcgctctccacagcccctcccatgccagacgccggctcggcaccccctcttcgctgtgcatttctgcttcccccgaaagcccgagtagtaaagggaggctccttgcggcccccgcgggctcccagggacccgcaagttgaagcgcgagggttccacgcgggctgcggggacgcgggcctcggtgctgcagactttctcagggcgcctgggtcgcggcaggcgcggagtcccgagcgcagcagctgctccgccggcctcgcctccgacccccgccctgcgccaagcgcggaagcgctcgcgacctaactgccccgggtgccgggcgcctag

SEQ ID NO: 40025 - DNA, 2300 bp, Homo sapien
ttatccattaatgggggtttgagttgtttctacctttttggctattctgaataatgctgctgtgaacagtatacagaaatacctgtttgagtccctgctttaaattcttttggtagatacctaagagtggaattggtcagtcatatggtaattctgtgtttaattttttgaggacaccatacggtttttctggagcaggtgatttttgatgcaggtgtcacccagagaagcctgtatatgcccttgtaaacatgtccaaatttgaaggtctctagaggtatccatgagatgtatcagtgtcactgcagcaattttttttttttttttttttaccatcttgccatttcatggttcagcagaaaagctgatgggcaggggattgtgaagaatcccatgttgcccatatggtggccttcattactgggtagtgtgttccttatgagagtgctggtcatcgggcatgcccagggcagaaaactcgagggcctctagcttactgcatataggcaggaattcaacaacagtttttgagtagccagagtccagagcacagaaatgacagatggaaattaaatcttgaaagaacatattagcagatggaaatggtacgcaaactgataaagaggagtgggtgggaaggaggggaagtatgccgtgaatgcatcgtgaatacatgtgagtgcatggtgtcaatcatgaactcgattctgatccgcagcacagggactgaacatgatttataaatgaagagcaaggtttctgttttgcccaaagatccagagtaagtgaaatgattttagtaagagaaagcataaatccatacataaaatgaggggagagatacaggcgggaaacctgagatgcagtttacacatggagcagaggaagagactcattccaaatattgatgactggattcttcaattccttgcataatttttttttagaacttctcacttacattaatgaatacatctagtatataaacaggtggtacttgtataatattacactattacaatatgttgtgtctttaggcagtagtcatggaaatctttcaactgtgggtggccagataatgacaatgtcagatttattttggttgtgactgaatacacatactgtttcagcaattgctgtcagagagattgggctagtgctgtaggtgaatgcagtgttgggcgagagtatgatttgctgcaagtaagaagagaaaggcattgtataattccagctgggatcaagaaagattgtgtatgtttactttatgaatatatgacagtgaagttacagaagaaaatagtgcttctcagtgacccaatactgaagggtgagctagtgaatagctggatactctcgaatgttttaatagatattgtgacccagtgctatcgtgcagcaattactgctggtgctagtgttggtttaaatatttgatttcatctcttccggtgtgccactgtaaattttattccaatgagctcataaacacaaatgtaggaattacatccttatatagtttctttctctggagagttgtaaagtactcataagtgtcaaataattttatgaacctagaaataattggattaatttttaaatgtgttacgtgtgcctgtactctggtcatatagtactcaacatatagctgctaaccctgctagatggttttagaacgttgcctgtttccttggagatgcagaaaagatgcattggtttttctccttaataaatcaaacagctaataacgtttggtcatgaaaaataaggaactctcagcattgtcctttatgataattctgagtataccagataataagaaactgatgtaaggacattaaaaaatactctacaaaaattgtttcaacttgattgtatatattttttaaatgatgaaataaccaatatacatgtgggacgttttgcatgctaccaataaataaatacatccacacatatataagaaagttgagtgttacattgggcaaaataatcattgaggcacttccaattctaaaattttggttctgactaataaggggagtatttcaggacataaatccctagttgacattcccctgggtggtaaatagccattatgtggaaagcaggcagatcgttgttgagggtgtagtatccaccatagacttacatggttctactgagtcagtcatggcctctgtggtctttcctcaagaagggaatctggaattggaaaggaggggggtggggctgaaacaattcagtggttgtaggaacttggagttgagttgtagccatgtgtagaaaaggaaacaccc

SEQ ID NO: 40026 - DNA, 2300 bp, Homo sapien
agtaagatgtaattgtaacccccacatcgatactgacagctttcgtcatctgcagacatgtgcagagtggcaaaaacattgagttgcccccatgcccattcccagttgaggttgaacaagacgatgcttttgccttcttgcttcagctctcatactataaacaagtgtgctttccacagtctatttagtgccatgcttttttccatttttgtgctttttgttggtgattttgctgtcaaaaaatcttaaagtgtagtgctgaagtgtggtctaatgtttctaaacaaaagagaaccgatgtgtgttatggagaaaataggtgtattagataagcttgattcaggcatgagttatagtactgttagctatgagttctatattaataaatcaataatgtatattaaataaggtgcgtttaagtagaaacacacataaaacaaggttacacactgatcagttgtcaaagatgttgtgaccagaggttcatagaaacctaaccctgtatcttccctaggagcagtttttcagtgttcacaagttcagtgtttgtggaaagtttataaaaaataagtactgcaaataacgagaattgatgactatataagatttttttcaggatttaaaaatagaagtattttctttatgtgtaagaagattattttttaaactatcatgcctataatgtccttatgcctataatatcctgaatttttattcggtatttcttgattatgctttatacactatatattttaaatgtaggcaaaaagaaattaaaattgaggatttaagatatccacaggtcctccttgtgaacaccaaatgacagtaaaaaagcaatttatctgctgccaggattgatgtattattttcattaaattatctttattatggtaagaatttctaaattgctagatcacttatgtgagatttgaaccaaatttaataccaaagagttattgaatgcctactgtgtgccaattctattgctaagcatagaaagacatgagtgaagagacctgctgctaacattcaaggattctttcagtgtccagcttgaaaaatgaaccgtaatgaatgtctgggagagcattacctcactgctcctccttcctgtggatgattttagtttcaaaccacaaacatatatgaaaaggaatgaccagaattttcgctgtcaaaaaaacctgctgctgttgaaaactgtcagtgaggtcttgtgaccggtgtcatttggtcagggacgacagggtattggaatctcaggaccatttatcagaagagacacctcgtggcagccatggtgcttcgataggtgtccatagccccaagccctccattctagagccattccaggtctctttggatttataaacaatgagagaatgagagtctaactggttttctttgagatggactgtttcagcccatggatattaacatttattttagacaggtgttatgcactggtgttgatcttttctgtggtgctattatttaagatagcttgaagcattattgtgaatgtgttgttatatgtattcatttagttgatgctgttgtttgtagtaacataaaacatcaataaggatagtagccaaattgtgccagttagccttcattttctggcattataatgaaactatttaaacgtttgtgattctgtagtatgttaacaaaacatactccgttaataaatttaaaactacattttatagttccatttatcttgcttcgtattacagtttatacatatactaccataaattttctatgatttggttatgaaaaacacagtttatattccaaattttaatatcattttcatatatattcatattctcgtaaacttttaacctgatgaaatatatgcatatttttcctaaagttttaacataaagccacatttttttatattaaatttaagaaaaattttaagcaaaaaaaaaaatcttactaatttacttataaaagtaggggaatacatatccctttgacaaaacatgttattttcttcctttctttatagaatggcctacctgatactcaagccaagttccatattatgtttttattctttgctgcagctatgttttctgtcagcttgtcttctctgtttggctatcattgttggctagtcagcaaaaataaatctacattaggtgagtatccaattattgtagttgacagaactttaaatacgtataccaacattcattgacagttgctatgtgattaaatgccaacttgccctgaagtggtgggaaaagtcattcttattttcctcattgtttttttga

SEQ ID NO: 40027 - DNA, 2300 bp, Homo sapien
gtatttacttggttttgacccacagaatatagcacgttgtgcaaactgtcgattcagcgaaacttaaaaaagacaagaaactactgaggagcttagtaactgctgtttctgtacgtagtgtttaatcttccaagcacatctagtgtctgtcagtttctaattggcatgtgtaggctgctctgtgactgaagaattttcaaaccagctttacacccttcaggaaaaatcccttgtgattggatgtttactatctgccaggaaactggtactcaagatgttgaagctacagttattttatgatagcacacttcccttgatctgcttatttttattccatcaccatttaccctttttttttttttaaattttgtagccattcttatgatgctcttgatttgttggttacacaaatcaattttattaaaaatccaaagataagtctttaggtatattttgtaccaaattaaattagaagacaaaaattgtgctttcatagttgctacaaaggtaaataatggagagatttggtacaaaacaacaaaatatatatatattctcatatatatatatatagctgataaaattacctgaggagtgtaatgcttatttttttgtgtatatctttgcaatctattttatatatattgacaaaagagactgtgaaatacttagccatgcagaatatgtgaccagaccagagcatgtgtaggaagactttacggtaatcattaactctaccccgaaatgatggactacaagttataatgtgtgttacctacacttcaatcagtaatattagcaaatctccaaatgttagtcacattggtttgtctcccttgtacattctttattcatgatattacagtgctgtaactgggtggtcctttttaaacaaaacattatttgcaaaacagagggtattatttgtttttaaagcttttgtaaataaaggcttcaaaatgttttcttataaatgttgatgactggtgattttcttttggaaatacttatttgggggatattgttcatttttatttgggcaactcaacagaattcagtaacttccttcattaaccctagatgattattagtccattaattgaaaaatcagtctgagttttctgcatttcaagtgttggcttattcttgttctttatgagtacctcaactagctaattaaggactgacttctgtttctcctttccaggaatgcatttattccgaaggatatacttcacaaagtaaatacatttggtataactgtggctttttaaaaaatctaacacaatgtagtaagtttctaactggcttcttttgtcttcgttaaaaaggaagtgaagcttcttttcgcttgtgatttgttagctgagaaaactaatatttaaattctgttcaactatttgagaaatcaatgctggatttcaaataggaatgataaagattgcctttttattagccacatagttgctcaatctcataacttgtatcatttctggcttctgtccctaaaaagtatagataatccctaacttactttcgacttaatgatttttcaactttacagtgggtgtattgagaggtaaccccatcaaaagtttaggagcgccttaggaccaaagatggggttatagtttctactgaatgtgtattgcttttgcaccattgcaaagtcaaaatttataacttgaaccatcgtaaattgggggactgtatgctgttgcctgcattaaatgcatcttagtattttttcagatgtaacctcattgtaggttgagcaaccgtatagtgtaacttttgtagaggaacattttgacttttactgggtctaagttttacttttttattttgttccagacagtctcaatgtttgtaaagtctaggttccagatgtaagatatttggctgatattttagtgttactgagccattaattaattacaggctcatatattctgttaaatctactagagcaagggttgtcaaactatggcccgtagccagaatcagcttgctgcctgtttttgtgtggcccatgaactgaaaatggcttttaaatggttgggaaaaataatcaaaagattatttcctgacatctgaaaattacatgaaattcaaattttagtgtctataagtttttattggaatgcagccacactaatttacatattatctatggatacttttttgctataatgggaaagttgagtagctgctacagaacctgtgtatgtgtgtcttgtttcacattgccgcttggcaagctacagaatcatggtgatgcagatattacctgaaagcat

SEQ ID NO: 40028 - DNA, 2300 bp, Homo sapien
gggtgggacgtccgtggcccaagcgctggggaccgcgtcttctctaagcctgtcctgcctgcgctccccgagttctgggggacatgctacgaacggcgggcggctggagagggaaacttgcggcccggaacaggaggtcccaccttcacggcccagacgcccaaaccggccagccagggagcctggccgcccagcgctccaccacccgcgccgccgtcacttgcgtgccccgcccccgggggcgctctccgccccctctgcgtgtcgcgtcatcatctagcgcccccgtcaggacgtgcgaaaagcgacggcgcagcacggtgcggcgcagctcctgctcgcctttcccttcgctgggcgagaggtgtctatggggcacccgctgccgccgccgctaccgccaccgccaccgccaccgccgccgagtgctgtctctatggcgaggaggaggaggaggagcgcgagctcagcgacacaagtagatcttgcatccgctgcagccttacggggggaggggcgggttagggaagtagaaagggggcggggacgatgaacctgagagggtgcgcgatggcgccagctggagtgcggctggcggaggaaggagcctggcggcgggttgggggctgggtaactggggctgggggtttgtcaaggggttggcgcgtagtgatgacgcaaaggctttgtacctggggcttcgcagtgggacggaaattgggagtggagggcggtggcctagatcctcacctcttcgtattgtttcacgcggcagtgcttgggagtcagtgtagctccagtcagtgttatcagcaccttcgcactggcgctttgccagggaagagagttatctatggcttgaatacctcggtgccgtcctctcgtttctctgggaaactgcagtacggagatgctttctccagtaatgagaaggcctttggtgtctcttcggggcttctgggactgcagtagagagagaggtggaggaaaacaatgttagactacagggtctttccaagtctttgtgtttttgtgcttatgtgtgtgtgtgtgcctatcggggtgggagagttataaaggaggggtgtcctggatctcctttagtttctctacttggagaattggaagttacatttgtgactcttcagagtttagaagacagtcataagaccctctttttactcttgttttttttttttccaatttgtatgaaaaatgcagaaggatttgaaatttccctgcccaagaatcaacaggaactctgtttatagaccagaaatgtgacatctatctttggtaaccatgcaatatgctctaagttttagacgttctattgtgttctttttccgttctgcaactgcgaacattcagataattttcatggccgttacttttttctcagagcatttacaaacatttttgacccctctagtctagttagaataaacgccggtaaagtagatcttgttatcaagtcggattttggttgttttattaatgaggaataaaaataaacaccatctttgccatggtaacatctgatcttgtcacatgtaaataagtaatttttcattttttgtctggaaatggatggctttataaagttttatgcagagtagttgaactcagataaataattagtggaaagttataaaatatgattagtatgtatgtgtaaaaaagctattttaaaataactgaaattaggaccaggaaatctgtactgtagtcctttttttcctatagactagctgtgtgaccttaagttactttctaaactttgattttttttttttatgagtcaagaactttgaataaataacttcttaggttcctgctggatcaattattctgtgattcagatttgatatatctggtcttcatattgtttttttattttgacaggtacataaataaaggataaaatattttatgaaacaaatcttcaatcaagtataacattttgatgcttggcatctagactcccttgtgccctcactatgccagcggcaactgtagatcatagccaaagaatttgtgaagtttgggcttgcaacttggatgaagagatgaagaaaattcgtcaagttatccgaaaatataattacgttgctatggtatgcccacaagcagatctttaaaacgcttcatataaaggaggaaaaggaaattttaaagtcttgaattcaacccttttggttgatatttttagggattaatttcaccatgaaaagtaaaatttgtcactgccctccagccaaaatccatcaggaatacacctgtgatttgacaggttgggt

SEQ ID NO: 40029 - DNA, 2300 bp, Homo sapien
caggtgtattcctgatggattttggctggagggcagtgacaaattttacttttcatggtgaaattaatccctaaaaatatcaaccaaaagggttgaattcaagactttaaaatttccttttcctcctttatatgaagcgttttaaagatctgcttgtgggcataccatagcaacgtaattatattttcggataacttgacgaattttcttcatctcttcatccaagttgcaagcccaaacttcacaaattctttggctatgatctacagttgccgctggcatagtgagggcacaagggagtctagatgccaagcatcaaaatgttatacttgattgaagatttgtttcataaaatattttatcctttatttatgtacctgtcaaaataaaaaaacaatatgaagaccagatatatcaaatctgaatcacagaataattgatccagcaggaacctaagaagttatttattcaaagttcttgactcataaaaaaaaaaaatcaaagtttagaaagtaacttaaggtcacacagctagtctataggaaaaaaaggactacagtacagatttcctggtcctaatttcagttattttaaaatagcttttttacacatacatactaatcatattttataactttccactaattatttatctgagttcaactactctgcataaaactttataaagccatccatttccagacaaaaaatgaaaaattacttatttacatgtgacaagatcagatgttaccatggcaaagatggtgtttatttttattcctcattaataaaacaaccaaaatccgacttgataacaagatctactttaccggcgtttattctaactagactagaggggtcaaaaatgtttgtaaatgctctgagaaaaaagtaacggccatgaaaattatctgaatgttcgcagttgcagaacggaaaaagaacacaatagaacgtctaaaacttagagcatattgcatggttaccaaagatagatgtcacatttctggtctataaacagagttcctgttgattcttgggcagggaaatttcaaatccttctgcatttttcatacaaattggaaaaaaaaaaaacaagagtaaaaagagggtcttatgactgtcttctaaactctgaagagtcacaaatgtaacttccaattctccaagtagagaaactaaaggagatccaggacacccctcctttataactctcccaccccgataggcacacacacacacataagcacaaaaacacaaagacttggaaagaccctgtagtctaacattgttttcctccacctctctctctactgcagtcccagaagccccgaagagacaccaaaggccttctcattactggagaaagcatctccgtactgcagtttcccagagaaacgagaggacggcaccgaggtattcaagccatagataactctcttccctggcaaagcgccagtgcgaaggtgctgataacactgactggagctacactgactcccaagcactgccgcgtgaaacaatacgaagaggtgaggatctaggccaccgccctccactcccaatttccgtcccactgcgaagccccaggtacaaagcctttgcgtcatcactacgcgccaaccccttgacaaacccccagccccagttacccagcccccaacccgccgccaggctccttcctccgccagccgcactccagctggcgccatcgcgcaccctctcaggttcatcgtccccgccccctttctacttccctaacccgcccctccccccgtaaggctgcagcggatgcaagatctacttgtgtcgctgagctcgcgctcctcctcctcctcctcgccatagagacagcactcggcggcggtggcggtggcggtggcggtagcggcggcggcagcgggtgccccatagacacctctcgcccagcgaagggaaaggcgagcaggagctgcgccgcaccgtgctgcgccgtcgcttttcgcacgtcctgacgggggcgctagatgatgacgcgacacgcagagggggcggagagcgcccccgggggcggggcacgcaagtgacggcggcgcgggtggtggagcgctgggcggccaggctccctggctggccggtttgggcgtctgggccgtgaaggtgggacctcctgttccgggccgcaagtttccctctccagccgcccgccgttcgtagcatgtcccccagaactcggggagcgcaggcaggacaggcttagagaagacgcggtccccagcgcttgggccacggacgtcccaccccgctcctctgtcgctgga

SEQ ID NO: 40030 - DNA, 2300 bp, Homo sapien
ttttctattaactagactatttaattaaaaattattccattttaaataagaattattcgatattatctgaggatacatattttttaactgtatgaaaataatatttttaaaagggctaggagcccggcgaggtggcttattcctgtaatcccagcactttgggaggccgaagcgggtggataatctaaggtcaggagttcgagaccagcctgaccaatgtggtgaaaccccgtctctactaaaaatacaaaatattagccgcgcatggtggcgcgcacctgtaatcccagctactcggaggggtgtggggagctgagggaggatgattgcttgaatccgggagacggaggttgcagtgaaccgagatcgcgccactgcgctccagcctgggcaacaggagagccgtacccccggcaaaaaaaaaaaaaaaaaaaggggttagggacttaacaatgttgtcatctttatttaaaatagtgtgaaactgttaagtaaatatacttgcaaaatgcataaaatataaagaagcagttctaatttttgaaaaccattagagaccatagacatttgcaatgtaaaaggctgcagcaaaccaatttacagtaaaagttgaaataatatgaattgtaaaaatatttctaaactgaccatgataaaatgaaaaactcacaggaagacaacagaacaatcaagatgaacataaagtaattcttgagcgtggggacaagactatgaaagaagtgagaaatgtacatgcactggtcgctgtgagatggggagagactgctccaacagggtaaatcttagagactcaagaagactgactacgtgataagtgactctcagacgagaagcattcactgatgaaaactctggcttccctttcctttgatgttgcaacagttctattttccattctttgtgaaacctggagattactcttcacaattgtattttaacaattctgctgacgcggcaatcaggtgggcaaagggaaagatcagtggcgaagcctgggcagcaagggatactggaaatagactatgagagagattgagagattacagtcagcagctatgtgtcaggagggatgaggaaatccgagttagaagcgctgagcagtggtgcggcaggaggcagggagggtccggaggaaaacagtaaaagggggcaggagtggcagagcaagcgtgtgacccacaaccaagggaggtaaaccacatgaggagctggtggggagcagactgaggcgctgtgagggtggttaggacaagcccgccctcccaccctactttttcctccggtggagaggcagcgaccagtcacctggagtgtgagttccggagggactcgatcaggcgctgcttctgctgctggaggctggtgaggccaccgggggacccagccgcggaggaggaggcgctcttggtcaggggaaaaagccagctcatcctcctcgggtccacgggccggaggccctggaaggctctggcctgcttctcccagtggctcggcccggcggttctccagcgacagaggagcggggtgggacgtccgtggcccaagcgctggggaccgcgtcttctctaagcctgtcctgcctgcgctccccgagttctgggggacatgctacgaacggcgggcggctggagagggaaacttgcggcccggaacaggaggtcccaccttcacggcccagacgcccaaaccggccagccagggagcctggccgcccagcgctccaccacccgcgccgccgtcacttgcgtgccccgcccccgggggcgctctccgccccctctgcgtgtcgcgtcatcatctagcgcccccgtcaggacgtgcgaaaagcgacggcgcagcacggtgcggcgcagctcctgctcgcctttcccttcgctgggcgagaggtgtctatggggcacccgctgccgccgccgctaccgccaccgccaccgccaccgccgccgagtgctgtctctatggcgaggaggaggaggaggagcgcgagctcagcgacacaagtagatcttgcatccgctgcagccttacggggggaggggcgggttagggaagtagaaagggggcggggacgatgaacctgagagggtgcgcgatggcgccagctggagtgcggctggcggaggaaggagcctggcggcgggttgggggctgggtaactggggctgggggtttgtcaaggggttggcgcgtagtgatgacgcaaaggctttgtacctggggcttcgcagtgggacggaaattgggagtggagggcggtggcctagatcctcacctcttcg

SEQ ID NO: 40031 - DNA, 2300 bp, Homo sapien
aaacgagtccccttattttataagcataccttgtgagagtagctcttaaaggtcagtacagaacatgatttggagtaagagtgacttgtaagaactttgcgaacttaattttccagaatgaaagccaccaataacagcctgccattcttttctgttaaacagcataaaatttcaccttttgaaagttctgaacaaacagaacaattgagacaacgaaccaagaaacacctaaagttcagtcagcatcaggccttattttagccaaactgattttgcagtaaatttttctattaactagactatttaattaaaaattattccattttaaataagaattattcgatattatctgaggatacatattttttaactgtatgaaaataatatttttaaaagggctaggagcccggcgaggtggcttattcctgtaatcccagcactttgggaggccgaagcgggtggataatctaaggtcaggagttcgagaccagcctgaccaatgtggtgaaaccccgtctctactaaaaatacaaaatattagccgcgcatggtggcgcgcacctgtaatcccagctactcggaggggtgtggggagctgagggaggatgattgcttgaatccgggagacggaggttgcagtgaaccgagatcgcgccactgcgctccagcctgggcaacaggagagccgtacccccggcaaaaaaaaaaaaaaaaaaaggggttagggacttaacaatgttgtcatctttatttaaaatagtgtgaaactgttaagtaaatatacttgcaaaatgcataaaatataaagaagcagttctaatttttgaaaaccattagagaccatagacatttgcaatgtaaaaggctgcagcaaaccaatttacagtaaaagttgaaataatatgaattgtaaaaatatttctaaactgaccatgataaaatgaaaaactcacaggaagacaacagaacaatcaagatgaacataaagtaattcttgagcgtggggacaagactatgaaagaagtgagaaatgtacatgcactggtcgctgtgagatggggagagactgctccaacagggtaaatcttagagactcaagaagactgactacgtgataagtgactctcagacgagaagcattcactgatgaaaactctggcttccctttcctttgatgttgcaacagttctattttccattctttgtgaaacctggagattactcttcacaattgtattttaacaattctgctgacgcggcaatcaggtgggcaaagggaaagatcagtggcgaagcctgggcagcaagggatactggaaatagactatgagagagattgagagattacagtcagcagctatgtgtcaggagggatgaggaaatccgagttagaagcgctgagcagtggtgcggcaggaggcagggagggtccggaggaaaacagtaaaagggggcaggagtggcagagcaagcgtgtgacccacaaccaagggaggtaaaccacatgaggagctggtggggagcagactgaggcgctgtgagggtggttaggacaagcccgccctcccaccctactttttcctccggtggagaggcagcgaccagtcacctggagtgtgagttccggagggactcgatcaggcgctgcttctgctgctggaggctggtgaggccaccgggggacccagccgcggaggaggaggcgctcttggtcaggggaaaaagccagctcatcctcctcgggtccacgggccggaggccctggaaggctctggcctgcttctcccagtggctcggcccggcggttctccagcgacagaggagcggggtgggacgtccgtggcccaagcgctggggaccgcgtcttctctaagcctgtcctgcctgcgctccccgagttctgggggacatgctacgaacggcgggcggctggagagggaaacttgcggcccggaacaggaggtcccaccttcacggcccagacgcccaaaccggccagccagggagcctggccgcccagcgctccaccacccgcgccgccgtcacttgcgtgccccgcccccgggggcgctctccgccccctctgcgtgtcgcgtcatcatctagcgcccccgtcaggacgtgcgaaaagcgacggcgcagcacggtgcggcgcagctcctgctcgcctttcccttcgctgggcgagaggtgtctatggggcacccgctgccgccgccgctaccgccaccgccaccgccaccgccgccgagtgctgtctctatggcgaggaggaggaggaggagcgcgagctcagcgac

SEQ ID NO: 40032 - DNA, 2300 bp, Homo sapien
ttccttcagataaattttaagataaagatgagccatcgtttgaaatgaacaagctgattagaaaacttaattttttctaggggtcatatattcacctggctcaaaattcaaaaagtataaaggagtatagagtgaaaatctccgtgtcacttttttcccttgcagcttaattttttttcctcattagcatctaaagttatttgtttgggtttgtgtatatataattcctgagctgttttattcatctacaagaaaatatatatagtattgtattttcccccttttttatatgaatggtagcatattttgcccttcctttttttttttttttttttttttttggtggagggggtcactaaatgatatggttttggaaagtttttcatgttagtactaaggcacttcctcattattccttatagccacaaagtatttgttttatgggtgtattataatgtctttagcaagcctgacagatattttcatgttttctaaccctccctcaaaagcccatcctacttcattgccgtcagtgctgctccagtaaataatctttaaaataatattttacccaaatgtgagcttatttgttggataaattctagaagtgtaatgcacatttgtagttttgacaaatgctgcaaaattgccctccagagtagttgtaccagtttctgttcctatacaatccctattttccccaggctggagtgcagtggcgcaatctcggctcactgcaagctcggcctcccgggttcatgccatcctcctgcctcagcctcccgagtagctgggactacaggcgcccaccactacgcccagctaattttttgtatttttagtagagacggggtttcaccgtgttagccaggatggtctcgatcccctgacctcatgatccacctgcctcagcctcccaaagtgctaggattacaggcgtgtattagggttttataatttgttttgctttatcaaaggactaatatttctgtaccttcctttttcaggctttttttctttctactgtggcttatttttccatatacattttagtgtcattcgtatacatttaaaaaaaatgttttcttcccacaaaatttccaactcaggttatgtcattaaatgaaataatagtactctcataaaaaattaatacattttgaaacatttttcaatgtaaagggaagcattttagtagcattacattaatatttaaaacataactgtaagtcccttatcctttacactagagtgcctgatccatataaactcactgtattattcatatattgtatttagatgattctcagtctgcatctaggtctgaattactctaatgctttttagagtaatataatgatctggttctctctaaaatttgctaaggggaaaaaatgttaaatgtaaaatatttgttatcttgcaaaaataaatactgactatattgttctgtgattgaatccaaagtacataatgctgtgtgactctaatatacatgcgtgtttatatatgcatctgtttttaatatttcaacattttagaagctcatctgcatacttaattttacttcgaaattttctagaaaagcagtcttgactttcagtcagattttgacaaatacagagaaagctgttagcctctacttgaataaatgtcctggattaaatattgctctgcattccctctatggagatactgattgatagcagtggagtgctgaaaactcaaaaatggcctgtctatccacttctactccgtccagttgaattgcatgctttctaaagcacccatcatcttctttgtagaaaccacaattctacaattcttttttttcgggggggtggggtcatattttaccactttatataatatttaattccattatataatttaataaatatcacctgccattataacatttcatctatatagtacttgacctttgttatttagaacaatttagaaacaatttgacatgttttatccataaaatctaatgtaatgatcttctctttttcttttcagtctatacagtaacccaagtgggatgtctccttatgcttctcagggttttccatttcttcctccatatcctccacaagaagcaaacaggagtatcacttctttatctgttgctgacactgtttcttcttcaacaacaagtcataccacagccaagcctgccgctccttcatttggtgtcctttcaaatctgccattacccattcccacagtggatgcttcaataccggttggtatcgtcagttatctatattttgtgccactgaaacattcattca

SEQ ID NO: 40033 - DNA, 2300 bp, Homo sapien
caagaccaatgtcttgaagagtttcccctatgttttattccagcagtttcacagttttgggaggaggctattttaaagccttgactgttcacagagtaaacactcttttcatgctgccctagaatttcccttttggctgctagaaaaagggcagagctgactgcaatccactgagtgcttttcctccacatctttgttatagggcaaggccaacagagacattgatacattgcatcattgagttcataaaaatcctgaagagaggccgcttttactttttgccaggcagaaccccaaatgcagctctgaccctatcatactgagtgactccagatgaggctgagtttattcagagatgtgttccctcctccacttataatatggtccatttgggtttaattacgctgaataggatcgtattgagtttgtaataattagcaataccatccctaaggaaacagggtttggtctcactgccaaatcagaagtttgccttgcctcaagagaaatataagtattctggaaaaagtcttgcaagtgtttttgataagaattcaaatctcctcaggccattgaatatcacaggattttgggaaaatgcccagttaaaatcaaggttgtattttaaaattctgttagcaaaagtatttgcaactgaattatctatgtgataaaagttgcataagaagaattctctagaagacgtttggtaacttgcaatcaagtagtttaggtcttgcttatggttaggtgtccctagagatctttaaaggcattaccaactccctctttaaaaaaatcacaaacacaaaggtagagacagtgcattattttgactctcaaattccctttccacttcaacatagtataggctaggctcaattcagcgttaaagttcagtggctttatgtgacaacaacaacgaaagtgttcttttcacttccaaaagaatcagctgtggctttccagagtagttcttctaataatgtaaactaatggtaaacttgttctaattgcctcccaaagcagtaggaggatgaaatggtagaagacctgtgaaagagggatctggaattttaaaaataaattcaacaccgtattaattatttgctggaaggctgcaatgtgtccaggtattagataaaaaaacggtaagcagagtctctacggaaaaaaaaaaaaaatcacaatccagcctgaaagatgagtaagagcgaggaaaaaattgaacagaactatgtagaattctataaaatttcacttatggtggagcattgtactcttagggctgcaagaaaaaaaaaatggagggcgttcttcctctctttggcttttcccaagaggcctaacgctaacaatggcaccaactactgttaataccatcaatagggaaatggtaccgcataatggatgctttgtatctctatctctcagttcagttggagctaaataaagagggcaaatgagcacccaacactgtgccaggggaaaagtgtcgcctgcaacagtgaagtcgcaggtggatgtgagatgcctgacttaggagcgcgcttaccaaggcgctaacactgctgctattatttccacccgcaccccgagcgctatgccggccgcgcctgggatgaaacacacacattgagcctacaagaccgtcctgggtctagagtgtctgtggcagccttcttttctgccccaccctgaaatcctagctatcccaggacgccctagaaggaagcccagggacggtgtggagcagcctgtactccccatctctcttccaggaggccacacccaaaacaaggccctctttgtgtctcggagaacagtggccgtatagtgctccgccggctgcccctgttaagagagagcgagcagccctcgccccggcaaccccaggcagaggcgcgtcgcggcggcggcgcaggtgggcgcaggcgcggaggtgggctctctagggccgcgcgggagccccgggtccgcacgccgcgcgcggaacacctgggggcggagccaagaccgcgtcccgcccactcccgggcgcgaagccccctccccgcgcccctcccatcgcgccgcagaggcgcgcaggtgcgtgaggccgcgcccgcccgggaccctgcagacgtgggccagccatggagcacatccgtacgcccaaggttggtgacaccagcgcgggcggaggagggacgggaggagatgggggaggaggaggagggatgctgagcgcgcgggaggccgactgctttgaggggcaccggcggagcctggaccgcgggcgagggaggagcaggcattgc

SEQ ID NO: 40034 - DNA, 2300 bp, Homo sapien
cacggaaacctccttttggaaagaagaggaattcccaggaaatgtagcagaaatggctgaaggtagcagattggaagagttgacagtgggagtagagtggggtgaagcaggcccgctcagtaccatcttgaccttcgccattagcttctggtttcaaggaacagagaccactctaaatagctgaagtgcacaggaggtgtgtccaaaccatgtcggggaatcttgcacacccagcgttagaagcgcagcaaggcctggggggacagaaaagctccccaggctcctcttgccctgcctccctgctggggcagctgcctttcacaagactgtcctcctctgaatgaacactgtatggcttcttttatttatttagttattttcagatggagtctcgctctgttgcccaggctggagtgcagtggcacgatctcggctcaccgcaacctctgcctcctgagttcaagcaattctcctgccttagcctcccgagtagctgggattacaggcacgtaacaccatgcctggctaatttttgtatttttagtagagatggggtttcaccacgttggtcaggctggtctcaaaactcctgacctcaagtgctcctcaagcctcccaaagtgctgggattacaggcatgagccaccgtgcccagcccaccctgtgtggcttctactgccagcctgtgggtttctgcaccttgtcaagctggtccccagtgtgtgtgacttcagcctgcactagaccatttgaccgacctaatcattttgttcgtaagagcttcaagaacatctaattgagcattcccagcctttgactgtttaaccctgagtcagatgtctctctggtccagtgatccttggcttcggggtatgaagacagtgctgtggggagggcaggaggcagtggcgggatcccaggtaaggtaaaaaattctggaaggggccattcctcatgtttgcaaaggcacatataaggtgacaggtcctagcagcttggggagagggaacaggttgtacccactggcagtcagagtgacatactagccaaagattgctggagacctacgggcatgggcatctgcctggtgcccaagcctgacacccagctctggttgggaacgcagtgtgctgactgggcagggactccggttaccaaggtgctgagggctttgctttcttcatttcaagttttgcttcttctgttccccaagcctaaacacaaaagttggatgcttcatttaatttttttttctgcatctctttgagctaactaggtatgccttattcccactgtgatgttgccttcactaaagtgaaatggagtcacatgtttggaagcagcagctgtctttacagacttcccagaattctctatcagccctttatttgttgaatgtctttgggaaaaatgcttgcctatgtctggattctatatcagaaaatttgaaatactatgtttttagtctaacttcctggcagtactgatttggtataaaatgggagaaaatatcaatggttttattacagtgcttgtaactttgtagtggcctcagttgtgttttttgtttttacctatgtctacacttgcacgaacttctctggagaaaactctggaggaagaaattattcagaagacttgatttggagaaaagataagttttggacccagtaaaagtgaagtgaatatggaagagtgttctgtgtttttccagaaagattcaggcttaagtactgaatgcaaaggtttgtggtttctgtttttgctaatcaaggctgaacagttaccacatgtgatagtcttttatcctacattatacttttgatgaatttgtaaagaaattaatctctcaaaacttagcaaaaagaataaaagtcaataaatccatggtatcatggctatatctttttcctctttactaaattatttaacccacgttataatttgaaaatttatcttggaactttaacattgtagaaacgttgggtttggacattgcaaaataaaaaagatctagggcaaaaacagtatggtaaagatccctacttatctatacgatttaattacttttttttccatcagtcccaaaacagaaagagcagatgtctcaccacgaaactagcaactggaatgaagatagaaacaagtggttataactcagacaaactaatttgtcgagggtttattggaacacctgccccaccggtttgcgacagcaagtttctcctgtaagatttattgtcagggcctgggatactgatatagaagattaagtttgaaatgtcaacctttacttaggg

SEQ ID NO: 40035 - DNA, 2300 bp, Homo sapien
cagttggtttttatataactttttgcttctcaattctttttaagcagaacacttatcttctagatatatgagaaagggctatttaagggttagccagtggtagaaattgataaacatttgatttatggaagcattgataggttttgacgttgaaaacctgaatatgggcaaaactggagatgtcaacgtctttgcagattttcccataagcatttgtgaagtgccatgctttggcactctgtcaggttggcacagaagatactgaagatgtgtgaaagtttgtttttatcatcaaggaacgtgtcctctattttttatttctccttaggcttttcttcatattctttgacttacctgctttcactattggaagcttgtatttatatttatattgatgtgtggataatgttcctcagttatttcctcatctgttgacttatatgttttggtagacaatcccatgtacagctctttcatttttgatatttcttttgcatataagttgtacatattcattggagacaaattagaaataggtattagcaatgtaacatatgaaatacagagaagaacccaccatctaaatataattactgttgatattttgaatgttttgctttaagtctttttactgtaatatatgcctatgtattttttcttaactaatattcacaccttgttttataacctgattttttttcagtgttagattgtttaggcttgcaggaggtggggagtgtgactttttgtctactttattcattccatttttaaaagaacatagaataatatttggcatggactttggacttatttatctagaaatctcaaatataataagcatgtgtattttagtacaaattcatacttaaagcatagttgaatagcagttttagatttcagcaggccttgagaggtgattttttaaaaattctaaaaagttcacatctgcttcacattcattgtttaaaatgaaaacagagaagctcacacatgcttgataaagctgtagaatacgtaatgattaagtttttatgtgcttttagatgatagctaagtcctgtaaggctagagaccccatctatgtaagagatcattctacacatattcccagcacaattcctggtatttagtaaggcctgaaaaatctgggccaggcatggtggttcatgcgtgtaatcccagcactttgggaggccaaggaggtaggactgcgtgagcccatgaattcaagaccagcatgggcaacatagtgagaccctgtctctacgaaaaataaagaagttacccgagcgtggtggcacatgcctgtggtcccagctactcagtagactaaggcgagaggattgattgagcccaggaagttgaggcttcagtgagctatgatcacgccactgtgctgcagcctgggtgacagagtgagaccctgtctcaaaaaaaaaagaaaaagaacctgagttaaatggatggttgaagtaaagagagacagaacccaaaagatgaggcaattcactcctttccttgtagtgagaatgaaattagccatctcttgaaatatatttctatcaacatatccttaggaaatttttagcttggacatggtggctcacacctgtaaccccgaggttgagctactccggaggctgaggtgggaggattgtttgagcccaggaggttgaggctgcagtgagccaagattgtgccactgccctccagcctgggcgacagagtgagatcctgtttccaaacaaaaacagaaacacaaaattataatatgcaaacaagaatggcaaatctttttaatcacccaaggctgctatattcctttgcttgccacataagccatttattgcagtctcttataaagggacgtgtatgctacaggaaattgaactacaggaaattcgaggctctggttattaaaccttccttctgactgctctgggtcactgcatctcttctaacaagtgaaacacacacacacacacacacacacacaaacacacacacacacatactctaattgtgcctggaagctaggttaccaaagggagggatgacaattccagatcagcttctaacctcctcccttctgctcaggtcgccttcgtcagacgtcagaatgattccttgcagagccgcgctgacctttgcccgatgtctgatccggagaaaaatcgtgaccctggacagtctagaagacaccaaattatgccgctgcttatccaccatggacctcattgccctgggcgttggaagcacccttggggccggggtttatgtcctcgctggggaggtgg

SEQ ID NO: 40036 - DNA, 2300 bp, Homo sapien
tatttattttgagacagtctctctctgtcgcccaggctggagtgcagtggtgccatctcagctcactgcaacctcgcttcccaggctcaaatgactctctcgcctcagccccccaagaagagcctctaagcggcaagagaaagagggacgactctcggctaaatgtagctgagccagggcagtgaagcttgacaataatggcacaagagaggtggacctggcacatgcatagtcagcatggaggggatactgcgaccgagaggaggaatctagacccaaccccaggctccaacatggagtgagagttaagcagtcaattcatggggtcagaatgaaaagaaatctcacggtggggcaacttaggcagatttactctctcctgtgtgcatgctccaagtcctttgctcagaattctccccagaacctgacaccacattgcagtggtctaaatgcttgttcactccttaaaagtagccatgagagatgatgtctcaaccttcatagccgtaatgttaatcacatagcaaactcctgttgaaataatcacctagttccctttcttaataaacaagagatgctaaaacccagaaggttaagtgaattctgagaggcatggagagtttgtgccagtgtcagcatctgaactctggtctttattcccaggcaactgctctctgcatcgcaaggcaagcgagtggcaaagctcgggctagagctggcaacagaatatagaattcttggttcctcctgcagaagtgactgagaagcattagtttgttataaatggcagcacttctttcgttgggtgttgagggacaagtccctttcctgttatttagaattgagctccctttaatagcagtgcctggtgctgaagattacaatgagatgggctgcttctcaccgggggaacacacataggcatctcccccgctagcaaactgctttgatcatgagagtctgcaagctcagaaacgcaggatggctctctgcagagggacttgtgaaagcccgtatcttctgccccactgttacctgatagagttgtccaggttcttggcctgttgaacaaaaaattgaacgaaatgcacggagtaacgaaagaaagaagcaaggaaaaacaaagcaacagaagggaggaaggaaaacgtagatttatagaagacaattcacagagggcgctgcagcaagccacaagagcctgacgctccccagggattttataaagcgaaaagaacttggcaacacccttgggttccctttagaggcctccaactggttacaccttacgaaggactggcctgcgaccagtccgaggctgaagtggaaacttctgccttgttatcagaggagcgaggatgtggcctgtgtgccgcctaatcatgcctagaactgtctgcacctgctgatcttttgcttctgcgaactggctgcacctgctgttctcctgctcataccctagcccgtgcttaccctaattccctgttctcctgcctcaccaccagaggcccgggttgtctgcacagtctcattttccacgttattcctgtaatgaacccgtcctcccacccccaccagcagttacagggctgggtgcggagaccaactctggccagacacagaggagcagcaagaacccggggcaacggtcctgtgagtgagtgcatgtgggggagagaaatggaatgaacagaaataatttaggaagcactttttacagagcactaaggttctgcctgaggaggtggggcgggcgctggtaacatttggacaatcgtggttaaaagtgaccccatcagcacccgctgatccttcttgaacttgataaccttggtgaaaacgccaagcgttggagaaattcaaggaatggctgttgtaatgtacatttcacgcttagcctttcctccccgcgctgggaagaagtgctgcgcaccgcggctccgccagggggcaggagaagtcacattacacagagaactaaaaaaaaaaaaaaaaaaaaaaaaaattccccaactttttcccccaaaccttgttcctcctcaagaaaccgaatcctcccgcttcggcgtcccaggagcccgcccctcgcccgccgcctcccctgcgtccccgccccgcgcagccgccgcgctcctgcgctccgaggtccgaggttcccgagatgaaggtctggctgctgcttggtcttctgctggtgcacgaagcgctggaggatggtgagtgactctgggcgcggggccacctagcttgtgccctgactttagccgggacccgaagcccccgccgccctcctgccagct

SEQ ID NO: 40037 - DNA, 2300 bp, Homo sapien
cttcattaaacatatctgatcagtggaccatatgctgttcttctgtagcataaattttgaatggtttagttgaatttccgaataaagcaaggagtgggtgggcggtggtgggaaatccacactgatggtgtgctctcagaggacgcctcccctgatgtagcatttattttggagagttttgtgtttttgagacaggatcttgttctgccaccaggttagaatgcagtggtgcattcacagttcactgcagccttgacctcctggctcagttgatcctcccgcctcagcctcctgagtagctgggactgtaggcatatgccactatgcctggcaaacttgtaatttttggagagaaatttaaataggctgtgtactccatgccgtgtaggtactggggtgtcacaatagaaaatgatagtattatgtctgccctagaagtatggcccagtcaacgtagccccatcataacaaaaatccaaacactcaggacattgttatccctgttgttttccagagagccgtataatgcactgctttttctttcctgatcagtttgtttggtaggagagaactgttgttccctgttctcccagaaaatgccaataactgactcacagattgcctcatctccagccaagattctgttttgtatgtaagcaaagtttttctcttgatacaataacatgtttgatgcaactcacatttttgcatattaagttactgataaataagtgaaatgtttgctttcagtattaggaccagtcttcgacattaaggtgctcttgtttttcacctctttctttgaaattgctctaagatgatgaacatctgtcgcttgctacttgtctaatgtctcaatctaatcaaagattctttctgttaagaatttgaactatgtggaataagagcagtatcttgctgtgtcctttccagaaaaatcctcagatcatgtatctagaacaggagttagaaagcctgaaagctgtgttagagatcaagaatgagaaactgcatcaacaggacatcaagttaatgaaaatggagaaactggtatgtttccttcagaatgaaagaggatcttacaaatggggtaatatgtgtgaaattgagccctgcattttagaactgtggagttgggttaactgctcctaaagatatttagaaattatacaaaagataaagttcacattttctttccaagtttgttccatatttattcattgctgcctcctagaatgttttctttttcaaggaacatgtaaaacagcacccagtccttggaaaaactacaaacaaatcaggcttatatttcagtggtattttggatcttcacctgcataagaaaaatgtttaaatatctatgtaaaatcagtactttaatataccagccaccctggacaggtttcttagatccaaaacagttggatacgtttaatagaaatgaatagaaatgaatttaatagaaatgaatagcaatactatttatcaaaattcttcatcttgcttcttgtgaattagcatgtgataaaagaatcgtgggctgggcgcagtggctcattcctctaatgccagcagtttagggaggttgagatgggtgggtcacttgaggtcaggagttcgagaccagcctggccaacatggtgaaaccctgtctctactaaaaatataaaacttagccgggtgtggtggtgggtgcctgtaatcccaagtactgggaaggtggaggttccattgaggtgagatggcaccagtgcattccagcctgggcgacatagcaagactccatctcaaaaaaaaaattgtgctataataagattaatccatttggacaagtagcaggtgttaccaaaaatatgaattaacattcactttgcagtgtctagaacagagaacgatgttagtgtgagtggcatgttcagtgttcagcgtcagtcttggcccggccctgaaatacagctgctgccagccaggactctaaccaagttggcagagtttggcaaggcagcttaagtgatccccgccctcgcggtgccttgctgttgactgtccagctgccgcatgctactggcctcttctccccacagtgatgagtgactcaggcttctacaagtgcctcattcaaacccaaaccagccctggacagtaggggacatgggggacctctctgctgcttggtttgtgttggtttggcgtttggttttcttctggagactatgacttctgttgagggagataacggccaagcccctgtgtggatataccagcattttgaattatcaggaaatttttgtaaaggaagg

SEQ ID NO: 40038 - DNA, 2300 bp, Homo sapien
ctctcagtgagaccttctgcaaataatgtcattgggagaccctctagctatttgataacattagatgagcttatattcaaagaaacttcaaagctatttattctagaagattcttaggaagagtcagtgatttcaaaagaaatctagacttacatgcagggatatgcagggtataaactttattgatggctcaggaaacaggtttgaaagagcttccggtacacaaaggggattcttctactgcagccgcttttgaaaagctaaggcagagtcagagtgaggaacacagaagcatccaaccgcttctgtcacgtaagcatgctgaggctgcggaaaaagagtgcgtctgactgtagtccgggagaaagggatgggctggcagaggaggaggagaaaatgcagagggtacaagtcttgtaaatgctctaattttaaaactgacggtaagttatgccatttccctctaacaaaaatgaggtaggattcgctattttcaaggtaaaaaaaaaaaaaaaaatcctgcgtacaagggtaacactgtataaaatgtatgaaatttaaaaattgatacttagtatttgcatgtacttatggggtacgtgtgatgtgttgagacaatcatagactgtgtaatgcccaagtcagggtatttagggtatccgtcatcattatcatttctttgtgtttggaacattttatatcttctcttgtagctattttgaagtacgcaatatattattattaactatagtcaccctactatgttcttgaacactagaacctattccttctgtctaactgtatgtttgtatgcattaaccaacctctcctcatcccaccccaccccacctcccaccatacacacgcatacctctcctagcctcagggaactatctaaagaacctagaattaaagatgtattagtccctgccctgaccctttccagctctggaagctttcctgatctttcctgagtagggcgcttaacccgtggaacacgtttcctctttctgtgtgaagtaaggggtttggattaagtaatccccgaggccccttcctggattctccctaaggattggtccagagcagaaaccaatgccccggaagataagcttgatgaccacaccaccgactcttacctaagacgttgcttcattaaacatatctgatcagtggaccatatgctgttcttctgtagcataaattttgaatggtttagttgaatttccgaataaagcaaggagtgggtgggcggtggtgggaaatccacactgatggtgtgctctcagaggacgcctcccctgatgtagcatttattttggagagttttgtgtttttgagacaggatcttgttctgccaccaggttagaatgcagtggtgcattcacagttcactgcagccttgacctcctggctcagttgatcctcccgcctcagcctcctgagtagctgggactgtaggcatatgccactatgcctggcaaacttgtaatttttggagagaaatttaaataggctgtgtactccatgccgtgtaggtactggggtgtcacaatagaaaatgatagtattatgtctgccctagaagtatggcccagtcaacgtagccccatcataacaaaaatccaaacactcaggacattgttatccctgttgttttccagagagccgtataatgcactgctttttctttcctgatcagtttgtttggtaggagagaactgttgttccctgttctcccagaaaatgccaataactgactcacagattgcctcatctccagccaagattctgttttgtatgtaagcaaagtttttctcttgatacaataacatgtttgatgcaactcacatttttgcatattaagttactgataaataagtgaaatgtttgctttcagtattaggaccagtcttcgacattaaggtgctcttgtttttcacctctttctttgaaattgctctaagatgatgaacatctgtcgcttgctacttgtctaatgtctcaatctaatcaaagattctttctgttaagaatttgaactatgtggaataagagcagtatcttgctgtgtcctttccagaaaaatcctcagatcatgtatctagaacaggagttagaaagcctgaaagctgtgttagagatcaagaatgagaaactgcatcaacaggacatcaagttaatgaaaatggagaaactggtatgtttccttcagaatgaaagaggatcttacaaatggggtaatatgtgtgaaattgagccctgcattttagaactgtggagttgggttaactgctcct

SEQ ID NO: 40039 - DNA, 2300 bp, Homo sapien
atatatgtgtatatatgtattatatatgtatatgtatatgcatgtatatatgcatacatatatgtacatatatacacatgtacacatagatatatacatatatgcatgcatacatatgtatgcatatatacgtgcacatatgtacctatgtatacatatataaatttttttaacctttcattttatattgctttttttttttttttttttgagatagggtcttgctctgttgcccaacagttgcagcctcaatctcctgagctcaagtgatcctcccacctcagcctcctcagtagcagggactacaggcccacaccatcatgcctggataattttttttttttttttttaattttaagagatgggtttccctatgttgtccaggctggtcatgaactcctaggtgcaaatgattctcctgcatcagcttctttttttttttgagacggagtctctctctgtcgcccaggctggagtgcagtggcgggatctcggctcactgcaagctccgcctcccgggttcacgccattctcctgcctcagcctcccaagtagctgggactacaggcgcccgtcactacgcccggctaattttttgtatttttagtagagacggggtttcaccgttttagccgggatggtctcgatctcctgacctcgtgatccgcccgcctcggcctcccaaagtgctgggattacaggcgtgagccaccgcgcccggtctcagcttcttaaaatacttgaattatagcacaaaccaccgtgcctggcctatgtgggtgcttttaagatgtgtttttttttccctaagatatttgtgctctggtgatttgcgtttaatagaggctaatattttatttttattagttttgaaataacaaattataatcaactcaaattaactacaagtttaaggtccacttgtttctttttttttttttttttttttttgagacagaatctcactctgtcgcccaggctggagtgcagtggcgcaatctcggctcactggaagctccgcctcctgggttcacgccattctcctgcctcaacttcccgagtagctgggactacaggcgcccaccaccacacccggctaattttttgtatttttagtagagacagggtttcaccgtggtctcgatctcctgacctcatgatccacctgcctcggcctcccaaagtgctgggattacaggcgtgagccaccgcgcccggccggtccacttgtttcttatccctcgtctttcctgctcttgtgtgagcttctaccacactggctggctgggagagggaggagtcgcttgtcctaagaaatgtctctgcctggccaaggctcttttcttgaccactgcattgactggtcaccacatgagaggggatcttctcttagaaacctgggtcttctgaagtacttctcttactgcttgggagtcagttttttgaatgtggggtgggggggggttttgtttgtttgtttttgagatggagtctcagtctgtcaccccggctatagtgcagtggcgtgatcttggctcactacaacctccgcctcccgggttcaagcaattctcctgcctcaccctcccgagtagctgggattacaggcacctgctaccatgcccggctaatttttgtatttttaagatagacagggttttaccatgttgaccaggccggtcttgaactcctgacctcaggtgattcccccacctcagcctcccaaagtgctgggattacaggtgtgagccactgcgccctgccctcgtgttcctttttacagttcacttccatactgttatatttgaagacatggtcactagagacccaagacatcatgggtgtatgcttcaggtgtcatcacagctgtgtgtgactgtaatgaatataggacatttcacaaataaaatgacctcttccctcttctttctcctctgttttcagtcactgcttcaaccacctgtgagaaattagaaaaagccaggaatgagttacaaacagtgtatgaagcattcgtccagcagcaccaggctgaaaaaacagaacgagagaatcggcttaaagagttttacaccagggagtatgaaaagcttcgggacacttacattgaagaagcagagaagtacaaaatgcaattgcaagagcaggtctgtgcttttgcagccagagcttgtctgaggcctctgctgcttacttgaatcctggttgctcttcacatcttgatgagcttctcttttttagtctaataggtataaaaagcatgttgttgttgtttatttaagacagagtcccactctgtc

SEQ ID NO: 40040 - DNA, 2300 bp, Homo sapien
atgggaccacagccagagactaagtgcctgtgtcccagggactcctaattcaattatggtgaatccattttttttttcttgagcatttcatatatttaatgcctgagcataaaggcatctttatatccagatttccacctttctcttttttcacattgtgtgtaattctgcatgttacaatacaaagagaattgaatcaacctgttatctagacggttaagagtttatcatctaagagagaaacactgatctaggagcagctgagtaaaaagaaacagtaaatcagtatctaaaggacataatgcattttatcatctacaagtaaagggtaagtacatgtaaaggccaagctaccagggagagtcaggcagaaactaacccttagtatgtgtcttttacagtatgggcactggggtcagcatttcatctatggatggtatttaaagcccttggtttttttcattactgcttcccatccgatgaggtcatctgccttgatagatgaccaaaagaattgagcctggatgttctagttctaggtaggccccatgcttcttgaaggcagggaccatgtcttaaatttcttttatattttcacagcatctgctatgaaaaatgcttagttaattagtttgaagtaataagttaccaaccaatttagaagggtaaatggtctatgcatttggaggaggggaatggtgtcacattacaagggaagaaccaactgacttttgcacaacccatttagacaaagagtgaaagatgacctcaaggttttcctgttactgttactgtgcctgacagaggttggaagatgtcagtagtttctgaggcattaaggacaggaacgtggagtgcagtggagttgaagtttggggaaatgtcgacatgcttggtgaaactccctttcccaaaacctcccttaataagcaaaaatatcacctggtgtatttttgcagtagaacataatgatttcacacaatttttctttgcagttatactaactgtaatttttaatttctttcatcctcccattagtttccataaatttgaaaaatgattgaattttcttgccatctcttccttctgttagtaacttggttactactgaaaagtgaattttaagcaagttcaccaaatgagtttcaggattgtttgtgggcatttagtaaagctgtcttgtttttcctgttacttgagtggtaaagcttcctggtgtttacttgaagtagattactaaacaaaattcaggcttaaatttgatattacgagaagtatttatgatacatatttttatgtttttcttccattattatgcgggctgattttcctcaggctttaatttctacattagaaaaccaattacttattattttaagaaactctgactcactggtgatttcagaacaacttaatgccatatttttaaaaaccaagcatttagaataccattgaagccagaaaggtactcagtgaaaagtgggtcttaaatcccagtccctgctgaccacgtttcagtgctggcgtttagacttgacttccgtagctcttactgagaggtgagaacaaagtaaaagttaaaaatatatgggatctccaactctcagatcagcacttcagacttattttgaaacacctctcatttcataatgtcatttaaatttgtaaacgacagcatgcccctttccttgctcttcacctagttcataacctcatttagtatatgggcttcgaagaacaagtttcccttttctattagtaagtgtgatcaaataatgaccacaattagagaggggaagaaaaaggctcacaagtctaaaaataactccattatccatgcagagggggtcagttttttctttcctccgttgcagctgatatttaactaaatggcaatcgatcagtctaatgcctgcctctcgtttttcataaatgaaaggctgtggctttaagtaatcacaggctgcctgtgccaaaggcagaagctgcagtatcagcttctgtgagtgaggaatccgaggcacacggtaacctgcaggacatgaagtaagacgcccgagggccaatggcgcgcctcctgctagagctttgaatgtagacagacccgactggtgggtggcgcggccacctgtatgcttcttgcacagtgcgaggggtggggggacttggagacagaagctggaaaatgggctgccccagcagcaaactgtgcctctattctccatgtgcagcaacaagggtaattagtatttgtttatagtgcttttctggaagaatgtcaggactactgcagaggctgt

SEQ ID NO: 40041 - DNA, 2300 bp, Homo sapien
ctctgaaattgtgttaaaaatagcgttgattagcatagaaattctagaaagagaggcaaatgttactcaggactcaggaaatgataaaggagttatcaataaatgaatttttaagtaagtttcggtaggacatatacaaatgatatcaggagaatgaactgtgtctatatttgttacagtaaattctagatagtgaaagaatttgaacatttttgtttataaagttatataacacatagatgtttatatgtaggtttgttaaaatgagttatcagataatgggcttatatgtattatagcaagatattattacatttgttgcataaatatttatttttatgtatgtcatatattacatcaccacctaatccgctttccaaaatgtgtgggaacagaagaggcttagcatcagaggcctgggttctgactttgaatctggattcccatagaagttgtctacatccagggaagacattcacacctgtgagccttctcttccctatctggggttattgggaggatgaaaagaaagggaaagtgagagcacactgtgatgagcgaaacactgtggaattgttatgtgttatgtgacaatttctaaaaacatttaggaaatgacatgaaagaatgctaatctcatggtcaaatatttagattatttttcattagtatgtaactaataatttgttcttccttcagggctgtaatattacgatattaacttggctattttctacatctatgcaagtgacaattattcataagctactactaataattgctaataataaagagtaatggataaatacttcctctcatcaagtattacagagacacagtgggacaatggatattttagtgattttagaactgagaattatcaagtattaatacaaatatgacttatttaaccatgtaatgcagccatagaaaataagagcctttttttccctgtttttaacttagtttattcaatatatttagccatttgttcttagaaagtgagtactgatgtttctttaagcaatcactgtagtagcttgccttttcctgaaaaattagagacagtaattactaaatttctttaaaagttgtttcagatttgctaccacagaacgtggatgctgtaatgaaagactgttagaataaggaaacttttttttttttttagtttcttgtgtcttttttccagatttacatttgtttggattacttggcttgtttatttcaagaacctaagcaattgatgtcctgtttttccaattctgtttgatattcaaaatgacacatttggaatggttccaagactgaacagttttttatttaaaacagagtaatacccagggcaccattgcacaggaagggaataatcacttagcgtggcattttgggtggatttggagtgttagcatgtgctttaaaaaaaaactgtgtaagccgttattactacttgggaaaaaagaccaacaaagcttgtgttcgatagaaaatggaatagtatagtcaacagtatagtactcctaacagtgaacttaaagaggcaaaatctgagtatattttcgatgtatgttatgatttattagagattaggaaatgactcatctgcggtataaatctgtgtaatggctaggccatcatcagggaaaaggtaaaagatttgtagaaaatgtatgggaggagagaaaggcatttaatttaaagtccagtgatttgtgtgttcctttcagcatatgagatcagaaaagtcaggcttctcttcagtcaaggtttctctaccaatttaactggaaaatgagaaacgaggagaacaacattttgcacccagtttttgtgtttctgggttgccaaatccatttgtgtcatgttcctaattctctgttccccataaatcttttaaagtcataaatgaagccacggtccctgttcatgaattccaaccgtctagatctccgattcattccagttctcatccatatgcattccttacagcaacataacttaaatggatttctgtggcttatctggttgtttttgaatccttgtggtggtgattttaaaaattaacctcacctatctttgtacctatgttaattcgttttgcagttgaaaagagcaggcaaaagaatcctcgaagcttatgtatccagccacagacagctcccgatgcgctgccccctgagaaaacacttgaattgacgcaatataaaacaaaatgtgaaaaccaaagtggatttatcctgcagctcaagcagcttcttgcctgtggtaataccaagtttgaggcattgacagttgtgatt

SEQ ID NO: 40042 - DNA, 2300 bp, Homo sapien
tgcacttgtgctgcacggccaccaggaggcagactatgtttgggaaagaactgaatttagtttattcctgcagcttcttgctctgctgttaagagatatcattaacaatgtttattttcaatatgtgtggttatagcttaatgtaattcaagtaaaaatgttaatgaatctgattaatcgatgattagatggtaatttcttcttttagggagtctaaagaacttcccttttaacaaggataatttaaggctgggcgtggtggctcacccctgtaatcccagcacttgggaggccgaggtgtgtggatcacctgaggtcaggagttcgagacgagcctggccaacatggtgaaaactcatctctactaaaaatacaaaaattagccaggcatggtggcgggcacctgtaatcccatctacggaggctgaggcaggagaatcacttgaacccgggaggcagagattgcagtgagcagagactgcgccattacactccagcctgggcaacaagagtgaaactccatctcaaaaaacaaacaaaaacaaacaaaaaaggataatttagaatttgctgttactgaagaaacaacaaacacaaccaaaagaaagaaaaaccacctcctactatatggagtggtggcatgtctgtttttaatcatggcaaaatttgactctgttcttctgtttgtttttaatgctgattggtttcttggtttttacaaggttttgggaggtagaggaaaaggttctggtatatttttagtatgtagaatctggaaggaaaaggtgttcaggttttttaataataaactgggatgaagtaaaaggcaacacctagaagcagctggccttgattttaattccttgatcatttagcttcagttgctgtggtgcaatgtatgtagcaggtttttcgtcagtgtatgaactaggtgtatctttctcacaggaaccctggacaggttattgggtctgtctctcttgctgacaacctctaaaatggcaagttgggggcttgagtgaagagggagggggcttgagggaagagaacttatttaaattttctcttcctccctctctcttccctgcttcataccctactctatagaatttctaaaagaactgcttcctgctagttttaatagcacttaatagtgttatttatggtaacaattctgcatttatttctgagtcttattttctaggaaatcttggaaacaggcataggacatttttaaaacattgttttgtttataacatttttaaaaatgttaagagctcaggctattcgtggtttaatggaattagcttaagtgggcatattgttgttgttaattcttataaccatatctttgtttttcaagttcttttggttttgctatcatgttttaacatacttttacaagccactctactgaaataaaaattagtagataactggcaaaagatattcataactgtgccctcctcacactcctagtcttgaaagaccactataagagaccacatgatgttctataaatgcaattactcatgcaataaatgtagtctttagaatatgcctatctgatggactattcttctggaactctgatattacatctgatagagaaaccgtattaatcttttactgttgattatttgtgaggtcctcagcatgtgggaattaaagttgaactttaaccttttgacaatctgtcattaatatattagaatagaaattttcttaaatattgtagttgagaacatttattgcctgaagtctttaaaaaaaaaacttttccaaaataccaggtttaaatgtagtttacatgtaaaatatctagagaaaaaatgctcatgttatcattgtgaatataaggagtgaaaaatgttaaaatcaggacacagtttactttcaggaaatcctaatttttttctaattatgaaagaaacattaggcacttgaagtagttaatttcccctagcgatctttcaagtggttacaggatctgtgacattattggttgttctgtaaagctcctgagaccacccactttctcctcccctttaccatctcggatgaaaaccataacaactccacaagcatgcacagtgtgatgtggttcagaggcagcttctagacctgcaggagggagattgtattcagaggaagagcatcattttggcaacatctgaaagtgaaaacggaagccagaaacacttggccagccctgggggatttttttcttctatgcctctctggtggaatgacatttgctgtgtaggcatctttcctctgactgtatttcttggccttga

SEQ ID NO: 40043 - DNA, 2300 bp, Homo sapien
aatgagtgaatttcctgagatctctctttcattccaaagatgtatttggacttggttcttatttatttcttatatgatagcctattgtcctaatggattattttttttttagtcaccagtatggggggtcgtatcaatttgtttatttttttatttcagttttgccaaaagctgctttctcatgattattctgattgatcatctccttcagagaacatgtgtgagttaattactttaggagacagggttactcctacacttctcatatcctaattgcctcatcatttctgctctcttgcctctaaatgatcaaaaataaacatgtctgcgtgaagctttcatctttcatctgaagttacatgattgtgaacattcattttgtgttttgactttgttgttagtgcagaagtttgagtttacaggcttaaaaagtgccagctttcgggatgaatagcactggaaactttttgttttttttaaaccccaaggaaagcctacatccttgaaaactgcacagtcgtcatgggtgaatttgcctagaccacttcctaaatccaaagcatctttgaaaagtcctgcgctgcggaggacaggaagcaccccctcaatagccagcacccacagtgagctgagcacttacagcaacaattgtaagtcgactttatatcacacttcgggggttgtggaaacagtcattacaagaaaaactaatgctctgcaaataattagaatttttgtttctggggtttcaggaaaaataggcatactgcttccttggagttgctctgaaagtttggcagaaaaaaaattctttgaaaaacactcttgaaataattatgtgttaaagtatatttttgcatgaaggattcgaaagtgcatcgtctgaagtgatggtgttttggaggtttaagagtagcaacccaggggatttggactctaactggaatcagaaaaaaagattatttcagtttcatttactttgcaaaagactatctcctgtggaatctttggatgctagattttgtgtaataggactaatataacttgaatcctaattctaaaaaattgaaactcaggagaattttgttaaagttttcagttaacgtgagttctattttctgtgtataaatgagtgaatttactgagatacctctttcattccaaagatgtatttggacttggttcttattttctcatttccttttttatacttccccacgaaataattcataaatttaaaccatcttggagtgcccgctgtgcacagacaccatgataggcgcagtgaggagcacaggatataaaagaaatggcccttattctaaaaaatagttgaggagaaaaagaaggtattttcatggatgatgagaataccaataaaaccagacacaagggtgtggagaggagtggcgaactgatctcttcagtttgacagatcagtttcttcttttgggtgaggagttggggacaaagtgtaataatgctcatgaggctcctctgggtgtggagcagtactttaggatgtccatatttgcttttatttttttctctcaggtaacttctgctgttaccctgatatttatatagaaggtgattgaggctcagagatgttgtcactggtctaaaatcacacagcagctatgtgagggaattgagaatgcattttttgtagagaaggcattgaattaatgaccgaattaatgagcacatttccgacgggtcacctagcagcagtagctggactcatatgagagtaagtagctgcataccctggcacttcaggaatactgggatatgtgacttgcaattaaacaggattgttaccagctttactgttggaattttgaaggtgtggcacaaaatcaggcttgcatgtaagagggaactctgaatttgaaaaggtaattcacacgtgtattattttaagctctctttgtcttgcaaagcaattttaaagacaaactgccaaaacagaatcaccaacatgctctagaaaaactgttgtggcaacagaatttgtggcacttgaagcagacacagtctgtagtgccacagccccgtgttttccatcgacatccatgttgacttggccaccgtttcagtactgtgtctgatgctcctaaggaggctgtaaagtgcttttgtccattcctttttgtcttttaacaaaggggtttaccatacacccacagagcctgtctagtggcgatgtgttcctgttgcggattaagcattcaaatcagtgagtctctttcttagtttgatttgctagctggtttaatctgttttgtgtagtgcct

SEQ ID NO: 40044 - DNA, 2300 bp, Homo sapien
ctcatttaaaaggaattgaagaagaaataaaatggcagaggtttaaggttactattcaggatgactgatgataattcagatgataaaatagaagatgaattgcaaaccttctttaccagtgataaagatggaaatacacatgcatacaacccgaaatcaccacctacacaaaactcttcagccagcagtgtgaactggaattctgccaacccagatgacatggtggttgattatgaaactgaccctgctgtagttactggtgaaaatatttctttaagccttcagggtgttgaagtatttggtcatgaaaagtcttctagtgatttcattagtaagcaggtgttagatatgcataaagattctatttgtcagtgtcctgcacttgtaggtactgagaagcccaaatatctgcaacacagttgtcattccctagaagcagttgagggccagagtgttgagccatctttgccttttgtgtggaagcctaatgacaatttgaactgtgcaggctactgtgatgccttggagctaaaccaaacatttgacatgacagtggataaagttaactgcacctttatatcacatcatgccatcggaaagagtcagtccttccatactgctggaagcctgccaccaactggtaggagaagtggaagtacatcttctttatcctattccacttggacatcttcccattctgataagacgcatgcaagagaaactacttatgatagagaaagctttgaaaaccctcaagtcacaccatcagaagcccaagacatgacttacacagcattttctgatgtggtgatgcaaagtgaggtttttgtttcagatattggaaatcagtgtgcatgttcttcaggaaaggtcaccagtgagtacacagatggatcacaacaaagactagttggagaaaaggagacacaagcactaacaccagtttctgatggcatggaagtccccaatgattctgcattacaagagttcttttgtttatcccatgatgaatccaatagcgaaccacattcacagagctcatacaggcacaaggaaatgggccaaaatctgagagagacagtgtcctattgtcttattgatgatgaatgccctttaatggtgccagcttttgataagagcgaagctcaagtgctgaacccagagcataaagtcactgagactgaagacacacaaatggtctccaaaggaaaggatttgggaacccaaaatcatacctcagaattgattctaagtagcccgccaggacaaaaggtgggctcgtcatttggactgacttgggatgcaaatgatatggtcattagcacagacaaaacgatgtgcatgtcaacaccagtcctagaacccacaaaagtaaccttttctgtttcaccgattgaagcgacggagaaatgtaagaaagtggagaagggtaatcgagggcttaaaaacataccagactcgaaggaggcacctgtgaacctgtgtaaacccagtttaggaaaatcaacaatcaaaacgaataccccaataggctgcaaagttagaaaaactgaaattataagttacccaagaccaaacttcaagaatgtcaaagcaaaagttatgtctagagcagtgttgcagcccaaagatgctgctttatcaaaggtcacgcccagacctcagcagaccagtgcctcatcaccctcatcagtgaattcaagacaacaaacagtcttgagcagaacaccgagatctgacttgaatgcagacaaaaaagcagaaattctaattaacaagacacataagcagcagtttaataaactcattactagccaggctgtgcatgttacaactcattctaaaaatgcttcacacagggttccaagaacaacatctgccgtgaaatcgaatcaggaagatgttgacaaagccagttcttctaactcagcatgcgagaccgggtccgtttctgcgttgtttcagaagatcaaaggcatactccctgttaaaatggaaagtgcagaatgtttggaaatgacctatgttcccaacattgataggattagccctgaaaagaagggtgaaaaagaaaatgggacatctatggaaaaacaagagctgaaacaagagattatgaatgagacttttgaatatggttctctgtttttggtaagtaatatatatatattttttgcatgcttcagagaactgtggagaaaactgagatgtgttagcatttagttatctattagtcaataatattgcagaaccaggtgggcagatttacatttagttgttaattcattgtcttgtcagta

SEQ ID NO: 40045 - DNA, 2300 bp, Homo sapien
acctgacacaaaaatgaagtaaaacaggttctatatttatagatataactaagccacacaataggattgtggggtttagaccaaatcatctaggtcacatcagggttataaagattaaatgatatgtttcacacaagaactattctgcttagggatggaggcttgttgctaattagcataattgcctcgtgacttgcggaaactatgtcagcgttttgttttgtttttgtgtgctttttcagagggagactcatctggtggtgttaaatactatatctatttaaaattaatcacatgcctttcctaacaacacggatcatgctagttgcatctatctttacaacagggatttctgaagcaaatgagaggtgtcattatgtaatggaattaaaagagaagattaggagttaggctggctgggtttgcacttgccctcactggctgtgtgaccttgcgctagtcacttgacctttctgagcttcaattcctcatttgaataatggagataatctgacctatatacccctgggttttgtagtcaggaaataatggatcattgtacatatgaaaagtctttacaactatcaatggcaagacatctgtcagttattctaatattcatggtatagaaaactgtgaaatacagagtccttacgtctattctccaaaaaagttcacttctctttaaaagcttttagcaaaccacaatccaggtaattaaaaaggaaatattaaaattttgttctcaggttgtctgacatttcacggttcagcaatgtgacatctctcacaggcagaatagcatcttcggacaagttttctattaaaaatatgctttatagaagaaaatattttacggacctagaagacagctgtcgatgaaatttgctcagtttagcaaacagcaaggactgtgtttgtgtttagagaaaagtaggtcgagcctagtttatctccctggggttctagactcctttccacgttgtatctcaagctctaatagctggaaagctactttctttaacctttaatacacacttgctagtaaacttgctagaagcatgaagataatacagactgcgaatcagcccttctaagagacaatcacgactccttccttgcaagcttccgccctgataattctgcaaccttcccaccttctatacgccccgcggtgcgaggcccctcggcctgcaggtggccagaggcaagcaggagtcagatcccccacctaccgcggcccggcctgggccctagcgctgggtgcggcggagccccgggctcctgcggggacgagcgtggtcccgggacgcgcggtgcagccaggtgcgccggcggcagtggcagccgctgagcgccgcgtcgcacgtggcaacaggtgcagcgctgtcccgggctggcgccggggggcgtggggcgcgtccgcacttagtccgggagcgcgcggagcgtcgggattgggacccgagagcgggagcggagagcgggagcgcccgagcggagtccagcgccccgaggtacggcctcgcacgtcattcaggttccccgagggccgtcccctgggacggcggctggccttggtctcccgcagcgagccgctggagtggagccttcggaaggagccgccccgggttggggcgggaggcccgagttcggctatttacaagtttcccgaactccccgccctgctccaccccctggcggccccggaggcggggaggcggggaggccggggctccgggtcccgcctggtagccgccgcaggcgtggggtggtgccgcgccgcgcgcccccaggtgcagacgccgcccccgagacctccggggcgggttctcggcgaccccgccagtggtgcaaagggcgccagccctccccgcctctgcgtctttgctcccggagcgcttgaaggagctgcgggtaagtgcgcgctggaatctgttcccgctgcccggcggccggggtggggaggggacaggcgagcgcgccgcccagggtgacgggaccggtcctcggggaggggagggggcgttccaggggcctgggggccgaagctgagggctaaagggggcggcagcgccggcggagcggaggcgggtctcacgtgggccagcgcagagcctgcggaagggacggatgcggatctcgtcgctgtcaccttgaaagtgaccgaggggcttgactgtggactccttacgccgcccacccgggcccggcggtcccagccttctcgcagggccccttctcagcagaagcaagcggggccgagaaagcgggtggaatagggttgctgcaggtcccaa

SEQ ID NO: 40046 - DNA, 2300 bp, Homo sapien
tctcatttcatagctttggtgcagttgtgcaaggtcacaactcttctttcttgctttttttctttttctttttttttgacagggtcttgctctgtcacccaggctgcagtgcagtggcgcgatctcggctcactgcaatctctgcctcctgggttcaagtaattctcctcctcagcctcctgtgtagctggtaccacagacgcccaccaccacacctggataatttttgtagttttagtagaaactaaaaatacatggggttttgccattttggccaggctggtctcgaactcctgacctcaggtgatccacctgcctcagcctcccaaagcgttgggattacaggcgtgagccaccgcacctggccataattttgacctttcctgatgatagttcttccaccatgttatggcagtacatccatggaataatgttactccaagaaaatttggcttttggaattcctccacaaagtattggccctagagtagtccttactgcctgattaacttttgcaagtttctcctgaggtaatgatgctagccaagtttccgaaagacagcatagtctacctttagtagaaaagaggacagattctgagcaggattgcctttgagcccagctatacctcttgttagctgtgtgacctcgtgcaagtcacttaaacctctgtgtctcagtttcgtcatttgtgaaatggagatcattaacagtacctacttatagggctgtgtggctgagtgagttgataaaattaccatgtttagcacatgataagtataccacatgttagctgctgttaatgttatgtccctccagtgaggaaatgaacacaaggctaaattattgcttgaatggggacaaagctaaaggcatacaagaaggaaagataagtttgtatttcaaaatatgtcattttaccacagagatcattattgaattagccgaataatcccatatttttgcttttgaaatttaacattagcagcttgaattctctacaattatgaatgtataatttccacttcttctgtgtgtgtgcaaatcacttcagtctaactggctttttttttccttcttttttccagtaaatcaacaggattacctttcccttaataatcttcaaaatgtccacgtgaaggacaggaagatgtttaatgggaagaccaaacatcgtcagtgctcaagtccagtagataacaaagaacagaaagaaaacaaaactttggtattttactggaatctgagtgaataaatagggaccacaggacaaatggcaaacaactgcttgagttacatcagaaggaaagaagaaatgatgaacccagatttccagtaagaaactgttacacaatacgattaatggagctaacaagtgcctattacacattagaaaatcttctagaggattttaaaacaaaaggaacaacttgtccagagtataatcgatgcttccagttaaatttcacaattttgcacctcagggaatacttttgtttttcttagagagcaaataaactgaccatttcaccttggcaattattaacctgccttgttttttataactaggaaaaatttggcttatctccatattttagttgagatgacatattaattcatatttttgtgggtaaaatgttattacccttaatacaaagcaaagtttcagctggacttcgtttttacttaatcttcaatggaacattattgaagttacagtacaaaaattctctgaatgaacataataataagttgtaaaatatatatatctttataaagatatattattggatctttcacaaaaagtcatacaagtggggaaaaaagaaaaatatcagagtattgggatttgtccttgaatcttctcttttagctttctttcagttaaacctgtgtccacatgtttgtttctggattgaagccagaatcaacattgtccctatttctaatcaaataatggagaaataattacaaattcccaatgcagttacaggatcctgggaagcagagtgtctggatggaacctgagctgggtctctgactcacttctgactttaggcaagttatttaatgtctctgcatttttgacatgcttgtaataatgctaatttatttcacaggtatgatagtaaccaaaactcaggtaacaaccattagcttttgcaagaagtcaggttgactagcaaggagtctgcttctgctacttggagaagagatttagaattatgtatcttttgttacagatatacagatatacaaatatacagatatacaaataaggtatgttagaattacaaatg

SEQ ID NO: 40047 - DNA, 2300 bp, Homo sapien
ggaaaaaagaattgacagtgtccgtttaatgtgtttgagagcctaatcagcctgatcttggtgggactgtacttgttgtcctattatatcatgcttttcttgtacttttttcagccagtgatctcaggtctcattctcatttcatagctttggtgcagttgtgcaaggtcacaactcttctttcttgctttttttctttttctttttttttgacagggtcttgctctgtcacccaggctgcagtgcagtggcgcgatctcggctcactgcaatctctgcctcctgggttcaagtaattctcctcctcagcctcctgtgtagctggtaccacagacgcccaccaccacacctggataatttttgtagttttagtagaaactaaaaatacatggggttttgccattttggccaggctggtctcgaactcctgacctcaggtgatccacctgcctcagcctcccaaagcgttgggattacaggcgtgagccaccgcacctggccataattttgacctttcctgatgatagttcttccaccatgttatggcagtacatccatggaataatgttactccaagaaaatttggcttttggaattcctccacaaagtattggccctagagtagtccttactgcctgattaacttttgcaagtttctcctgaggtaatgatgctagccaagtttccgaaagacagcatagtctacctttagtagaaaagaggacagattctgagcaggattgcctttgagcccagctatacctcttgttagctgtgtgacctcgtgcaagtcacttaaacctctgtgtctcagtttcgtcatttgtgaaatggagatcattaacagtacctacttatagggctgtgtggctgagtgagttgataaaattaccatgtttagcacatgataagtataccacatgttagctgctgttaatgttatgtccctccagtgaggaaatgaacacaaggctaaattattgcttgaatggggacaaagctaaaggcatacaagaaggaaagataagtttgtatttcaaaatatgtcattttaccacagagatcattattgaattagccgaataatcccatatttttgcttttgaaatttaacattagcagcttgaattctctacaattatgaatgtataatttccacttcttctgtgtgtgtgcaaatcacttcagtctaactggctttttttttccttcttttttccagtaaatcaacaggattacctttcccttaataatcttcaaaatgtccacgtgaaggacaggaagatgtttaatgggaagaccaaacatcgtcagtgctcaagtccagtagataacaaagaacagaaagaaaacaaaactttggtattttactggaatctgagtgaataaatagggaccacaggacaaatggcaaacaactgcttgagttacatcagaaggaaagaagaaatgatgaacccagatttccagtaagaaactgttacacaatacgattaatggagctaacaagtgcctattacacattagaaaatcttctagaggattttaaaacaaaaggaacaacttgtccagagtataatcgatgcttccagttaaatttcacaattttgcacctcagggaatacttttgtttttcttagagagcaaataaactgaccatttcaccttggcaattattaacctgccttgttttttataactaggaaaaatttggcttatctccatattttagttgagatgacatattaattcatatttttgtgggtaaaatgttattacccttaatacaaagcaaagtttcagctggacttcgtttttacttaatcttcaatggaacattattgaagttacagtacaaaaattctctgaatgaacataataataagttgtaaaatatatatatctttataaagatatattattggatctttcacaaaaagtcatacaagtggggaaaaaagaaaaatatcagagtattgggatttgtccttgaatcttctcttttagctttctttcagttaaacctgtgtccacatgtttgtttctggattgaagccagaatcaacattgtccctatttctaatcaaataatggagaaataattacaaattcccaatgcagttacaggatcctgggaagcagagtgtctggatggaacctgagctgggtctctgactcacttctgactttaggcaagttatttaatgtctctgcatttttgacatgcttgtaataatgctaatttatttcacaggtatgatagtaaccaaaactcaggtaacaaccattagcttttgcaa

SEQ ID NO: 40048 - DNA, 2300 bp, Homo sapien
gcctcttccttcataaccaatttatgttcttttctttcaaaaatcactcatttaatggatgtaaccttcgtgattctgacaatttcatctatagttgcatttcatcagttttcacatggctttacttctacagagttgtgattactacatgattcttcctgtatttttcttgtatgtatgtttttacgtcatcttctctattcactgaaaatgtggtcaaagctgcaatcatgtagtaaaatcttgagtaaattgcttccttcccaagacacaccaagttggagaggtttaaacggagagatatgagtaaccattttttaaaactacaaggaaaataatccacatctttttccttgtttcccaccagcactataccaaaacagttaaaccagaactatgtaactagatatatgttggtaattaagtagaaaaattggataattaggtgagggagttccaaaaatatggaaatatgggctgatacagattttgtttcctaattcataggaaaaatgttagaaaggcatgaaaattaaacctcagctttcactttaaaaaagctgttaatcaaaacaaaatgatatgaaataaggactcaaaattatcatggttataaggaataatctggagtgattttataaaagttggtttctgggtcaaataagtttttattcacagaaataaagagatctgcaggtgacaactagatttgtaatatgcatccatacggactagcagaggagtatgtggcatgattggggttacaatgattcatgttaaattcacggcattatgtaggaaagctacagctgtatatattataattttttttttttttgagacagagtctcgctctgtcgcccacgctggagtgcagtggcacgatttcagctcactacaacctgcgcctcccgggttcaagccattctcctgcctcagcctcccaagtagctgggactacaggcacccgccaccacgcttggctaattttttgtatttttagcagagatggagtttcaacgtgttagccagggtggtctcgatctcctgaccttgtgatccacccaccttggccttataattttttattttaccgtaaaaaggcttccacattgcatttctccttccatgagaaagatcccaaagtcaggggagaactagcaaaacacacgtgaattcagattaaccaggtaagagaaaatgccctctccttaccagaagaactaaataatttccagggctaaaaaccaaggacgttggatggcaggccggtctatccaagactctccccaatctagataaggaaacaagtaaaactctgatagcgggtgaaacacactggtatagaggagaggtttgtgggtcaaaacaggggcttggatgtgggccgaggtagtcgagggccagcgtacagtgtgcctgtttaaggattaacaatatatgctttagaatagtgctttattaatatagtcatgaatcataagaatagcttgtgcttagtccaacaatataagaatcaggcggtgagcttgcttgactgaccacagagtggaacaaacaaccgcaggaagtgtgcggagcctctaagcaagaaagcttgcttattgctcaacctcccacttgagtccctgaacaaaggtctcgtgggaagggaagcgacccctgctccattccccagaagggaacagcaggaggctgcttgtaaaagaggagaagtcctctgcggtagagatgaggaggaagtcttctatctctcgctcgttcccagaggcggagagctctgctgctctgctgatggtgcttggagtggaccactcctttgatgcacaggcctgtggtctgacgggctatctgctttcacatcctgttctgttaagcccctctgccacctctccccatggtcactctatgatcacccaaccatctgcccaccctcagcccataggatcaaaggaattgtactcaataaacatcagtggaatccagagctcaaggccttcgcagtttccgtgttgtgatggaaccctggacccacttttgttaactcttgaactttgtgtctttatttcttttctcattccttcatttccaccgggaaggggagaacacgcatgtggtgtagcgggctggttcccctacatctttggcacccagtgtgggctccttgtacccaggtggagttacacctgagcatggtcattgcggagaccagtctgtcgagggactcccaagaacgtgtggtcggccttgcggtaagcttgtgtgctcggagtattccagggacaccatgggacaatcgg

SEQ ID NO: 40049 - DNA, 2300 bp, Homo sapien
catttgtttggcatagtgacggactattaacactaagtcgattcattctgataaagtttgtttctaaaaatagatgttaaatttctgaaagccaggtataattttatcgcttcttgttttttttctttccttcttcccttacaaagatcagtaatgctcatatttgagtttgagatccccttttcaatgtaaatatttctcaaattcctcttacctcccaacaaacaatagtattgacattctggggcttcataaattcagaaaacatcatgactagtagatattataatttcatgcttttgaatttattagaattgttttaatgataacagcttctacatttcaatgtaaatatttctcaaattcctcctacctcctaataaacaatagtattgacattctggagcttcataaattcagaaaacataatgactagtacgtattataatttcacgcttttgaatttattagaattgttttaatgataacagcttctacatacgtttaataataatacatatgtataaagcaaaataatgatgatagctaatatttcgggcctcaacatatactagtgtttttatatgcgttgtatttaattaaaaaaaatcttaaaggaatcacatagacctccgtttaaatttaggctctaccacttgcagctgctacaagtttgatttatataatctttcattgccaaaacgggtcagattcagaaccagcctcttcagggtaactgtgaggatcaagaaaatcacaacagccgaagtgctttacagtgtgcctggcataaaacaaactctgagaacattttttaaaaaatcctttcaaggtaggcagtatcattccttccccctcatttcatagatggggcaattaaggctcagaaaggcacgtcgcttgtccaggatcttggagtggtggaattaggatagggcattctggactacaataaacacctgagcgtttagctgctgtgttctgagctcccacagcactttttcttacaacacaaactttatttacatcacactccacttccgcatccttcactaaaatatgagctcttcaagggcagggactatatttttgctaccgcagtagttagcgatacacacacagaatatgaggaaaaagtgtctgaccaacgatcaatgcactcacgactgaacctacggtggcagattgcagtgggatagaagagctttatgtgaattgcgtactgagatgcagacctactattttgggaacaatttgtttttgttgttgaaacccagaatgcaattcttctttttacctttattttgcttaaaaagttattccataattataaactgcgtaaaactagaagaatgcccttgcactcaactaaaactgacaggtgttttacctttccagtcaggcacattgaaggccttgtgactttattgatttttgttttttaaagggaggacctgccaatttattaatcttaatagagctgtaacaggagagtataaataaaaagatagttcagagaaaatttactgaaattaagtttggattaaaatcatctggctcttttaaggaaaagggacattaaccaaaagtggcgttaactatcaacaatatttatgattctctcactcagtagatacataatgacgtctggcaaattgtttaacttccgtggaacaatcccctcatatgtaaaatcaggaggttggactacattgtaagtgtccttttgtttccacctcttcgtgaccgaatgtggggtgaggaaggggcaaaaaagcgatcccggtcttggctccttcttccggcacgggccggagctgacacccccacggaaaaccgcacagcgcctccgctctttctccacgggctgagggatcaatgcacttccgcataggcctagggccccacgctccgcgatcagcgccggaagcgcacggcatgctgggatttgtagtcctccacctgtggccggcaggcgtttagaacgcgaggtctagttggcattctgggatacatagttcctgggcgggtgggggcggattcgttggtgtaatctcttttcggcttaaagagccagaagcgacaccacagactccggcgggtcacatgactccagtctagctcgcattgcggctcccgcccgggcgagttctcgcccccgcgcggccgttgccgaggagacggcgcatgtcccgccgcgcgttgccccctctgcagtacccccgcccctcttctcccaccacaatgagatcctaagatggcggtggctgcggcggttggcgctgcgtagctgaggtcga

SEQ ID NO: 40050 - DNA, 2300 bp, Homo sapien
gtctcaggctcttatattagcattttgacactgtttaattactgagtcattaactgggatttttttttttttttactcgattaaccaataactctgagaattccaactttgtattcaccactaggagtgctatgattaacatccgttactttgttgactccttttttttggttgttctatctttttcctgttaaatctcatgttgctctataaaggtattctgttgtcagaagcctaacacagtgttagttcacagttgccattcagaaatgattgttgaatgaatatccatcacgagcagtaaacatttattcaaagcttcggtgaatagactttcctattagaatgtccctacttcattattttcatataattgatagtaaaaaattactctggttttaaattatttatatcatttttaggatggatctgaatgtctaatattattttagatatttggcctacttcagattagacctcatttcccaaaatctcaactattgtaatttcatggaattaaatgactagagataaaaagtcagataaaatcctgtagtcttattcaggggtcagaaaacttttcctataaaagactagatagtattttaggccttgctggccatatagtgtttatcatagccattcatctgtgacagttttgcacaagagcaaccataggcaatatgtaaacatgagtatggctgtgttctgcaataacactttatttatgggcacagaaattttattttcatataattttcatttgtcacaaacttttaactttttttcttccaactatttaagaatataaaagccattcttagctctcaggtcatatggaaacaggcagcaggctgaatttggtctgtaagttacaggtttctaacccttgtcttgagttaaatcctgtaggtcactgtctcccagactattaggagcagtgttgttgttcacgctaggttctgtgataaagttttggacttgttgcccactaccacttttaagagatttataaagcacattggcatattaaaagttgtgagatattttacagacctgtttaactttgttttatgtgttttctccccaacctagacgaccgatgagtacctattaaatattaagggatgctagtgttcagcagataaaatttgagaaatgacagtagactaatagaactacggacttaaggagtggagaaataaattgctaattgaatgaccaattgtattcaccaaattcttgttctacttgaactgctttaggtgaacacaaatccatgtatgttcccaagccctctgctatagctctttttgagccattcttccaacttttgggtcttgtatatcccatcctcccttgatttttctttttgttgttttttctagaggcagggtctcactttgttacccaggcaggagtacagttgataacgatcatagctcactgcctccttgaattcctgggctcaagggatcctcctgcctcagccccctgagtgtctaggactggaggcacatgccactgtgcctggctcatttttaaaattttttttagagacggggtctcaccaacttgtctgggctggtcttgaactcctgggctcaagcattcctcctgcctccgccttccaaagtgctggagttacaggcatgagccactgcagctagcctgatttttctttcccactgttttccattgctaatgctagatctttgataaggaacttttgccagtaaaagtggtttagtgagatgggtccagaattaaaactaatttactaccttagcttatgtgatatttgcatatttaatgtgtatttttgtgaaaacatttttatagcctgttgacaattttattcacctaaatctactcgagtagactataaattcagtgtatttggagtttttgtaaactatagttgttaacttataaaaacttgttttcattggtaaggaataaaaaactgcctgaagaggaggtggaaagcagtaggacaccatggttatatgaacaagaaggtgaagtagagaaaccatttatcaagactggattttcagtgtctgtagaaaaatctacaagtagtaaccgcaaaaatcaattagatacaaacggaagaagacgccagtttgatgaagaatcactggaaagctttagcagtatgcctgatccagtagatccaacaacagtgactaaaacattcaagacaagaaaagcgtctgcacaggccagcctggcatctaaagataaaactcccaagtcaaaaagtaagaagaggaattctactcagctgaaaagca

SEQ ID NO: 40051 - DNA, 2300 bp, Homo sapien
gagtatgagagtttcagttttctcctcttgataattctcctctcgatagtgtcagtctttttttttcctttttttttgttagtgtcaatctttatttgagcctttttgttgagtgtcgcagtatcgcattttagtttcaatttgcatttccttgatgattaatgagattgaacagtttattgactttttttttttttttttggttttctttgtttcttttggagaagggcttgtgaaggtcttttgcccttttaaaaattagattgaaggaattttttacatactttgaatataagccctttgtcagatatatggattctgaatatctgctcccagtctatgaccttcatttttattctcttacttttgtcttttgatgaacagaaatttttaattttagtgaagtctaatatctcagtcttctcttttatgagtagtgccttttgtatccatttaaggaatcttggcctaccccaaagtcatatatatatgcttatatattttcttctagatgtttaatgtttactttttacatttaggcctatcatctattttgaattatttttgtatatgctatgacttatgggtcaagcttcaggtttttctcatgtggtatatccagttagttaaacagcatcaattcaaaaggctatcctttcctcagcaaattgcagtggtgtctttgatataaatatacaatacatatatatatacacacacacacacacacacacacacacaatgtgtatctgtatatacaatcaggtgattgtatatatgttgttttgtttggggaattaagtttcatttacatatttgtctttttgtcttcccttatatcaatactatttcacctcagttactaaagctttatagtaagtcttcaaattaggtggtataattcttccaactttgtttttctcaatatttatttaagttactgatttctctgagcagtatcttttattttcagggagaagacctcacatgccattcgttaaaattattcttagatattgatggtttgggaagctatttttaaaatttcaatttaagctttatggcatgtaacgaaaaatattttccccacgaccccaaaagttttatctttaagctagcaaagcagtagtgtcattattttaaatagccaacagtaccttcattttatgagatgattgagaatttgtgaaaatcagtagtatttatcaacaaaagtggctagttttgtgtgctgcttctttaaaaaactcatttaaaagatagcatactggaaatatgtacttgctgcctttatggaaagcaagtctaattcctttattatgtaaagaactctagcaactcaataccaaatagaaataccttatggattaagaagaataacatgatgtataagtggtgtaaatttatataattattataaattattataaatgtataataaaataactagaatttcaccaaattagaaatttaatggaaataaaatacacattggatttgggtgaaaaaaacatgttgagcttaacatgttaatgttaaatgggacagaaatacaatgtgctgcctacttttgaattaaatgctaaatagcagtattatacattttgggaaaatattcaaaaaataaaataccctagaatggagtttcttggcagctctgtactaattttaatagttcttgaatctcctttttcaccttagaaattttagtcacactttaaaaatctgggcaaaatatatgtccagcaaacagccaagagccagatgtattaaatgatcatatttacgctcccaaaagaaaattcaaaatgaagcatgttgataaacattttggatgtgatgttggagaacaattgcaacctgcccagatgttcagctcgcccgaaggctgcctccttggtgacttgtttcatcttgagtctagagagtccaggctggggaagaaaaccacctccagccggccgttccagcacagccccactggccaaagcacacactcacacaatgaaaacactgaaactttttcttaaaacaaatttttctcccattgtcatggttctgtatattaacacaaaattttcttttctcataggagagattatttcattcaatattttttatgaattatttaccatttgtacttcaatagtagcagaagacaaaaaaggtaattgtgcgctgagggagggtgggcagcatgaagcactacataaagaaaaatcttctaaatgaaattagaacttctgaaatttgggcttgctatgtaaattctgtgtatgttgcatacagctttttatttc

SEQ ID NO: 40052 - DNA, 2300 bp, Homo sapien
atttgttcagcttatggtgtgttcctggtggtctttcaatgaagggccctgacagtatcaaagtatcaaagtctctcccaattcccataaaaccaactaccgtcaagcaaattaattccctacccacaatggagcaattttattttaaggcctttaatcgtgtccacatacatgttctgtgtattttcctattacaggaaaaactgtatatactattctggattctacttttatctgctgaacattatatcaattttaatggctaaatcatatcccaccatgattttaaagaatttctccttacaggtataaaagaagacaatgcacatcttgcttccactttcaataacctacctaaactattcaagaccatcaccatctagcctcaggccagatgcgccaggttcctacttatccgattctgttggcaaagacaaacgcagtctgattgctttataaagaaatgaattatgaaagagtactgggcgtcaagaggctcggacgttacgcatgttcagtaaacaacagtgtaacctctggctaaatattttctcactctaggtctacttcctcttctgtaaaatgaaagagtcacgctcgtccctcactgtctcttgcagttaggaagtccgtagccctgtgacttgctcgtgggaaagagccacgggacaggcgatcccatgacttgggtgcaaaaggccacagggggccctttggggcctgctctgggctgctcgcaccgcccaagcttgggaccactcagcgtttcccacggccctgcagtatcctgggctgaactcctgaacttcttcgggagaaagcacctgaccatcaggcagtctgtccttgattgagtaatgcacacaggtccaccggaacattttatttaaacacttcaaaatgcaagggcctggaactggttattcaagtacactcactcaaatctaagaatgtgcgaatcacacccaggtatcctgcagagactaggatttcctttaaaggagttctagttgcaggtagcaccgaatctaccgaggacggggttcgccagcccgctctgcacccacacccctgtgcacgaaaccacagacccccgtaaagaagctgcccagcacgaggtgttccttgtacccgctcgcgccgccacacctgcgcctccatccgcgcccgcacctgcacgcccctctctgcgcctcggctcaagctcactcaccggcggcgcgtgctgcgcgacggcacagctgacggcggcagccaggaggactaaggcgacgcaactccggcccggcatcgctctagcagccaacgccactccccggactccagcagaggcaaagaagagccggctgggccgggggcaggccacgccccctccgccgcgtgacccgcgacctgggaccgcaccattccaggcagtagggggaacgctcggaggaggcgggactgggaggagaggacggggcttttcagtgccacgaaaagggtggcgtagagaaagagagagagccttccaggctacctgcagaaggagagtcgcgatcgcctttggcgcgtggcgtgatccatccccctcccccaccgcgggcaatagtcggaccgagccggagccccgccccgtaggtggggccgggagcttcacccgtggcgcctcgatggggcgcctctagcaggcgggtgcagcctgtcccgcgtacccaggcgtcctcggtacccacgaaacggatccaaagagtctcaacactaatgtaacatcccaccctgacccatctttgccctctgagaaaagcggcccgaaatgagttgagttattcatccccaccgcggagtcagggacaaggagcagttgagtggccgaggagtgagagagaatcgaatccactcgggtcctccaagctgttggttacccacttgggctttcacagcaaagctgccaaatcccagaattgaggcctcggtgaaaagcgcgctgagacttgggtaggaggcccggtgggacccgcgagctttctctcccagcccgatgcagcagttcattaagcggctgtgtttcctcctaactggcgaaggactcaggtgggcggagcagagctcagcttgggaggaggcggacgcgagtagctcggcagggggactcgcttggctttcgtgccatccgtggacacagtcgcgcgggtaggtgaccgggttggatttcaaagtccagcaggaaatcctgccctctgggttgcacttcctggatgagcctctgacgtctcaagcagcattgttttaatgctttgatgaagctcagcacgctgccg

SEQ ID NO: 40053 - DNA, 2300 bp, Homo sapien
tctgcgaaagtggtgcctaagaatagtatgtcaattgacaaattttttccataaagaatctgattttgctagactacctaatcaccaattaacatcctccagtagggaaaaaaatatgcttggtgacatgtttaaatcgctctcaagagtactgaagatgaatgatcttccaatcaagtagctatttgatttagtaataacaactaaaagatgggaatcctcttcttcgcacactcattttaagctccaaggtaattccatagattcaacatttaacacgtatattcaatattacacattttttttccggagtgaaatggctctgaatgccttacagaatttgccctgctctccttaactaaatactttgtctattaatacttctttcttcttttccccttgttctttctgtgccagacccacacacgtctgctgtaattgaacatgccaggcacattctccatttaaagccttttaacagctgctgtctctgcctagaatactcttacttgggcacacacaaaactagcttcctggtctccctcaactgtctgctcaaacttcacctccttaatcatgtctatctgtccctcttatttaaaattgtaactctaccacttctgatctccacacttgatgcccctggcctcccttttcctccactgcatttgtcactaacatcccgtataattttcttaggtattatgtttattgcccatttctcaccgagaacatacgcctcagggtggaagaagtttgtctttttgttgttgttcactgcttatccccagtgtcaggagacatgcttggcacattgtaggtccgcagtaaatattttttgaattaataaagaatatttctaccatctgctagcttactgttcatgcaggagctcaaatgtgctttaagcatgtgatatgtttcaaaagtcaaacttcatccttagggagaacactgtcatcttctcctcctttaaaaaaaaaaaataggaaaaaaagcaaaacaaaacatcaccttctcatttccccacctccaacaaaaagagtgttgagttttctaaagaaataatacaaatggataaaactgcaatttgttgtcctttctctcacatgcaaaaagaaaagaaaaaatactgccgagatttcggcagcgtgctgagcttcatcaaagcattaaaacaatgctgcttgagacgtcagaggctcatccaggaagtgcaacccagagggcaggatttcctgctggactttgaaatccaacccggtcacctacccgcgcgactgtgtccacggatggcacgaaagccaagcgagtccccctgccgagctactcgcgtccgcctcctcccaagctgagctctgctccgcccacctgagtccttcgccagttaggaggaaacacagccgcttaatgaactgctgcatcgggctgggagagaaagctcgcgggtcccaccgggcctcctacccaagtctcagcgcgcttttcaccgaggcctcaattctgggatttggcagctttgctgtgaaagcccaagtgggtaaccaacagcttggaggacccgagtggattcgattctctctcactcctcggccactcaactgctccttgtccctgactccgcggtggggatgaataactcaactcatttcgggccgcttttctcagagggcaaagatgggtcagggtgggatgttacattagtgttgagactctttggatccgtttcgtgggtaccgaggacgcctgggtacgcgggacaggctgcacccgcctgctagaggcgccccatcgaggcgccacgggtgaagctcccggccccacctacggggcggggctccggctcggtccgactattgcccgcggtgggggagggggatggatcacgccacgcgccaaaggcgatcgcgactctccttctgcaggtagcctggaaggctctctctctttctctacgccacccttttcgtggcactgaaaagccccgtcctctcctcccagtcccgcctcctccgagcgttccccctactgcctggaatggtgcggtcccaggtcgcgggtcacgcggcggagggggcgtggcctgcccccggcccagccggctcttctttgcctctgctggagtccggggagtggcgttggctgctagagcgatgccgggccggagttgcgtcgccttagtcctcctggctgccgccgtcagctgtgccgtcgcgcagcacgcgccgccggtgagtgagcttgagccgaggcgcagagaggggcgtgcaggtgcgggcgcggatggaggcgcaggtgtg

SEQ ID NO: 40054 - DNA, 2300 bp, Homo sapien
atgttataaactttagggtccctgaaatatgcaggatccttgtatgtaactggcataaaccctgtaaagagataattaaagttcttgacaaagcataatgagcaaaatttcagctagctcaatacagttgttgaggtgctctttcttacccattgtttgagctctcttaattgcttttgtgatttgtttcttcccacaaagacctgtaaaataaaaagcttccttattcataaaaaagtcaatatttaaagttaaaaaaatgtttatttctcaaactgaaacattatttctctatctcttgaccttttagtacacgtttttgtatattcggttttactaaatcaagtcaaacctgttccaggtaatgtgatgttatacatgataggtttcatttagggtggggtggctaagttgcaacccttttaaatcaaggctccacctcaggaacctaggaatgttaggtaggagatgaggaagtccacagcttgccaagaacttcagctattccataaacaatctgattacatatcccgactcttgcacacgaaacaggttatccaagtcttaaacttgatgcttttgtgcagtatgaaccaccctttccgtggacataatcatgcatttgcacatttaaataccattttctatgaacagatcagtatgccaaaaaccactgcaaagtctcctacacacaccttgccttgactttctgtacatttctagtattaaagaatggtgtaggcaaaataaagatatatgtgtaagaaaaaaaagacatgcatgaaatggtttaattttagggaactagatttatattttatctgaaaagagtattaataatatataatagacctttgaaagttagacgcatagttctgcgaaagtggtgcctaagaatagtatgtcaattgacaaattttttccataaagaatctgattttgctagactacctaatcaccaattaacatcctccagtagggaaaaaaatatgcttggtgacatgtttaaatcgctctcaagagtactgaagatgaatgatcttccaatcaagtagctatttgatttagtaataacaactaaaagatgggaatcctcttcttcgcacactcattttaagctccaaggtaattccatagattcaacatttaacacgtatattcaatattacacattttttttccggagtgaaatggctctgaatgccttacagaatttgccctgctctccttaactaaatactttgtctattaatacttctttcttcttttccccttgttctttctgtgccagacccacacacgtctgctgtaattgaacatgccaggcacattctccatttaaagccttttaacagctgctgtctctgcctagaatactcttacttgggcacacacaaaactagcttcctggtctccctcaactgtctgctcaaacttcacctccttaatcatgtctatctgtccctcttatttaaaattgtaactctaccacttctgatctccacacttgatgcccctggcctcccttttcctccactgcatttgtcactaacatcccgtataattttcttaggtattatgtttattgcccatttctcaccgagaacatacgcctcagggtggaagaagtttgtctttttgttgttgttcactgcttatccccagtgtcaggagacatgcttggcacattgtaggtccgcagtaaatattttttgaattaataaagaatatttctaccatctgctagcttactgttcatgcaggagctcaaatgtgctttaagcatgtgatatgtttcaaaagtcaaacttcatccttagggagaacactgtcatcttctcctcctttaaaaaaaaaaaataggaaaaaaagcaaaacaaaacatcaccttctcatttccccacctccaacaaaaagagtgttgagttttctaaagaaataatacaaatggataaaactgcaatttgttgtcctttctctcacatgcaaaaagaaaagaaaaaatactgccgagatttcggcagcgtgctgagcttcatcaaagcattaaaacaatgctgcttgagacgtcagaggctcatccaggaagtgcaacccagagggcaggatttcctgctggactttgaaatccaacccggtcacctacccgcgcgactgtgtccacggatggcacgaaagccaagcgagtccccctgccgagctactcgcgtccgcctcctcccaagctgagctctgctccgcccacctgagtccttcgccagttaggaggaaacacagccgcttaatgaactgctgcatcg

SEQ ID NO: 40055 - DNA, 2300 bp, Homo sapien
gacaaaggagcagaaaaccaaacactgcacgttctgactcataagtgtgagctgaacaatgagaagacatggacatagggaggggagcaagacacactggggcccgttggggtgaggagggtgggggtatggggagggagcgcatcaggaaaaatagctaatgcatgatgggcttaatacttagatgataggttgataggtgcagcaaaccaccatggcacacattgacctacgtaataaacctgcacatcctacacatgtaccccagggcttaaaataaacagaaacagaaacaaaaaaaaaggaagtaaaaaataagcctaaaaggaaaaagtaaaattttttctatttgccgatgacgtgatcctacatagagaaaactcaaaacacgtcataaaaattgttaaatccagtaaagtagcaggatacagaatcaacatacaaaaatcagttgcatttctttacaccagtaatgatctatctgaaaaagaaatcaggaaaacacaatccatcataatagcatcaaaaagaataaaatagagggtggaacaaggtggccaaatagaaccttccagtactcattcccctgcagggacatcaagttcaacaaatatcctcacgagcccaggcggcacagtgtgaagacagagtctacctccttaggaagtaaaaggaatgttagtgtgggattttgcattggaggctagtgctgaccccactgcagtggaacacagcactgggcagagcctccaaggcccttgattctaggctggaggccacagagggagcatttagacccccgccccgggtcagagggaaatctgctacctcagcaggaggaatccaagttccagtccacttcacaaccacctaactaaagtggccttccgccagaccctaaaacaaagatttgcattcaggtagattatttggaagatgatttaaggacgtaccagtgcaggagttgtcgcgggacagtgagaccagggcagtttgacaatcaataaagggtgcatcattggcaagctacctgtgaacaaagggagcataattccactggacaacaccaggaggcagtgttatacaagcctaagggtaattccacctgaccaggtacagcacaaagatatgtggcctccaactcccaacatcctgggctgaatagtggtcccagacccatagttttcaagtctatctagcctgcctgaggacatgccaagagaaagccttcgcatagagtcccgagttcacgtggcaggacgccagaggcatgttctagaacagtaggtgccgaaggcacagcacaaggaaacactcactggtggaatgttctcaaaacaaagaaatgataaatgtttgaagtgatagatgtgctaattatcatgatttgatcattacacaatgtatgtatgtataagaacaccacattgtaccctgtaaacatgtatattgggtcaataaagaaacaaaaattatgttgtatagagaaaaatgcataagaaacagcaagagttgtagatcaataccatgaatgtaaataaaaaacaccagcataaacaaagccatatgacatatatcaccctcataccacacacatggggctctttcagacacattgcccagtgccttcaggtagagaggccagtgggaatgaggatgatggatgaagggaagaaaaatttttaaaagaagtctaatgggaactgatgaagaaagtataccataaacttggagtgtgattaaagccttccatcttcctcttttgcctcctctaggttaccagttctgcttttcctggacctgttccaagctctcacgttccacatcacacatgggacatctagtgtcaggctcccagagagcaggaaccaggtgaaatataagagcacagtcctcccagccggtggcatggggataatcggacaatacaactctccacccttttttatggtaagatatgaataaggggtccacaggagcaacctgagtccctgcaactacatttcccaggggcccctggggtaaccctaatgtgactctgggggcggggccagttggacatccaatgagagcacttcccctgcagactttggaagtgagagcacttcctcatagaccttggatgtgggaggattgcattcagtctagttcctggttgccggctgaaataacctggtaagtggaactctgtaaggggctttgaaattggggtttaatcctatctcaactgtgagtacaggagagtaggttctacacgatgtctacatttcaagtataaggttgctcagaaagtgtggctg

SEQ ID NO: 40056 - DNA, 2300 bp, Homo sapien
cagaattacacatgtgccaatctggattgcaacattttaattccaggtgtcaggtttccaacaatcaaggagaaaaatgaccataatccattgacaattcctctcccacactcagtcaaaaatggtccagatcacagtcctacatgctggaattatttcctctgcttctctctcaccccaccttggccaaagattttctagcaagatctgaattttaatccatctctcttcgcctgtgtgtcccgactaatttggcagaaggaattctttcttaaaaccttgccatttaattcacaaatggaaatgtgaagggtcaataggtatgtgaagaacctattcacccgtattcactgggaatcagagaagtgaaaatgaaaagaacactgagctatcatcttagatacacaaaactgtcaaacatttgaaggtggctaacaccaaatgtcaatcaggatatgaggaaagtaggaattcttctatacaagaggacagaaatctggcagtgccaaaagaaaaagtacatctatgatctgcccctccgcagatcccattcctaatacatatatcccagcgagttctgctaatctgcagaggatgtctagaaacgcattcatcacatcagtgtttataataaccaggagtaggaggcaatcaaatgtccttcacaagtggaactggtaagttaaagagacttaggttgggtttctctaaaaccaggccacaagacaaagatttgtattccagtggcttattttgatttaggagatgatttaaggaatcaccagtgcgggagtataacagtgaacccaagacaccttgagatcaataaaaaggtgcattgttggcaggctgcctgcaaagaaagggagcataatcccagtagacaacaccaggaggcagttttgtacatgcctaagagtaatcccaccttagcatgtagaacacaaggatatttagtctccagttcccatcatgtgggctgagtggtggtcccaggtgctttaatttgtagtccatctgcccaagcacaggccaaaagaaagccttcccacagagtcccgagttcatgtggcagcatgccagaggtatgtactggaacagtaggtgctaaaggcaacaattacatcatgaaaactgcacatctcactcatatgtggaatctaaaagtaatttagctcatagaagttaagagtagaatagttagagtagtagaaagttaagagttgttactggagagaaaagagggtatggaagctagaaaaaaagctagaaggaaggattttgaatgttctcatgacaaagagatgataaatgtttgaggtgacagacatgctaattaccatgatttgatctttacacaatgtctgcatgtatcagaacatcacacactaccaaataaatatatacaattgttatgtgtcaaaaaacattatatacaatgtttatattttatattaatattaatgtaaataaaaatttacacaaatcttttcattaaatatggtgtggataattatattatctgatgatacccatgccacaggctaggagaaataaaaatttacattaatgttaatgtcaaaaaagcagaaacaaagccatatgatacatgtgacacttataccacatgcatagagttatttcagacacattgtgtgttacctttgggtagagaagtgaatgagagtgaggatgagagatgaaaagaggcagaagaaaaagagaggccttataggaagtgatgaaagtgtgccataaactgagagtatgactaaaacctttcatcttcctcttctgccgcttctaagttattggttctgctgttccttgacctgtttcaagctctcaccttctatatcacacatgggaagtctggcatcagacttccagagagcaagaactaggtgaaatacaagggcacagctctcctagcctgtggcatgggtatcatcagataatataattatccacaccatttttaacaaaaagatttgcgtaagagattcacagaggcaacctgaggccctgcaactacatttcccagagatccctgaggtgatcctaactagactctggtgtcagggtgatacggaattccagtgagatcacttcccttgcagactttggaagggagagcactttattacagaccttggaagcaagaggattgcattcagcctagttcctggttgctggccaaagtaagtagaactttgtaagtaatttgcagtgtactttgaaagtggggtataaattaaaaataaaatcaagtccccctactgactgaatggatcccctct

SEQ ID NO: 40057 - DNA, 2300 bp, Homo sapien
ttttgcaaccagcagggaaagaggcctcttactgcctaaacacaaagttacactgagcttttctactgtcctttgcctattgctccctctatcatgtaaagatctgggaaggatgagaggcagggcctgcttgtcatgagctgcactcttttctttttaactaatcattgacaattggaagaaaattgacgttaaagaagtttctccattgtcttactaacaaaaccttttgggtttcattaattgtccttgaaattgagttcctttggcatttttccttgcagtcatcagttaagcatgttgcatcctgaattcacagaagtttagctttgcaggtttgaatctctgtaatttaactcccgtggacttggtcgagttttcagcaggttgggagccacctctcttcatttcagcagtgagtcatcccttgacttttcaaatgacagaattttttccaattgtaaaattagcactgtaaaacaaagaaccaaagtggcatcctaagagttgttaaacctgaagtctagtttatgaggaattgtccaagttggagtttaaatagtatctgcttttgtctcaaagcatctaagttattctgacagaaaatggtaagtcagctttgcaggcagatgcgcctctgggcctcctaccttgctccacagctttctggccatcttgtctcccaggccatgccactgctctgccacatgtcagcaaatttctttccaccagtcttatagcatcttacatgatcaaatcatcacagaataaccccgtgatagattattgatagcaatagagaggggctttgtcactgatttttctctcagattccttttccatctctcatccataaaggaaggactgaaatccaaaggcattctccttttgtacctacagtatccagaacccacgtgggcagccttctgcttatgacaataattggcccattgcatgcagagagaatgtcttcatagagagaatgtcattaaatacttgaatctgcatgacagtttgacttgaatgcaacagcaggaaaattttgcaagttacataattgtatatacagtaggttttcttaagtctcttcggttcatcctttgtaatttgtgtgtgtatctgtagtattgcaggcttttggagactattcttacaggcagtatgtcagtcatcaaagaaaatgctgtcacctgccattgttgtatttgtgggtatttatagttgtatgtatgtaaatgcatcagtgtgtagattgcatatcagtgtatggtacatgtacatcaaaattatttttgtccttaatcagtgtgatatgaaaagcaagtacaacctcataggactgattatataatgaagttgttgagagtatatatagtggtattgttttattaaacttaaactcaaataatattttgattaaaatttttaataagactttatgctagaaaattctttgagctttgaatcaccagggcaaaaatgactttcaactaaccttgtgaatcttttgcagtgtactgtgtgcaataccaagggcatagctccctgtaatttgggaaatacagaaagaaaagaaaaaaaaaaaaaaaggcagcctgtgcagtcttagtaactttagtattaagagcacttaaagtcaaactgacaattttgggcttattacaaaatgtgatgctttaaagcacacgttctttattgttgttgtaattagtccataaaaaatatagctttcggaagaattaagtacccaccatatcatttatgtatttgtgtatgttttacgggagatcaaaccactctcgtggtgccgcatccgtactcgcttgacttggaagaaatatcacaagcactaaagtatatcagggcatcccaggattgggtactgtatcctaggtttgcagttgcagaaattagcatctagtgtcacaggtaaaagaatttcaggaccaggtttaaactttattttaaatatttttatacttaggtctctttttcctgcctctccccaaagaagagccactggccttagttgtttgagcttactgcttatattatagagtgtaaataggtaactagagactaaaattttattaaccagcatgtttggtatatttaaagcagtgactgagtgtgtttgagtgagtggctgagtgcagtgtcttttgtttaaacacactgcctcgtgtctttgtagctgattcagagagtttgaattgtggggtgggagactaacttcagctccaggctgcagtaatgtgttggtagttacacttgaggcatttttttgttgttgttaatta

SEQ ID NO: 40058 - DNA, 2300 bp, Homo sapien
aaagtggttattagtggagacagtacaggagtaacgtcaattgggcagtctttgggtaaagatggcgtccttctgctaaacctcccagaaatgacatgtatcagattccatttctgtacatcctaccatatggttttagtttttgttgttgttgttgttgtttgtttgtttgttttttaatctaaccattttggtggagaaaagaaagttcatcaggagatagtttataactcctcattatgatgactgacaaatatccaaagggcatgtttcttttaagcccgtgcactgtctttatccccacacagaggcaggcgctcatgtcttttacacgggacattttgaatttttatctttattatggtattagtttcttactgggttccacctcaagcttacttttgttaactggagatctttacctgtagactcgtcgtctgcttaagttagaactaagtctattccaaatgatcgattttattttactgctatagtacaccactttttatgtctttggaatatgctttgtaaaatagtaactttacagaatttttcttaattctgagaaacagttatttggtagcttcagtttcctaagaagagaggaaaatgtacctcaaaggacaggagagtccccaagatcttccaaaacctattccaaaaataatctattattattttagatggtaacattttaccaatattaatgtcttcgtcttctttatagcacaatagaagcactaagtgctttaaaaataggagatgaaaagttaaaaaaaaaaaatgtaaaggatataggaagaaagcccctgtcatgaggatgcaacaaaacccaagggtcaaacatcaccctctgctgggcctgttgacagtagagggaaacagttacctgacattaaaacataactttagtaattaaagtttaagaattactttaaaccattttttaaaaaattaattatctcaaataatgctcaagaacaccagtgcgttgcaaaatttgaacattggtacattgtaaaaaaaagtgtatacattcttgagttgtaaaggaaaagtttaaatctgaggggtgggatggattgaggctgacgtttttcccagagtggtctttgtaaacaatgtttaagttttgttatttatattaacacgaaagcctcctttatctggagaacacgcttatgtggctgagcctctgtccctgggatgccagatagtgagacatcgcaatcctgagtagtatgctcaaaactcacttcatatgttaggagctaaaatggtcttgttttctagtaatctccagtttgtgattcgtactcagaggcttgcacattgctgtgtacactgacagaacattgatggcttttggaaaagctgcttgctgcttgttgcccggagttagctttattgctctcactctgtgccatattgaaagttaacctgtgctaaccccccagtcattttctcagtctcctagagaggtaacagaacatctttattctggatttgccgtacacactgacataattcctcttgaaatatctggctgtcgtagtctaaggtcataagaaacatttaattcttcagaatggcaacataatttgaattgctgtcaaacagtgtgtggcctgaaacgggaaagaaaggaaaattattgatcattgagatgcctttgtgtctcgcatcgtttcactagcctgtaattaattgagccttttgacgtccatccatattttttttcttccttgtggaaattcagctacgttcccaccccacatggtgccttggagattacttgagacttttatttgtggtatctctatttggttgttgacattaatgagcttacttcacaaatatcacaagagaaatagtgttgctttttggaatgttaatgaattgcttgcctggccaattgccattcgttccagtgtgtgaatatgatggggtgtgtgtgtgtgtgtgtgtgtgtgtgtgtgtgtgtgtgtgtgtgtggaaaagagagacgagtagcaggggtggattgcatttttttcctctttgcagccagtgacgtgagctgtgcctggaacaatcagactcgctgcaaacagggtagttgaagatgctgggggaggcagcctggtgcttcttaagctaacgcggatcacggcgctcaggagctgctcaggcacaaccccgcagagttcctccagcgtgagagccttggaacggttggaaagtgcctttttatttctctaaaccccttccttagttgaccttcgaaaatgattggcgtgaatagtgtccagagtgccagc

SEQ ID NO: 40059 - DNA, 2300 bp, Homo sapien
aagtcgtttggtgcaaaaaaaccccacctaaactaaaatgggaaaatcaggttttacaaaaaggaggcaatggggagagcagagttcagcacaaaagccaagacaacattcaaaaaaagacatcacagaccttcagtctccacttgactgctacaattatctgtggagctgtcaaccagctgatgtagagatcttgtgggaataaagcattaaagaatgtaagtgataacagagttatcctagatcaggagaatgaggctaaaaggaaaaagctaagacagagatcgaaaattaggtggctgtgacttcggatagtcccgcagcctgcttcagaagcgctctgctctgtttggccaataaacgagtgtctagaaggcaccctggaagatgggtatgagtggacgccactgagattgtcaaagtgaaaagtttcctgggtacaatacacagagttcctctaaacaagactgcattctgaccttgactttttaactgaaattttaaaaatctgaaactgagtttatggcttgtacaaactactaaatccagacttttgctttattccatgttttagagaactccagagaaaaagaattttctcaagccacatacacaaccctggcagaagcaaaagacaggtcaaggacattatctttattatgtgctactagtcatactgctttaaaacaatattcatatttgtataaaactgtatcaaaacagatactatagaatctcacttgaacaagactttaaaaatcatttactccaaatactcatttactcgtttagctgagccccttgttcaacatcctaattgcacaactattcttgaacatttgcaggtcaaggaacccactatttcccgagatagtatgatctattcatggacacctccaactttgagaaagcctgacttgtttattctagtttattttatttttaatcttcaagttacctaaatctattctttagagctggtttcattttaaccagaaagctctgtaggaatatagcatatatctagatagcaaaactctgtatattttgctttgtcaaagattttttagacaatagttcttttgtatatcaggctctataaacacgaaggattaaagaataccaaccaggcctcttctgttcatagcgatatatgcatcatatttctcatatcgaaacccaaaaaggtaaagatacgtaagttttcttgcccttaatgccctaaaatgtaaaatagaattccatgggcagttatgactgccccattctgacccaactcattagggactactgccatttccaatgtatgggaaactcatatatgtagagaaaatctgcagatattcccttgcaagcagagaagttggaaaacaaaaacaaaaaaacaaaaaaccctcaaagctcctgctttgaatccaaaaacataaccatattttattaaaatggtcattaaagtaccaggcacattccaatcattcctggcaacatgaaccaccagatgtttactggattacacattttaccacaattggattctctgagcctcttaaggtgactctttggattgacaacacattttaataaaatatctaggaaaagggtataattttattaagtcaaggatgagcaatctaagaaaccagagttaaaaacaacaacaaaagcaaacctctatccatatcctcagactacctggaattatatgtgtttacagcaattaacaattggcaagaattagaagatcttgagtgggacataaatacaaaatacatgcaaaatgaccaaaaagtgaaatgaaaattgattcttacagaagtacatactgaatgtgccagtaaaattaaaagaaaaatccagtgtttagtacaaacccatcctccctgcctggccacccccacagtgctctgcagatggcatacaataccagtcacaggagcgccgatgcatttgctcagtgcgttttaaacacacacataattacaacaatccaagtcttcaggaaaataaaatgaggttaaagggtcacattccaaagcagtgatttattatttgtagtgatgccttaaaggttttattttttcctatttgatatcactctctcccaaaccccaggatctgagggcaaaaacaagcctctatttaaaaaagacaagatgaagaaaaaaattcatactgaggagaaaggttcatctgtcaatgtgaacaaggagtttacatcactagcattctactggttttcttggggaaagaagtctctgcagaaaagcccacaatccacatcccactcggagcaaaggccc

SEQ ID NO: 40060 - DNA, 2300 bp, Homo sapien
gcaatcccattactgggtatatatgtaaaggaacagaaatcattctgttataaagatacatgcatgcatatgttaattgcagcactatttacagtaggaaagacatggaatcaacctaaatgctcatcaagggctggataaagaaaatgtagtacatatacaccatggaatgccatgcagccacaaaaagagaatgagatcatgtcctttacagggacagggatggagccagaggtcattatccttagtaaactaaggcaggaacagaaaaccaattaccatgtgtgctcacttgtaagtgggagctgaatgatgagaacacatggacacatggggcagaacagctcacagtggggcctgtcagagggtggagggtgggaggagtaagaacatcaggaagaacagctaatgaatgccaggcttaatacctgggtgatgggccagttagaatggtgatcattaaaaagtcaggaaacaacaggtgctggagaggatgtggagaaataggaccacttttacactgttggtgggactgtaaactagttcaaccattgtggaagacactgtggagattcctcaaggatctggaactagaaataccatttgacccagccatcccattactgggcatatacccaaaggattataaatcatgctgctataaagacacatgcacacttatgtttattgcggcactattcacaatagcgaagacttggaaccagtccaaatgtccatcaatgatagactggattaagaaaatgtggcacatatacaccatggaatactatgcagccataaaaatgatgagttcatatgctttgtagggacatggatgaagctggaaactatcattctgagcaaactaccgcaaggacagaaaaccaaacaccgcatgttctcactcataggtgggaactgaacaatgagaacacttggacacagggtggggaacattgcacaccccctgtcgtggggtggggagagggaggagggatagcattaggagatatacctaatgtaaatgacaagttaacaggtgcagcacaccaacatggcacacacatacatatgtaacaaacctgcacgttgtgcacatgtaccctagaacttaaagtataataacaaaataaaataaaaaataaaaaaataactctgtaaggtatcaaaatagaaaaaaaaaacaaaacaaaactgggtgacgagatgatctgtgcagcaaaccacgttggcatttgtttacctatgtaacaaacctgcacatcctgcacatagacccctgaccttaaagttagaaatcaaaagatctttgcaaataataatttaggaaaaaaagccaggtaagacaagacaaacacggcaccaaggagataggagagaggactccaaaggagaaggcagtgctagcacagtagaaattatgaccatggatggaatctacagcaggggaaagctcagagagaaaactgaatgccaacgatagctttcatggcagatggcatcacctttcaaggcagagggcatcacagatacagagaagcacagacagaagaggtatccacagggaagatattatcctgcaggacgatgagaggatagcctgcaaatgtacttaacagctgccagttacaatagtgatcattacagatgcagagagttcttgaggatattaactctatgaggttcatcaatatcatggaagtctgtgatgtttttgacagtgaaaatataaaatagcacaatatgaagctgtggggaaaagcaagagagatcagattgttactgtgtctgtgtagaaagaagtagacataggagactccattttgttatgtgctaagaaaaattcttctgccttgagattctgttaatctataaccttacccccaaccctgtgctctctgaaacgtgtgctgtgtcaactcagagttgaatggattaagggcggtgcaggatgtgctttgttaaacagatgcttgaaggcagcatgctccttaagagtcatcaccactccctaatctcaagtacccagggacacaaaaactgcggaaggccgcagggacctctgcctaggaaagccaggtattgtccaaggtttctccccatgtgatagtctgaaatatggcctcgtgggaagggaaagacctgaccgtcccccagcccgacacccgtaaagggtctgtgctgaggaggattagtaaaagaggaaggaatgtctcttgcagttgagacaagaggaaggcatctgtctcctgcctgtccctgggcaatggaatgtctcggtataaaacccgattgtatgc

SEQ ID NO: 40061 - DNA, 2300 bp, Homo sapien
tcccttttcagaggcaatttatgatttagggttttacttattttttgctgatggtgtacttacttctgacttgtatttcagccctggaagctgtgcgtttgtacccgccctcttgtctgttggttccagtcttctgtgtttctatgtcatcagcctgaagaatggcaaaggagtcatgttgttcccactggtctttttattccacttgcagctgaagtcatttcttctcactccttgagattcttctaatttgcctttgcctaagttatgtataaaattcaactcgactaggtggctgttattattttctatgtacaacccttggggtacactttataaatacagggtcatacagggagctttgacaccttaacctaacttctttttggtcctagttttattaccacaattacataaaaatttaaagaaattttaaatttaaattcaaagtatactattgcctgtatgaaacgggcaatagtatactgtttattaaagttctgggaaaaattgaaagtaaaacagtacactattgagtatattgttttatacaggcaatagtattctactgatgtcagtttttttccaggattagctacagtgaattggaaaattagtgccacataccattattgatagcatagcatggaagacagtggaggaagtagacatggcagatggctgtgttcttgcattctcttagcagatggctgttgagtaccttcagccgccccttgtgttgaggattcaaaccagaattcaagacagtggtaggtgaaagcgatgagattttaaaagatagcactaagagttcacagaatttggcatggtagggctgggggtgatgagtgtggcaaagggaacaacatacgtaaaaggcatgggagcacagcttgtatttgtgtggttcaagtaggagggaaatggtagaggacaggttgaaaaaagaaattggggtcagcttggaaaaggccttaggacatgctacagaatatggatcttgtgtaggatttgtgtaaagtggctacattatcacatttgtggtggtagcatgcaggtcaagagagaaggatgaaaacacagaggagggtttttgtgtttttgtttttgttttgttttttttgtatttagaggacgttagagaagaatcagtagattataggcaacaaagtcttgataaaactgtagaaaaacagtaggaataaaatcgcagaaacaagtgaaaaaatccagaaggattctaattgtgaataagctaccagttggcaatcatggaacaccattattggaattcttgaaataaagtttagaaaaaaacatttcaggaagttttgccagataaaatataagatgcctagttaaacttgaatttcagaaaaacgatgaataatatttttgtataagtatgtcctgtgcagtatttgggacgtacttacactagacactgttttttgatgtgaaattcaaattttattgggtaccctatttttatttggaaaatctgccaatcttagtatgattcaaaaggttgtgagaaggcatggtgatcagagtcaatgatctggtccttcatttgatgatgcagtgttttgatgagagaattattaccatgtttacttggaggtcagaaataaaggccccagggaagcattttctagaacacagggagaaccttttgggaagtctcttacacatttaagtgactggtagggatttatttatttgcaaccttactaggctgtaaagtgatttgatcaagaaaaagagggaaaataaaacaaccatagaaaagagaaaatccaaactacagaacgcatctaatgctcagcagactagagctgcaatgtcttgtgtattcaagaaaacaaaatggggtgttatcccctccgagagggatcactgagttggctttatcaagtgtgaacgaggctgggctcactgtttcttacgttctcgatagacagtggcccttgtgttctggctgctgtttttattagaactgcagaaacattacagaaaccgcaacaatgaacactcggctgagaatgtgaggtcatagtagtgtgacctcacagggagccaggttcttggaaggctgtgaggctcggcagtcactgaacttgggagctgaagaatactggacggggcttcggagaggaaggatggtccaggcgcaccccaggggttgcgatgggctcttcttggtgtctgtatggttgctggtaagtttatattgccatcatattgtcaagctttctgatttaaaaggagcaattccggttcttgttcaaataatctcc

SEQ ID NO: 40062 - DNA, 2300 bp, Homo sapien
agatgtggctcacggatactgtcctcatggaatttaccactgaagataaacattgatcacataaacatgctaataggtataggatcacaaagtgtgctaggttctgtgaaggaaagaacagagacctacaagaatgaataatttggatggagggaagaggccagtttagttgatggcttggacaaagcttttctgtggaaatggaaattacactgagacgtgaggaaggaaagagtttgccagccagagaaggggtaggaagaatgttccagctagagggaacagcatgtgcacaggaggctgctgagctccctgactagtgtgtgcttcctgcagatgtgtgaagccaaggcctgtgccaggcttgaagatttgaaactctccctgtgtggctaatgcctgaagagcaggggaggcttggcatggtggctcacacctgtaatcccagcactttgggaggccgaggcaggcagatcacccgaggtcaggagtttgagaccagcctggctaactccatctccaataaaaatacaaaattagccaggcgttgtgttacatgcctgtaatcccagctgcttgagagtctgaggcaggagagtcacttgaacctgggaggcggaggctgcagtgagccgagattgcaccaatgcaccccagcctaggtgatagagttagactgcatctcaaaaaaaaaaaaaaaaagcaggggagagtggggtgcagtgagtgtggagaggtagggaggagcatcatcttaggaacggtccagtttatgccaagtgcagtggaaagccattaagaacaagcatttggtcccatgggtgaccttcagtatttaaaaacaacaaaccaattgcaatgctgaatgtggattccagtaatacctgggaatgtggatgacttatgagatgcttaatagataattcctaattctatgttattcctatttgtaggaatctgaggctcagagaggttaagtaaagttgcttcaagtgatatagctagtaattgagacagccaaaattcagcttctggtttttctaactcttgacctcttgctcttagtagtgatctatctcccaagtttttaattttacttagttatcctaatgttcgtttttaatatttgtagaacatgctgcatattaattgttcacgtttgtgtgccaaagtgaatgccctaccctgtatgttgacttttgagctgtttctaatctctcaaagctttggttagccttgcttctgttgcctttttgttaggccgttaattggctatctaattttggacgtgaaatctctctgcagtgctgctctgttgtcagcagggggcagctcttggcttctgatgcagtcatctgcttgagagcatttggccttatttaaatcagaaagtattaatcaactgatgaaagtttggtgtatttttactgaaattttgccgtatcaagtttccatgatatatttatctgcttctgttataattaggaatgctggtagttgcaaataatctgaatgtgtacggtatatttggctaaaatgagaattgaatattttattcatatcttcattggaccagatgtattcacacattaggaaactagtttgaaactttattaaagtatttatagtgtcctagccacatgcatgccaagaatttttcaacctgattatatttcatagcttccttcccaaatatgttaagatataagtcaatgaatagaagagttagatcttcagaatgttgtcctttttatatggttgaagtgggagaaataaagacattaacctaatattggaattcttcactcttatttactttccaggatcagcgaacaagaggagcacgttaagggggaagatgaagacatccttgggcctggatatacggaggactccaccgacgtgtacagctcccagtttgaaaccattttggacaacacttctttatactacagtgcagagtccctggagacattatactcagagcctgatagctattttagctttgaaatgcccctcactccaatgatacaacagcgcattaaagaaggtggtcagttcttggagaggacatcagggggaggacatcaggatatcctgagtgtgtctgcagatggtggcatcgtgatgggctattctagtggcgtcaccaatgggctgaatgatgccagcgactccatctacacgaaaggcaccccggagattgctttctggggaaggtactcgtcccattctcattcatttcatgctggtggtttttgtaggatttcttttctgggaaatctgagtgtggaatatat

SEQ ID NO: 40063 - DNA, 2300 bp, Homo sapien
ttgaaatggtgttttagggggttagtcaaagtaagtgttaactaaagcctaatgcgatatgctatagacatttggaaaacttgaattcagtaacctgacccgtgtaaatttctcccccatgtgaagatggtgggtgggggtgggaggtctgtggtgggtaaggggtgctttcagctttgccccgctagcttatgggatgctcacaattcctcagggctgcttcacttccagctccatcttctgaattccaggcataaggaagagggagaacaaaagggcgcttaccactctttcctccccttggaaggagcggtcttagaaggcttgcccaacaaatccagcttacatctcatagggaattggtgattcacggactggttagtgcttgtatgaagccagcaaaggttgtcctttctgctgttgaaaccaactcaaaaaatagctcttctttgagaggattttgaaaagggaagaagtgggtagttttataaaaaatgtaattctactaaaagtcatagtgattatagtatcagtaataaaaccttgagcttttattctatactggttgctactctgagtgctttatgtatttctatgtacagttcatttagtcctcagaaaaccccattattattcccgtttttttttttcagatggaaattgaggctcacagaggttaaataacttgctcaaggtaacataattggaaagtgacggaatccagattaatagccgagattgtttgctttaaccacgtggttatactgatctgtaatttaaacatctctagctcagagataaggaagctaaagctggaaagttttaaggcattggcccaaggtcatgccggtagtcggcactgagcttctgtttctgggtgtatttccactaccctggtgctgtctctaggtgcacactctcatctatatcctcttatatttgggccaggcttcttgagaggtggatatttttggcttgcgatggttctgaatcctgaaaattatattctttctttagacttcttttacttggcaaggaatccccctggaggcactttagcttaggggtagggagggtggactttagaggcacattgcctgtgtttgaatcgtggttgtgccagcgttagccgtgtgatcttggacaagtcacacacctctcttgagttttagtagtttcatctataaaatgggttaatcatagtagccatcccacagggctgctggtagaaatagatgaattaatacaataaaactgcttagtatagtgcctggcacataagtaaatactttctatcctgcttatattattacttatcagaaacgttctccaaattaaactgaacacatttttcagcaccctgtttggcactcagtaaatgtatatggaatgaataaaagcaactgtgaagtggtttgtattgtcagcccatgcatcctcatactggttggaaatattagggttacagaagattggaatcttcatgttatttttaatatttgtattaatagccattatcactattaagtatcaataatattacaatatcttactcatcttctgctactttccacctcacttcacttttctcatgtataaacctattagtttttacatttggtgcttttatactgagactgtgttgaaagacattgtatacatacaaggtactgtaagtgatataaaagtttatggcttcatatttaaaaatggatgttactggttttgagtcttctcatgtcacatttccaagtaacagcaatcacccattaaatattaatttaatcacaggaacaagatacaatcgtcactaaaatgactttaaatggtagcatcactaagcagtgagataaggactggcaaagcaggatttgtgtcattctgtggcagcttttaaacaatgtgtttgcatttcccttgtccgttaaaataatacaagaattaaacccttttaaagagaacctacccatctctttcccatgtgtcattcttgcatcagagaaaatgctgcataatactaagatgacagccccacctctgatgtcacccaggatggtacaatcctctccaagcctttgctgggcttcctgctgctgcactgggggacatggttacattaaagctaactcccgtcatctcaattatctccttggaagtagttttcacaaatataaaaacgccctacggtggctgttttcggtaagctaccaaggtagagagcggcagaggcagacagggagagcaaacgggagaacaggctgcttccgcctttgtgagagggactgaggcagcagctcctc

SEQ ID NO: 40064 - DNA, 2300 bp, Homo sapien
caggagctttccttaatttatcatgctaataacacttctgtatggcattattaacccaattttataaatgaggaaacagaggctcagattatagatgtctatgcccaagtcccttaactagaaatatcaagtaaatctatgtccaccctgcctcctatatgattacttttttttgtttgtttatgagttggttaatttcccaggtaaaggccagtaggccagtggtcaagcctcagggtagcaactacattttgtactgggtcttacttttgatgctttgccaacaaaaccgtcaaggaaggcaggagttgactgggaataggcacactgggactgtctctgtagggtatgtacgcaagggtaaagggagatcacaaacgagaaatatgcctgtattcgtccattttcacactgctgataaagacacaccggagactgggcagtttacaaatgaaagaggtttattggacttgcagttccacatggttgggaggcctcacaatcatggcgtaaagcaaggaggagcatgtcacatcttaagcggatggcagtaggccaagagagagcttgtgcaacaagcgctcccatttttaaaatcttcagatctcgtgagactcattcactatgacgagaacagcccaggaaagacccgcccccataattcaatcacctcccacaaggttcctcccacacacctgggaactgcgggacttacaattcaagatgagatttgggtggggatacagccaaaccatatcaatgcccaagtgactggggtgcttccaaacctacacagctgctcacactgctgctctggcagggggagcatgagctgcggacgtttttctgaagttggagtgaatttgtataaaggcatacactccctcatgctggctcctctggtgggtgtccaaggcttcctttgatagatgcagatggggcagccaaggcaaagtaggtgacttatgtggccttggtgcatctcagctatgctcaccgggcagcccatgctgacatggtgggcgagatcgtggggccaccagggaacctgactccactcccatctctaagcttggccaagtcagtcacttctcgttattggggcgtcttctacctgtcacttgaaaaagactgttctttggaacaataaggcggtaacacatacacaggaccaccctgtagccggccacacaggttccgcctccaggtgcttggatctacttaacggacctcccagggggaaagatttgcggtctctccgtccctctaccaggggagggcgccgttccagcccttgcctctgcggcacagatcaaaggacggaggaaaaaaggtgcgggtccggggcactaatgttcgaaaatgcagttttaagtgacctctccccgcgcacgcactgtcggtgggggcagtcccgaggccaggctgcggggcgcctggggggactcgcctcagggggaaatggccctttcagggctcgacgggtccccgggactaaacgctccggccgcggatcggtgccgggggagcccggtcagagaggccgggaccccgagggacgcctaggtgcgtgtcccgaagcccgcgtacctccagccccggcgagacggcgcccaactcgcggctccagtcacacggcccttcctgagaggaaacaccagggaaagcacctctcacttttctcagggtgggaaaactgtgaaggaagaagacaaagcaacaggcaggttttcgctcgcgggctggaggctgggcccagggcgggcgcgcggctgcgggaggcagcggacggtccgggccgctcgagggctgcactgcgagggtctggatcgcctccagcctcccccggaggccccgcccctgccctggagaccccgcccccgcctcggaggcccagccacctcccccctccccgaggcgtcggccccgcctctccgccctccgccctccgcccccggggcccgccaccgccggcccgcctgcgccgccttcgctttgacgttactgggggccgggcgggcggctgccgcgggctcgcagcctcgccagcctccgccagggtgcgcgcgggccgccgcctctcggcagtcccgggagctcaacaaagagcacgcggcgctggccgccggcactcgcgccctgaggctgcggccccggagcgcccggcggcggtttcggcgcgcggccgggctggcgatggaagatggaaggaaggagcgcagcggtgagctccggggccggggcgcgggcgcggggtgcgcacgcggcgccgctgttcgacgtggggtttgtgttgcttt

SEQ ID NO: 40065 - DNA, 2300 bp, Homo sapien
tgaaccaagattgcatcactgcactccaagcctgggcaaaaagagtgaaactccatctcaaaaaaaaaaaaaaaaaaaaaaattcgaattgtctacttttgaaattaagggaaaaacatctaccttttctcttccagaccatgccaattaaaagaggaaattccaggagtcagcagaaaggaaacaaaaagagaaggtgatagaggagaggggagaccaagtgaagaggatggagaagaaactataaaaataagagaagaagaagagttcatggcaaatataggaaagagccacgagacaagaaggatggaaatgggcagatgagagaaaagggaagagagtctgggttctgagttgtttgcattatttgtgtacagcgtgcgttcctttgggctgtcaatattatttcaagatagaagcaccaaggtgtttccttacctaatctctgaagtggcagaccatcatcacttctgccgggttctattggtcaagcataccaacctttacaaagtggcagggagctatgcaaggatgtgaataccaggaggataggatccctgggaatgacttggaaggtaggtggcatggtgggcagaacccacagcctagggtgagatggcaggaatgtggaattccagtaccttaatgtgatatgaactgatctgagtgaatgtgtttgaacactcaccacatgccaagagctcttctaatctctttgcatgtagcatctcatttaaccctcttgacaacttaccgaggcagacactctttatctagaggaggaaagtgaggtacagaggttagtagcacagtgataaagctgttataaggaaggacttgccaggacctggagagagactgggtgtgaggaaggtaggctgtcacagtgtcctgtgggatttttcctaactgataaaccaccctgtatggttcaactgatgcatccatgcagggctaggattcattctgacctcgtcatagcagctttccaggggccaatcccactccagcctaaagcaccccatatgctatcatttaaactgcagtaggaactaagccttacaccagaaattcctccctgatgggattcctggaattgttcctaaatagctgggtcttatttcctgacaatgccgcctgccccgaggcttgatgtaactctgcacagcttctgcagtttggagaggcagggaaatgccattttgtgtttgaatccagcaggtcaggctcctaaagaggtcaggtagtccgtggagaggactactggtgtttactgtttattacatctctcccaatacacaaaatctggggttcaccaaagcaggcggttttcttccacatgctcctctaggatggaaaatgccctccagtggaaatgcctttccactgtgcttctgctcaattttcctccaagatttcctctaactgtggactgccagctcctccctgacgtcttcaggcaccaagccaacctgttcttgttgcaatcctcaagactcctttcagcatcttaacttttcccccagttttctttcattttctccacctgtctgtgttgactgcggtctccttccttccagccttttccttccttcatcttgtcctacaaagccacacgtgtaccgacaagtgccaaagagtttgatcatttacttaatgtcaacaaaagaaaaaaaaaaaaagctccagagtcgccttggcctgcagcacccaagcagagtgaacaagtggggcctgcgcaccctcctaccctacacctagcaaggaaccccgagctctgaaacgtggaaaggcccagatctgcagatttaatctaagtcctgcagtccccaagagatcacagactgcagatccctgtctcatgaactaagagaggagaggacaagcctaccccggactaccgcagctcggggacagcgcgcgggccaggcggcccgagatgcgcaggccacgcagcctcgccgacgagtggccctggagagcctccaggcgcccgggtggggccgcgattgcgccccgccagtcaccccggcatgtgggcgcggcggggcggcgcgggcgggacggctacaagagctgttttgcgtccgggccggagtatttgctcagcccgcctgcgccgcttgggacgcctctgcctttccctccctcccttccccgacggcttctggcggccaagtggatgtggcgggtgatcgagccaccctgcccaggggcgcccagcactggtaggtgctgggggtggggcgaggctttggggagagtgtgcgtggggtgggagtagggggaagggaatttcc

SEQ ID NO: 40066 - DNA, 2300 bp, Homo sapien
taggaaagagccacgagacaagaaggatggaaatgggcagatgagagaaaagggaagagagtctgggttctgagttgtttgcattatttgtgtacagcgtgcgttcctttgggctgtcaatattatttcaagatagaagcaccaaggtgtttccttacctaatctctgaagtggcagaccatcatcacttctgccgggttctattggtcaagcataccaacctttacaaagtggcagggagctatgcaaggatgtgaataccaggaggataggatccctgggaatgacttggaaggtaggtggcatggtgggcagaacccacagcctagggtgagatggcaggaatgtggaattccagtaccttaatgtgatatgaactgatctgagtgaatgtgtttgaacactcaccacatgccaagagctcttctaatctctttgcatgtagcatctcatttaaccctcttgacaacttaccgaggcagacactctttatctagaggaggaaagtgaggtacagaggttagtagcacagtgataaagctgttataaggaaggacttgccaggacctggagagagactgggtgtgaggaaggtaggctgtcacagtgtcctgtgggatttttcctaactgataaaccaccctgtatggttcaactgatgcatccatgcagggctaggattcattctgacctcgtcatagcagctttccaggggccaatcccactccagcctaaagcaccccatatgctatcatttaaactgcagtaggaactaagccttacaccagaaattcctccctgatgggattcctggaattgttcctaaatagctgggtcttatttcctgacaatgccgcctgccccgaggcttgatgtaactctgcacagcttctgcagtttggagaggcagggaaatgccattttgtgtttgaatccagcaggtcaggctcctaaagaggtcaggtagtccgtggagaggactactggtgtttactgtttattacatctctcccaatacacaaaatctggggttcaccaaagcaggcggttttcttccacatgctcctctaggatggaaaatgccctccagtggaaatgcctttccactgtgcttctgctcaattttcctccaagatttcctctaactgtggactgccagctcctccctgacgtcttcaggcaccaagccaacctgttcttgttgcaatcctcaagactcctttcagcatcttaacttttcccccagttttctttcattttctccacctgtctgtgttgactgcggtctccttccttccagccttttccttccttcatcttgtcctacaaagccacacgtgtaccgacaagtgccaaagagtttgatcatttacttaatgtcaacaaaagaaaaaaaaaaaaagctccagagtcgccttggcctgcagcacccaagcagagtgaacaagtggggcctgcgcaccctcctaccctacacctagcaaggaaccccgagctctgaaacgtggaaaggcccagatctgcagatttaatctaagtcctgcagtccccaagagatcacagactgcagatccctgtctcatgaactaagagaggagaggacaagcctaccccggactaccgcagctcggggacagcgcgcgggccaggcggcccgagatgcgcaggccacgcagcctcgccgacgagtggccctggagagcctccaggcgcccgggtggggccgcgattgcgccccgccagtcaccccggcatgtgggcgcggcggggcggcgcgggcgggacggctacaagagctgttttgcgtccgggccggagtatttgctcagcccgcctgcgccgcttgggacgcctctgcctttccctccctcccttccccgacggcttctggcggccaagtggatgtggcgggtgatcgagccaccctgcccaggggcgcccagcactggtaggtgctgggggtggggcgaggctttggggagagtgtgcgtggggtgggagtagggggaagggaatttcctcggaggttgcatgggtgcatgggaggcgcaggggccagagcgggcgggcggaagcctcacccccgcctccaccccttcgcggcgcccggggcgggctcaggtgcggggttgggcggcgagagcggccgcggcgggtgtccggtgtccggtgtccggtgtccggtgtctggagccgctggctaggtgagcggcggtccccggggcctgggggcttgcagggggtggcgggggaacttcgagggagagggtctgccggggctgaggaccttcggggaagtt

SEQ ID NO: 40067 - DNA, 2300 bp, Homo sapien
gcactggtgcccagccccatttgggcatggtgggattgaccttcccctccttacctggaggccacatttgctgtttctccacagtgaaaacagtaaatgggaattctttggtagtgcagagtctgagtctgttccctctgcccagcgtctctgtttagaacatactgcaggagtgtccactgtaccaagaagggtagaaagggtcaaaagaaagcacgagcctggctttgagcagcctgctttggtaatgtatcccaaggccacagtacaaaagtcaagaatacgttggacagaagacaccttaattggaaacctcctttgacttagtgtgagaggacaagacacaatcccagtgtggatgttttgctcatcaaacagggcccagcacacacaccagccaggtgccctcttccatgcagtcagcaccactgctagtttggggtcttgactagaggtccacctttggcccacagttgccctgggtaggcctgacagactcagggatggtctctgttggcctctcctaggtacgctccacctgcccccggtttaagggagcatgaccgatgtggccgcatttcaggagcactaggatataatctaacctggaggccaattgtaaacaagggttatttaagtagcttcaccaagtatcatactacctggttatattatcttctcacaggctggtgtgaatctctgaggcagccatataagtaaataataggctagcaatgatagcagttaacctctattgaactcctgttatgtggcaggcactaggggaagaacttggcacaggtagcctgcctgcccacagcaaccctaggtagtaaatattggtattcccattttgcagatgaggaaattgagtctaaagagtttaagaaagttgtccaagtcacatagctcgtaagtgacagggctaggatttgaactcaaggtggtctaaatctaaaatacctccttatctgaggcaagaggattgcttgaagccagaagtttgagaccagcctgggcaacaaagcaaagccctgtctctacaaaaaattttaaaaattagctgggcatggtaatgcatgcctgcattcctaactactatgagctcaccactgcactccagcctgagtgacagagcaagacaccatttctaaaataaaataataaatacaaataaaatacaatataaataaaataataaaacctgctttttacccacctatgaagcctgtgaatgtagtacaaatgccacacccttgagcagctgtggaattctgggttacagggagatagttagatgtaagaatttatggtgtgaagtgctagctctgttaccctaaaggataatgcaaacaatgaatgcttgcttcccatttcagtttcttcatttataaaataggcacatgcagccaggcgcagtgactcacacctgtaatcccagcactttggcaggctgaggtgggtggatcacgaggtcaggagttcaagaccagcctggccaagatggtgaaatcctgtctctactaaaaatacaaaaattagctggtcgtggtggcagatgcctgtaatggtgaaaccctgtctctactaaaaatacaaaaattagctgggcatggtggcaggtgcctgtaatcccagctacttgggaggctgaggtggggaacggcttgaacccagaggcggaggttgcagtgagccaagatcatgccactgcactccagcctgggcaacagtgtgagactgtcaaaaaaaaaaaaaaaaaaaaaagcacgggcaaaaaacatacccctaatatttttaaaacaaatattttcactgaagctgcctctcactgccaccactgccattgctacctacagatgttcctgagcagttggaagttctttgtctcatctgatatatatatatatattttcaaagacccaaaatactttagtgatggaaacagtaatctgtgactaaagatatttgttcaatctgaattttttgtttgtgtgtttgtttgcagagaatggcaaatcggttcattggaaacttggagctgataaggaagtctgggtatgggtgatgggcgaacaccatctagataaaccctatgatgtgctctgtaatgaaattattgctgagagggcccggctgaaagcagaacaggaggcagaagagcccaggtatgagatctgcaaaccaaccagagacttaaagactctccagactttagaaaacattgcaaacacacctcttgctcacagtatcaggtgggagagtagggttgggttggagggtcacaaaagtcactttgg

SEQ ID NO: 40068 - DNA, 2300 bp, Homo sapien
agctacttgggaggctgaggtggggaacggcttgaacccagaggcggaggttgcagtgagccaagatcatgccactgcactccagcctgggcaacagtgtgagactgtcaaaaaaaaaaaaaaaaaaaaaagcacgggcaaaaaacatacccctaatatttttaaaacaaatattttcactgaagctgcctctcactgccaccactgccattgctacctacagatgttcctgagcagttggaagttctttgtctcatctgatatatatatatatattttcaaagacccaaaatactttagtgatggaaacagtaatctgtgactaaagatatttgttcaatctgaattttttgtttgtgtgtttgtttgcagagaatggcaaatcggttcattggaaacttggagctgataaggaagtctgggtatgggtgatgggcgaacaccatctagataaaccctatgatgtgctctgtaatgaaattattgctgagagggcccggctgaaagcagaacaggaggcagaagagcccaggtatgagatctgcaaaccaaccagagacttaaagactctccagactttagaaaacattgcaaacacacctcttgctcacagtatcaggtgggagagtagggttgggttggagggtcacaaaagtcactttggatctctttggaaggttgatttagacttttggtctaaagaccttttggatctctttagaaggttgatttagacttttgatctaaagtctttgatagcactaaagacctcatgaaaatctttagtgctgtcaaatcagctgcttcatctccctgcttgtcattccagttttgatctgtatgagtgtatgagttccccagtgatcacccgtggctgcactagagtcatgttagagcaatgcaggccgacgcagctgagtatcaggaacatatgtgagaaatgcagtgactgtgcaagcttcaggccttccaaggagatcacttagatacaggcggctggataatcaggctctttaggtgcctacccagtgcaaggtactgggaattcaaagagaaacagggagcttccagtctaggaggagaagtagacatatgcacagctcactgcggccagtgcaggctgtgatttgtgctataattaaggtacaaacagaaagtttaccaagcataggtgggaacctatcattctgatccacagacgaggtgaaatctgaaccaaaccttgaaaggagtggttttccagctacagaaggccaggaaggaaagtgcaggcagagggcttaaccaagatccctagacttgactacggatggttctttggggaatgatgaggtcttctgagcatttggaatacacttggacaactgcttcagaggccagatttaggagtttggaacttattctctggacggtgaggtttttcaatagggaagtgacatcaactgcagatgtaggaaggtaactcggagggaaactgaggcaggtgatggcgctcctctgctgggtacctggggtgctctgggtgtcctcctctggctctgggcagtgatgttgacagccttaccctgaggtggtgaagtggaaattgggacagacatgaggaccaccgttcagttcccaagggctagggatgcaaagcagactctgtggcacagtggatggtgcattggactttcaagggctgggatgctgcccactagtgcctgtaactttaaaactatccatggacatatgaagataaaggaattatttaatcatcgattggaagcagacggtgtggttctaataggttaacttctaaaccaggagttgagcagaccagggttcagatcttggctgtaccactatgtggtcttggatgaattacaaaatttcttggagctcttataacaaagtgaggatgacaatgccttcctcacagggttgtgatgaggatgaagttaacgtctttacacacctagcaaagggcccagcatgttagaagcactcagtaagtggtgtcagttactgtttttcacataatttgaatgtcgacatatgctttggaaaggctcttcctgttgaagaatgttttttgagaatttcacttttgcctctcttcagaaaaactcactctgaagaattcaccaatagcttgaaaacaaaatcacagtaccatgatctgcaggctccggataaccagcagactaaagacatctggaagaaagtggcagaaaaggaggaactggagcaaggatcgaggccagcaccaaccctggaagaagagaaaatccgagtgagtccttactgtctgtagacgt

SEQ ID NO: 40069 - DNA, 2300 bp, Homo sapien
ttatgtacctttcaaactgtattccattgccgtgtcactgtaactgaaactccacacagtgtcacttgtcagatttctccctggagattgatttctgtagccagtcagtgactgggaggtgcattcttggttcactgtggggattaaggagacatgaatagaatccatggtactgtcattcaccctcatcctgggggatacattccaagacaacagtggatgcccagaagcatagagagttctgaaccctagctattgtatgtttttccccatacatacatacctgggataatgtttaatttataaattaagcccccagaaagagattaacaacaataaccaataacaaaagagaataatcataacaatataaggtaataaaaggtatgtaaacatggtctctttctctctctctctctctgtgtctccctgattctctctcactctcaaaaggtattgtacttcaggtaactgaaatggcagaaagtgaaactagaaaatggggactgctgtataacccaaaagcttttctgatttgttgggttttacctttgtaatgtgtgtgtgtgtatgtgtgtgtgtttcctgactgtagagaaaacattcataataccagagacagtggaaggaaatggatctttaggcatgagggaaatcatttgatccttacattgggaaattctgtcacctagaccctagggaggcttgttctgagagggcagctgagatgctgagttcatatcttcaacctgacaagtgacactctgtggagtttcagccacagtgacatgggatgagacacagtttgcacggtccctagacttctctcctgcctctctaccttctcagagaaaggggagttgtgaagatggctaacatttatcgagggtttattgcatgccttgtactgttctaacttctttcacatacaaaaacattcactcctcacagtaacctttggggaaaatgaggcacaggagcatgaagtaatttttcaaagcaaacctgtggggccaggatttgaacccaggcagtttggcttgatagtttgtgctctgattccctgagtcatgctgtttagagatgggaaggaagatatgaaactaaatatcatgtattgataccactgtactgaatattttatgtgttattttaatgcttctagaagcttccagagggtcccccaacccatgtgaccagaactgagctactcccaggggtcccaaatagattactatggtcagttcatctgaaatggacataacttctttcctttttttttttttttttttttttttgagataaagtttcgctctgttgcccatactggagtgaagtggtacaaacttggctcactccaacctctgcctcccgagttcaagcgattctcctgcctcagcctcccaagtagccagggttacaggcgcacaacatgacgctctactaacttttgtattagtagagatggggtttcaccatagtgaccaggctgttctcagactcttaacctcaggtgatatgcccacctcagtctctcaaagtactgggtttataggcatgagccactgcgcccaggctgaagtggtttaatttctaagacataattttattgctgatttttaaaattaagtataattattttaatattcttcaaatcatattgcaggaaatttggatactagaagaaaagaaaaaaacacataatcccactctatatcatagtcagtcttattttggcctgtttcctaaaaatccttttgcaaatgcctctgtatcctatgaatacagtttgtatccagcatttcaagctttttcccatgtttttatgcagtcttcataactgtgattttaaaattcatgctattttgacttcttttggaattttttaattgggagcattttgaattttcgaataattgttggagagatttcatcttaaacactttttaaaggcattctgtgctagatctcggttgaaaaacactcagcagccaaggttaatttttagaactatctttccttgtttttctcttaacagggatctaccgaacagaaagggacaaagggacattgtatgagctcaccttcaaaggggaccacaaacacgaattcaaacggctcatcttatttcgaccattcggccccatcatgaaagtgaaaaatgaaaagctcaacatggccaacacgcttatcaatgttatcgtgcctctagcaaaaagggtggacaagttccggcagttcatgcagaatttcaggttggtttgttcgcacgtgtttatcttcctccgcatgatgtgtgt

SEQ ID NO: 40070 - DNA, 2300 bp, Homo sapien
ttctctggggaaaaaaggaaattttttattttttaacatttcatttcatgaaaccgttttttttaagtggtggcgctgaacacagtccttgcagaggggggcagcactttccctcctgaccccaacctggaaaccccagtgtgacttcagcgctgtcagagcattggaagcagagctgcgagttaggaagcggctcgctggcagctgggcacgtttctttcctgcgagatcggcttttttgatttgctctttttcacatgaaaatgttcagcttcatttttagacacctttagacatggttatcactgtttaaagccttgatttttttttaaacaaatagtttgcattttattcattgaaacagggagagaacaaataccatcctgctttttggggtaatactttcagatgcattgtattttatatactaagtgatttaaaatgttcccattttgtaataccacatacatttaagacatggaaatttacaagggttgccttttgtttttattttattttagctgccttcctatttcaaggaaagacgccaaggtaattttgacccagaggagcaatgatgtagccacctcctaaccttcccttcttgaacccccaggtaagtgagcattttcactcaagaaacaaacctttgcatggtctgctttgtgttcaatattctggatgtgtttgaaatgtatgaaatttcattctactgtcaatagcttgattagtaacaagttattacttcaagagaatgatacttcttccaaaataatacaattacttggctccattgaatccttttcattcactttttaaaggctgtaacatctacatctacatctaactttcccaactttttaaggatttatctcttctcagagtggcaagtgacttaaaccaatcatagagctggaagagctacatctttttgaaacagttcgcttacatagggacatttgttctcccattggaaattgggacagaatactgagctttttaaaatagtcaccctgtcatcaaataggtactctaattttgactttgctagaaaataattatttaaataccatggttttggaaattgaagaatgagctttctttctgacatatggtgtcttagagggacactgtctagagctctttgagaatagtgcccttacggattggaagcttggttttagtccggggacaaatgaaaatctctggaatgttgttttagttctgctcttgtaaccagtaattttgagtttctatgcaataagatgttttattacatctgataagactaaacttaaaaaatacaaaataaaacaagtactgtaaaatatcattaatgttgacatgcgatggtatgaaacaggaagctgtatatatggttccaagcttcagcagagagtcttttttttttctagaagtaattcaataggcataaaaatgaaaataggtaagctgcactcagcatatacatatcttcagaaagcccccttcaccttcctccttcatttaacaaatgtctatagaggtttgcttgatggttttgctttttttttttttccaaaaacttttgtcacactattaagataaaataatggaagccagagtagttaatgatttgattttgcattaatgaactgccctgtacttaaatgagggtgtgtggagtttcataaagaactgtatttcagttactaacaatagaaaaaataaaaaaaaccttggctgaaagttaataatacaaacaaaaataactgaaggagaattcctcccaaatcctttcctaagtagaaagtcaagtggttaagaggcttaagtaattcagggtcaacttgaagggcgtatggaactgtcctaatcttgggccttgtgatgtttaatgtttttgagaattacttggatgatacaaaagagagcaatgtcattacaaccccatgtagaccataattagtaagaccttgagataatgccagaaaacagtcaaaataaactttacaaaatagagaagtaggctgggtgcggtggctcactcctataatcccagcactttgggagaccgaagcaggtggatcacaaggtcaagagttcgagaccagcctggccaatatggtgaaaccccatctctactgtaaatataaaaattagccaggcatggtggtgcatacctgtaacccagctactagggaagatgaggcagaagaatcgcttgaacaggggaggtggaggttgcagtgagccaagatgacgccattgcactccagcctgggcaacagcaaactctgtctctaaatgaatgaatgaat

SEQ ID NO: 40071 - DNA, 2300 bp, Homo sapien
cactgcaagctccgcctcccgggttcatgccattctcccgcctcaacctcctgagtagctgagactacaggcacctgccatcgtgcgcggctaattttttttttttttttttttaaagtagagacggggtttcactgtgttagccaggatggtcttgatctcctgacattgtgatctgcccgcctcggcctcccaaagtgctgggattacacgcatgagccaccgtacctggccgccccatacttaatttcaaagaatcatacatgaaggctaagtcctgtaggtgaaggtgtgttgcaaagtcaacagagcaaaggctcgctttcctttgtagagtttggttttgaaagttagaaagatcctgacttcaccacgtatgagcctagtaggttacttaacacctttgagcctcatttctgtgtttgtaaagtggaaatattaatgcacatatccatagcattgttgtggttggaatgagttcatgtgtaacatagcttgtgtggtgtatggacacattatggatgtgctgttgatgttccttctcttttcttcctatagagcgtctgtccagttgaacatacccacttctcattagctggtagtatacctgcaggtcacctcctggaattttccaagatgctattccccttccaccctgattaccaagggggtcttggcagtgggtttgccttctagtctcttcatttttcagttactagcttgagatgactcttctctggaggaatatgatgcttggaacggctaaggagacatgtactttccagagctgaagagcagacttttaataagtaccttcactggaaaaagagggaggagctgagccatgccgtggctccgaacctgcagtttggtattgctagtaccacacactccagggctcgatgtatgttactgtgtgtagatgagaaaactgtgaacagttcttcaagttgctggagtaagaaagtacaaattagattattaatgattatgtggaggtaccagctgacagtctatttgttttcattgttaaaacaagtgtggttttggattatgtagatttcccccctttttacttagatggccaagggtattcatgaaggatatccataaagaccatgccagtgatggagcctccagatctgctgcctgcaagctaaaacacagaaaagaaaatttaagtggttgggaatcagaatgtgagatggattggaagccaaattataagcttatttcaactcttggcctgcaggcgctgaagtaacattatttgttgtcggggacagaaaacaactcagattcgggtccaagtgattattccacttaggcattgctgcgttgctgccaactgcaatttggtgtagacatagattgattggccaggcagaggcggaagtgggtggtgggagccgcgcaggcaccgcagtagaggaccgagttggggccaagagctggccctaggcagtcggcaaccctctccaacagtaaacccacagtgaactggggtgagagtgggtgggtacaaaatagactctaaacctctatagtgatacacctcacacttcagctgactttgttcatgtcagtgagtcagagaaaacctttggagaggtgtttggaggccatccccatggaggaactggggaccagctgtctttagacctgagacttagcaattttcctttggcgctttctgggcctgtttttcttttctttctttctttctacttttttttttttttaattcctgcatgtgaaatgggagcaattctgtgtgtgtgtgtgtgtgtgtgtgtgtgtgtgtgtgtgtgtatacacacagtaatagcaaattgtatgtttgtatatatgaatatatttgtgtatgtatgtatatatatatataaaaatagcaaatacatatatagatggatatttgctgttattcgaataataaagacagatgggataaaaatcctgacaactcgggaaggaggactgtgccttcgttaattgaagacaacattattgacatgaaattaactggaagggcttagtccctttccagagtattttccccttgcccttcattccagagtattttgcttgcacctctttcccattctgcttttatctagttgacacatcggtttcctccattgatattcctaaaaggaagggacggctggggcccgttgtcactccctgcaaggcgcaatctccaggcaggggcagggcaggtctgggggcttcacgccccccagggagcgggtcacccggtgggactcgcgcccgccctctccttgggtgtcgtgttccct

SEQ ID NO: 40072 - DNA, 2300 bp, Homo sapien
cagcacagggaggggccctgctgtttaagcttctttggcctcccaggaggagtgggagggagggtggctcgataccttcagggagcaatccctgggtcccaggggagtgaggaggggaggaggcatctgttccctttttctctttggaactgagagccctggggttatggggagtcaccccagcaggagtgagacaattcctatcccactgcaagatagtataaaatatttattgatattttattctcataatcttatgtttatttttattaggtctacagtctcatatggtgaatgtttgggagcagagatagttattttccaaatcttaacccgttgcttcaatacctttgtcaatgaacgtaccttttcccattgatttgaaatgccacctttaccatataataaattatttattcttagatctgtttcaggattttctgttctcttgcattgatctgcctgtctgttgctagattattactgaatcattgagctttattatgtattttttttttgagatggagtcaagttctgttgcctgggctagagtgcaatggcactatctctgctccctgcaatctccgcctcccaggctcatacgattctcctgcttcagcctcccaagtagctgggattacaggtgtgtgccgccatacccggctaatttttatatttttagtatagacggggtttcaccatgttggggatgttggttttgaactcctgacctcagatgatccacctgccttggccttccaaagtgctgggattacaggcatgagccaccactcctggccttactacatatttttatatttggtagaatgtggtcttgccctctgtccctcaatagcttttccttaaaaaaaaaaatactttcttgacttttcttacatttattacactatgaaagcttaagaatcatttttgccaagctgtagaaaaaatccttttgggatttaattagattaatattcattttacataaattttgaaagacttgagatctatataataaattactttccaggtatatggtctgtctattccattttcctttcatgtgcttggtattttttgtgtgtttttggcaaatttttaatgttcagttctaggtagttatttttaatatcagttacgaaagggactgtatagccctcttccacaatcttttctaactggctgccattggtgtgtggaaaggctatttttaaaagaacttgacaccttaccaaactcttagtaattctaatggtttttaaattgtcagagctttttttgccttgcttctactttctgaaacccatttttagagtggtttctcatgaccaagatcctgataaaatgccatgacaactggcccccaggctgtgggaggtggcgagggtcatgtggctataggcaggcttcctaatcacagtgatcgtggttgagcaaagtagagtaaaggtgatgccgcacagaccttgtagaattttacacatcgtggaaaagcctgaccaagtgtgaactctgtagcacagattgaaccatagcacagatcaaatcctaacacctgatctgacatttcattccattatgtcctgtgatcgcacacagttgcctatctgttcccgtccatcctgtctggcaatggcaaatcacggtctccagggtcatttaaagggatgctgtgttcagggtgaactcgttctacctgctctttggtttacgaaggactgcagcgaagtgaactagcgatggataagtacaggtaattgggatttcatatatggtcatggggttgcttgacagcggtctgcagttggacctgtgagggctgctgactgcagtgtcctggccctgattgcagaacaggatagtgttatctgtgctggccggaaaggctgcttaaaaccagacctcaaacttgggcagacgggcttgttctgggatccgcagccttgctcaggctgtgcattggtgtggccccgaattgcacggaggtgagtaacccaagacttgtgtcaatggcttccttgtggttttggctgttgttgcctgaatattttacacaatctttgggctctgaagtcccagtgtacatcagtgagtgctctccttaggtggaaaccctgggagtagagtactgacagcaaagaccgggaaagaccatacgtccccgggcaggggtgacaacaggtgtcatctttttgatctcgtgtgtgggtgagtggcagagggaagtttcctttattgggtgtgaaatttgctgcaactttctgtttggggagtgctgggagctgttttgtttctaa

SEQ ID NO: 40073 - DNA, 2300 bp, Homo sapien
aatatttacttagaatgagaaaagaaaagtgaacaaatgactgacactttggagattcacgttctttttttcttctgagctctttttaggtggttggccagaaaggcttacacggagaggctttttgattggaacctggcttttcttccctttccagaactccatgcactcccaggggcagcacagggaggggccctgctgtttaagcttctttggcctcccaggaggagtgggagggagggtggctcgataccttcagggagcaatccctgggtcccaggggagtgaggaggggaggaggcatctgttccctttttctctttggaactgagagccctggggttatggggagtcaccccagcaggagtgagacaattcctatcccactgcaagatagtataaaatatttattgatattttattctcataatcttatgtttatttttattaggtctacagtctcatatggtgaatgtttgggagcagagatagttattttccaaatcttaacccgttgcttcaatacctttgtcaatgaacgtaccttttcccattgatttgaaatgccacctttaccatataataaattatttattcttagatctgtttcaggattttctgttctcttgcattgatctgcctgtctgttgctagattattactgaatcattgagctttattatgtattttttttttgagatggagtcaagttctgttgcctgggctagagtgcaatggcactatctctgctccctgcaatctccgcctcccaggctcatacgattctcctgcttcagcctcccaagtagctgggattacaggtgtgtgccgccatacccggctaatttttatatttttagtatagacggggtttcaccatgttggggatgttggttttgaactcctgacctcagatgatccacctgccttggccttccaaagtgctgggattacaggcatgagccaccactcctggccttactacatatttttatatttggtagaatgtggtcttgccctctgtccctcaatagcttttccttaaaaaaaaaaatactttcttgacttttcttacatttattacactatgaaagcttaagaatcatttttgccaagctgtagaaaaaatccttttgggatttaattagattaatattcattttacataaattttgaaagacttgagatctatataataaattactttccaggtatatggtctgtctattccattttcctttcatgtgcttggtattttttgtgtgtttttggcaaatttttaatgttcagttctaggtagttatttttaatatcagttacgaaagggactgtatagccctcttccacaatcttttctaactggctgccattggtgtgtggaaaggctatttttaaaagaacttgacaccttaccaaactcttagtaattctaatggtttttaaattgtcagagctttttttgccttgcttctactttctgaaacccatttttagagtggtttctcatgaccaagatcctgataaaatgccatgacaactggcccccaggctgtgggaggtggcgagggtcatgtggctataggcaggcttcctaatcacagtgatcgtggttgagcaaagtagagtaaaggtgatgccgcacagaccttgtagaattttacacatcgtggaaaagcctgaccaagtgtgaactctgtagcacagattgaaccatagcacagatcaaatcctaacacctgatctgacatttcattccattatgtcctgtgatcgcacacagttgcctatctgttcccgtccatcctgtctggcaatggcaaatcacggtctccagggtcatttaaagggatgctgtgttcagggtgaactcgttctacctgctctttggtttacgaaggactgcagcgaagtgaactagcgatggataagtacaggtaattgggatttcatatatggtcatggggttgcttgacagcggtctgcagttggacctgtgagggctgctgactgcagtgtcctggccctgattgcagaacaggatagtgttatctgtgctggccggaaaggctgcttaaaaccagacctcaaacttgggcagacgggcttgttctgggatccgcagccttgctcaggctgtgcattggtgtggccccgaattgcacggaggtgagtaacccaagacttgtgtcaatggcttccttgtggttttggctgttgttgcctgaatattttacacaatctttgggctctgaagtcccagtgtacatcagtgagtgctctccttaggtggaaaccctggg

SEQ ID NO: 40074 - DNA, 2300 bp, Homo sapien
aaaaaaaagttgtcatggagaagaacatgagctaggcgcctcaagtctccagtgagtcaagatcatggcaaggaggccaaaagatgtaaactcacttggtgtgttacctcccttctgtactttgagatgccagcataacactgtaggagaaatgtttagctggggaccattcaaaatcaagaagctgactagaaaataaccacaaaccttacgttgtattctggcaaaaagtctagaggccctctcaaggttggcatctaaaatacatacagaggctgggcgcaatggctcatgcctgtaatccgagcactttgggaggctgaagcaggaggatcacttgagcccaggagttcaagaactgcctgagcaacatagggagactgtgtctctacaaaaaaatttaaaattagccagatgtggtggcacacacctgtagtcccagctactccacaggctgagacaggaggatggcttgagcctgggaggtcaaggctgcagtgatccatgatcgagctgctgcactcactggcagtctggatttcagagcaagactgtgtctcaaaaacaaacaaacaaacaaaaacagaatttccttatttagcctctaaatttaaaatcttaatttacaattgttattccacagaacactaggctcaggaacaagtgtggagttgtttttttatttttggtaaagaccaaaaccagaaagtttaatgaccaaatcagtcatttttaccatttgaaaattcttacacttcatatattaacatcaatgaaataattttaacaattcaagctagcaatctgcttttatgctgtacactttataacataaaaattatcctactccgtttaaatccaattttctaccatcttctattctacaaacccaaaataactgtatcactgagtaatcctggcccataaagtaatcatacagttatgctgttctgtgcataagtaggagatattaaacagtgcttcgaagcccagcacggtggctcatgcctgtaatttcagcacttttgggaggcgaaggagggcggatcacctggggtcgggagttccagaccagcctggccaacatggtgaaaccccgtctctactaaaaatacaaaaattggccgggctagcgcgtcgtggtggacgcctgtaatcccagccactcgagaggctgaggcaagagaatctcttagatggagaatctcctagatgtttttcatctcttagatggaaaacaaatctggagttttggtgaaaaggacattgattgtggctggaggagataattataataatagcgtagttatctttctgtgggtttcacgtccagaacatttaaaacatataaaacccttgctgggtcagggttttagtcatctttgcagctcccacggacggcatccaccaaagcgctttccaagtacttcgttgctcaataaacgtttgttggagaaaccggtgcataaaggtgaaataataaaacgtggacggatttcggaaagagaaggaaccccggagctcacgctttgcacgatcacccccaccagccccaggagttttcgcgtaaatcgaagcccggggagtgagtcgcaggcagcggcccccggggaaggtgtttcaggccggcccgggtggagagtgcttcccgccgcctccccgaccctctgctgttcctctcaaacttcttctcaaccttccacgccggggggacgcccagggaccgcccattccccgggaccgcccgtctccccgcccccgcctccgcccccgcccccgacaaactgagcaatacccagagaggatggaaatggcgaagaggcctggcgcctgcccgctcccgcgcatgctccctgacttcaccaaggtcacgctgcagcccgcaggaatgaaaatccacttctccgcattttcgaggtgacctggaagcggttcaactgctctggcttctcagaagaggaggggaccgggcggtaacgaggagccaaggggaggagactgctcgcaaaacccggaaaagctttcccgatccactctgccagcctccgtgcgcctccagacatgcgcagtagcctcccccgcggtggcggcggcggcggcggtggctgccgtggcggctgagagtccagagccggacgttccggccgcttcgggctggcggctggagagcgctcgggtcatgtctgcccagggggactgcgagttcctggtgcagcgagcccgggagttggtgccgcaagacctgtgggcagccaaggcgtggctgatcacggcccgcagcctctacccggcagacttta

SEQ ID NO: 40075 - DNA, 2300 bp, Homo sapien
acgttccggccgcttcgggctggcggctggagagcgctcgggtcatgtctgcccagggggactgcgagttcctggtgcagcgagcccgggagttggtgccgcaagacctgtgggcagccaaggcgtggctgatcacggcccgcagcctctacccggcagactttaacatccaggtgaggtcccggctgtgcatgcggccgctctgcgtggaggtgcgcgctcccgtcgcccgggctgccctggcccagagctgcgcctgcctgggggctgccgcctcctgcccggccccctgctttctcccctcccaccccctcctctctcccctcccatcctacaccttgctcctacacctttcacccgccttgctcctacaccttccaggagccctctccccagcacttgagagacggccgatcccgcttgaggtcgggtgtgcttaggtccctggggctcagcgtgccatctggcctagacagcacatgatcgccactagcaaaaggccattcgctccttcattcatcataatggcagcagtttgttcagggcctgcgactttggaaatattatcctacttaatcctgggagcctgagattgcaggtgaaccccagggtcacactctaagcccaatggcaagtctgccatgtatgtggcgctgtgtcaccaggcggagcttcactctcaggccctcccttcctgcaggagggccaacgagcgatgctggatgagctgggagccttctgggcaggggtgagtgaccagggtgcctgatgtgtgttgcagtatgagatgtacaccatcgagcggaatgcagagcggaccgccaccgccgggaggctgctgtacgacatgtgagtgggacgcttgacatcacttttactgcactgaatctctccatgaggttttgtttctctctgcagaagtgggagttgggggaagatcttcaagttcatctatatcttcgatacctaaagcaaacctagtaaggagtccaggcctgccataaattgctgacatggcttttgcagaagagtttaattattattcttatgttttatccttgttaaaacttctgtttcataatttattctagaaataatatgtgctcattacaaaaattcaaacactacttgttatagagaacaaaaagtgaaagtgcatcctaaactgaaccagagttaagttttgtaggcagtatatctatacatgtatgcataatacataaataaggttttggggggaaggggttacaaaagtgagaagaccatactacctttgccctgcagcatgtttcctttactcactctcatggaccccttcccatatcagtatgtagagatccacttcattccttttcatgcctgtgtagtatttcgtagacactctcttcttggtagacatttaaatagatagttttaaattatttgaaattatattcagtgtgtcaacaattttgtagtcatattttggtgtttttctgtggaatagattctaagacattttcatagtcaaagtttatgcgcatttgaaaatttgatacgctatgaaattactctccaaaatgtgcgatcccagtctacattaccaccaatggtgtataaagagtgtgttttcccatacccttcccaacactggatattattagtctctttttagttcttgtcactgtgataggagaaaatggtatcttgctattttaaaaaaaaatttgtactactcatactgttaataagattcagtattgtttcaactgttctctttggctgtgtgtattctgtgatttgcctttgcctattttttctttcaaatagtttgttttattcttgttgacttttagaagctctttctatgttatggttacttgtcttttcacctataaaacccactaaagacttatgtgagtactctcatttttataaatcaagtaattcttatttttacatttttattttggtttgttttggcacgtctaagcattcacttggaataaaggaaactttttcaccaaatgctaacgttttttcttttggatactgtatagactttgacattttaatttaatgtatttattttaaaaataggtttgtgaatttcccagaccagccggtggtgtggagagaaatcagcattattacatcagcattaaggaacgattcacaggacaaacaaacccaatttttaagaagtaagaataatggtgtataagttaccatttcgggaataccaaatcatatatagtaatttcacacacaaaaaagtcacacctggggtattggtaaccatatgtatgttttattcttgg

SEQ ID NO: 40076 - DNA, 2300 bp, Homo sapien
atgcctgtgtagtatttcgtagacactctcttcttggtagacatttaaatagatagttttaaattatttgaaattatattcagtgtgtcaacaattttgtagtcatattttggtgtttttctgtggaatagattctaagacattttcatagtcaaagtttatgcgcatttgaaaatttgatacgctatgaaattactctccaaaatgtgcgatcccagtctacattaccaccaatggtgtataaagagtgtgttttcccatacccttcccaacactggatattattagtctctttttagttcttgtcactgtgataggagaaaatggtatcttgctattttaaaaaaaaatttgtactactcatactgttaataagattcagtattgtttcaactgttctctttggctgtgtgtattctgtgatttgcctttgcctattttttctttcaaatagtttgttttattcttgttgacttttagaagctctttctatgttatggttacttgtcttttcacctataaaacccactaaagacttatgtgagtactctcatttttataaatcaagtaattcttatttttacatttttattttggtttgttttggcacgtctaagcattcacttggaataaaggaaactttttcaccaaatgctaacgttttttcttttggatactgtatagactttgacattttaatttaatgtatttattttaaaaataggtttgtgaatttcccagaccagccggtggtgtggagagaaatcagcattattacatcagcattaaggaacgattcacaggacaaacaaacccaatttttaagaagtaagaataatggtgtataagttaccatttcgggaataccaaatcatatatagtaatttcacacacaaaaaagtcacacctggggtattggtaaccatatgtatgttttattcttggcaaccaaagtctataataatgtcactcggttccttgacttgcttagaaccctttaagcttctttaaaggatatggatttatcagtgagacgaggaattaattgtatatatttttaacaggttttacaataaccagatagcagctatagattaaccagctctccacaaaacaggagagaagcttttagtaatttagaagctttctctttaaacttctgtatgttgctgtagtcaatcaaagatttcaaactctagataaaatagcaagtagatgcataggtcatttgaacttcaacaagcacatgctctctatctcaacctgcaacaggcattcttgtgaccattcacatacatcattgttttttgaatttgatcagtcttgcaaatattttaccattattcagcaaacatcctgtgccagatactattggctccaaaaggctgccaggttgtaggtgaaacttaactgcattgatttcacatgtagtgtttactgttctgtacatgaaaatgccttactcagcactgttgctgcagtcttttctgtccgcaagaaacttttaaaagtgaaatatgtttcgtacaggtttatttgaaactcttcctggtcgggtccagtgtgaaatgttactaaaggtcacggaacaatgcttcaacacgttagaacgatcagaaatgttgcttctacttttgaggcgcttccctgaaacggtggtgcagcatggggtgagatttgattcttccccttcttttaatataaaatacaatgggtcatcaacagattcatcggtatggtgaggagctacaaagcagaagtttctgaagagtactggttaagattgaactgaaatagaaggttctttgttagtaaagctaaaaggacattcttttcaccatattttgtaagtttccaggagaagctgttttatcaggaaaatcaccaagctctgacagtactgtttattgcaatccatatggtaaaaagtaatctttttccgttgtattctacaatgtgcttttgaatttagcgtagagtttatagtcttaacagatgcgtttttcctgtgcttctgccctatggagactattttcattctattcctgcccctttccttcatctgtaataattatcgagtgctattggcaggcatgggaaagtgctaggtatctcctatcttcctaaatcccctgaagtaaatagtatcccactttacagatgacgaaactgagcattttgtgttttagtaacttcccatagccagtgaggtgtcaggtttcaaaccattcactccattcgttcatactctgcggcttatttcccatgccattttctggcgtctggcccgggttaatcat

SEQ ID NO: 40077 - DNA, 2300 bp, Homo sapien
gcttcatcttccctcatctgtagaaggggaatattattgagtttggagtgcttttgtaatgattaaacacagtagaagatgaaaagtgcccagtgcaattagcaggccttcaatcaaaataagcaagctagctagctagctggctggccagctaaataatgcttccctacatccagaatttccagttgtttcattagatatgcacattcaagtttttacttaggtaattttaaatgtgtcccagtggcaagtgtcctgctaaaggggtactgttagcttcttctcacctaaaacttagtttgttacaaaggaaatgccaattatggaaaaagtcaagccttgagctactgaaggccgagtaacctcgccaaagtttggatgagtcgcttcactaatgcacatgcaatcctgacctagagatcatgtgagtttctgcgttagaaggcgggcacctgatggctcccagtgcagccaatcaggagagaacgttgccgccacacccacctgctccgcgctggccctgggagaggagccaacctgtcttgctttttttttttttttaaccaggctaagctgctgtaaattaagtcttcctggaaatctcagcaactctattggacgtgctaatggcacagttcactccaaactggattcatatttaaatattacatatcctccaactcttgagtgctttaattttgttatctggttagcctgggaaatcattttaaaaatacgctataagtatcagactttcccttagcaattatataaaatctccttgcagttttctgaaaggcacagaagtgcagtttgatttggttgtcttatcaaaggacatttatgcatgaaaataggctgcaggagtattctatataagatagcaggcagttctgcacgtctgtttatatgccattcacaccatgaacacatccaatgcaattgtattcatcttctgtcattttttaaaattagagtttactacatgatttttggaggacggccatatcatagttattcatcccttgcatggtctgttctgccacttctaaagttctgcgaagtttaatttttggcaggtttcaagattctctacatactttgtaggttagagtgaacgtgcacagtatattgtgtaataattgcaatacaagacggtgtgttgtgttgtggcacggaatgcatcaacttaaagatagaattgttatgcagaatagagacctttgaaatatttgggtattatcaacttttatttcattttttgagaaaaacttaaaaagtgagcccagttttttaaaaagcatttcattgttctaacctacaattgtgcattgtatgtttgtgtgtgtgtgacggagggtgggatgaataaaaggggacattaaaaatattcagaccataaatatagtagattggaggttctgatttgatgagccagtttctcagccataaactgagagggggttggggatacacttcattgtccttcctggctaatgtaaatcccttatatttaaaaagatatttaaaagtattccaagcattttggcagaaaagcatagtatctaatgttatttttttcttattttatgtgcatgcctcttatccatttaaaaatagctttactgacctataatttacacactatataattctcccattgaaagtgcataattctgttgcttttagtatatttacagagttgtgcagcatcagcataatgtaatctagaacattgtcatcaactacccccaaatctctattcttcccttcccctattaattacccagccccaggcaagcactgatctacttttggtctctatggatttgtctatttgtggacactttaaatggaatcatacaatatgtgtcttttgcgactatcttctttcacttatcataactcaatacggctttagattatttgacctcgatgttctgcctctgaacataaaatattatccttgcattccttgatgagtttgaggattgagaataatttgcatgagacaaaaattagaaactagttagagcaagtaggcttttctccatcacataagctgatccatcttgccaatgttaaaacaccagattgtacaagcacaagctgggacgcaatgtgtgtccctctatccctacattgactttgcgggggtggggatggggtgcggggtgagtgagggaggactgcaagtgacaaacaggattcgtcaaaagagaggtgtattaaagtgccgatcaaatgtaatttaacagctaaactttccctccttggaaaacaggtgattgttgagtatt

SEQ ID NO: 40078 - DNA, 2300 bp, Homo sapien
aactctattggacgtgctaatggcacagttcactccaaactggattcatatttaaatattacatatcctccaactcttgagtgctttaattttgttatctggttagcctgggaaatcattttaaaaatacgctataagtatcagactttcccttagcaattatataaaatctccttgcagttttctgaaaggcacagaagtgcagtttgatttggttgtcttatcaaaggacatttatgcatgaaaataggctgcaggagtattctatataagatagcaggcagttctgcacgtctgtttatatgccattcacaccatgaacacatccaatgcaattgtattcatcttctgtcattttttaaaattagagtttactacatgatttttggaggacggccatatcatagttattcatcccttgcatggtctgttctgccacttctaaagttctgcgaagtttaatttttggcaggtttcaagattctctacatactttgtaggttagagtgaacgtgcacagtatattgtgtaataattgcaatacaagacggtgtgttgtgttgtggcacggaatgcatcaacttaaagatagaattgttatgcagaatagagacctttgaaatatttgggtattatcaacttttatttcattttttgagaaaaacttaaaaagtgagcccagttttttaaaaagcatttcattgttctaacctacaattgtgcattgtatgtttgtgtgtgtgtgacggagggtgggatgaataaaaggggacattaaaaatattcagaccataaatatagtagattggaggttctgatttgatgagccagtttctcagccataaactgagagggggttggggatacacttcattgtccttcctggctaatgtaaatcccttatatttaaaaagatatttaaaagtattccaagcattttggcagaaaagcatagtatctaatgttatttttttcttattttatgtgcatgcctcttatccatttaaaaatagctttactgacctataatttacacactatataattctcccattgaaagtgcataattctgttgcttttagtatatttacagagttgtgcagcatcagcataatgtaatctagaacattgtcatcaactacccccaaatctctattcttcccttcccctattaattacccagccccaggcaagcactgatctacttttggtctctatggatttgtctatttgtggacactttaaatggaatcatacaatatgtgtcttttgcgactatcttctttcacttatcataactcaatacggctttagattatttgacctcgatgttctgcctctgaacataaaatattatccttgcattccttgatgagtttgaggattgagaataatttgcatgagacaaaaattagaaactagttagagcaagtaggcttttctccatcacataagctgatccatcttgccaatgttaaaacaccagattgtacaagcacaagctgggacgcaatgtgtgtccctctatccctacattgactttgcgggggtggggatggggtgcggggtgagtgagggaggactgcaagtgacaaacaggattcgtcaaaagagaggtgtattaaagtgccgatcaaatgtaatttaacagctaaactttccctccttggaaaacaggtgattgttgagtatttaacgtgaatcgatgtaaacctgtgtttggtgcttagacagggggcccccgggtagagtggaaccccttaagctaagcgaacaggagcctaacaaagcaaatttttccgtctgccctttccccctcttctcgttggcagggttgatcctcattactgtttgctcaaacgtttagaagtgaatttaggtccctccccccaacttatgattttatagccaataggtgatgaggtttatttgcatatttccagtcacataagcagccttggcgtgaaaacagtgtcagactcgattccccctcttcctcctcctcaagggaaagctgcccacttctagctgccctgccatcccctttaaagggcgacttgctcagcgccaaaccgcggctccagccctctccagcctccggctcagccggctcatcagtcggtccgcgccttgcagctcctccagagggacgcgccccgagatggagagcaaagccctgctcgtgctgactctggccgtgtggctccagagtctgaccgcctcccgcggaggggtggccgccgccgaccgtaagttttgcgcgcaaactcccctccacctgcagacccggcgggtggcca

SEQ ID NO: 40079 - DNA, 2300 bp, Homo sapien
gtgatctggtcaaagtcagtctctgacctgctgggaatagagagggaatggaaaagaggccacttctctgccatctgaaaacaggtgtttgtagattatttgctcaaattggttaatataacgatgttagaacttgagtatatatatatatatatatatatatatatatatatatatatattcccaggtttaagcgattctcctgcctcagcctcccgagtagctgggattacgggcacggctaatttttgtatttttagtaaagatggggtttcaccatgttggctaggctggtcttgaactgctgacctcaggtgatccgcccacttcggcctcccaaattgctgggattataggtgtgagccaccgcacccggccaggacttgaatattttcaccatatgaaattatctagaggattcagaatacactctgcagaagcaatacatcatcatactaaagactaggctttagaatgaaatagtcctgcttcaaatctcattccttctactaatgagttatataattttgagcaaattacttaagctgcctgagactcaatattttcatctccaaaatgggaataataatatatacatcagttttttctgggatgataaaatgagataatgcatttaaacagctcaacaaattgttcttgtttgtaatgattattccaaaaacccaggagcatagttttgttaaccaggatgatttacccttcattgacaagagaacacagaaggcaggtagtgaagacaacatagtccatctggtgaaacttggccaaagtgatcagatgatgttactctcctgtctaaatcatcctgcagcaaaccaacatgtcagcatcagagctgttggtctgcagatagacgagaggccagtgggaagctggatcatacaccctgggacaaggaaaatgattcttcctccctcccttcccctttctgccctccttccttccttcctgatacatctttctaattctgtcattcatggctgtcttttccacacagtgcctattgtgtgtctacactggatgttctcaggacttgtatggtctagacccagtttggctcactcactaattgagttggacaaatcacttttaccacagagttgaacggttaagagcataaactcagaattagtctatctggattctaaaagcctgctctaccacttactagctgtgtgaccttcagtgagttgcttaaaactctctgtgcctctgtttatccatctgtgaaaaggagatttacaacagtgtctatttcacaaggttggtgtgagaattcgatgagttactaatgtggaccactttaaactgtacctagcacaaaagcctaatatctcctcattattctaatagatttctattactatctgtaaaataaggggattgtgccatctctgaagttcctactatgatagaactaacactttgtgagtcatctgggatcctccctgcagagactgagtctctcgctacctgcctgctccctttccccacccattcaacttcattcatctttcaagtttcacagcttccctccttggcagaaattatggagctgtttcaatgtgccatcgttggttcagttaggtgacaaagatgccatctgctaggagtgtccatttgggaaatcagatgtttaacagatcacagcagtattatgttcaggaaaacaacatcatgttcctgcacaggaaggagactccaggagccttggtttggaacagggctggtacacatgtctgtacagtagttcccccaccccttattagaggttttcttttctaatatttcagttaccagtggccagtggccaatggcagttcaaaaatatacagtggcaaattacagaaatgaccagttcctaagtttcaaattatgatgaaacctcgtgtcatcctgctctgttccacctgggatgcaaatcatccctttgtccagcagatccacaccatagacactccccaccgtgagtcactcgggtgctgcctgagttatcagatcaaccatcacagtatccacagcgctgtgttcaaggaactcttattttacatggttataacccccaaccacaagaggagtgatgctgacaattcggatctgcctaagaaaagccataaagtccttcctttaagtgaaaagtgaaagttctcgacttaataaggaaggaaaaaaataacttcatgctgaggttgctaagatctatgataagaaggaatcttctatctgtgaaattgtgaagaaggaaaaagaaatttgtgctagttttgctgctgcaaaag

SEQ ID NO: 40080 - DNA, 2300 bp, Homo sapien
actgaaaaaatatatctatttgatctaatatgtattatccctataatatatgagtatgtattagaaacatgcccaaatagtacgtaatccataaatgatagctactgttattgttgctgttattcttattattgcccaacatgtgatgattcttagtctatacctgctttcccaggccctcaatttcccaaaatcatgatttcccaatttttggggggcatccccagttaggtgctgtctcggaacattcctgtgaggctgctctacccaagccctctccctctagcgccctctattggacacaggtacactatgccggaggctgtcaaccctcagagttctaacactgtacttagggtggagggcatggtggcagaattgtcacctggactccaaaaaggatactgccttatgcccagagtcttgcaaatatctttattaatacagttcctccatcttttggccctaaccccctcattccctagaggctcaggccacaggccctgcatgtaagtggggggcagtgtgccatgctccctgtagggagtggacagtggcaccccagagatgtccacctcctaatcctggaacctgtgagtatgttgccttggtagtcccctatggtaaaagggactttgcagatatgattaaggatcttgagatggggaggtgatcttggaatatctgggtgggcccagggtcatcccgtgagtccttacaagtgaaagagggaggcagaaggctcagagtcagagggagagttgaatatgcattgctgctagctttgagggtaaaagtggctaggagccaagaaatgcaggagatctctggaagctggaaaaggcaaggaaacaaccatcccccagaatctccagaaggaatgcagccctgccgacacattcattttaacccggtgtgatgtattttggacttctgacctccagaactgcaagatactaaatacgtgttgttttaagccaccagattgtagtaatttgttacagcagcaaactatagcgatgaatacattctgctgatgtctttgtttcctatccctatttctcgctctaggtttacattttaaaactgtttccatctaggccgcgcgctgtggctcgcgtctgtaattccagcactttgagaggccaaggcaggaggatcacttgaggtcaggacttcgagaccagcctggccaacatggtgaaaccctgtctctactgaaaatacaaaaattagctgagcatggtggcatgcacctgtaatcccagctactcaggaggttgagattagaggattgcttgaacccaggtggtggaggttgcagtgagccaagatcatgccactgcactctagcctgggtgacatagcgagactctgtctcaaaaataaaaaaaataaaattaaaaaactattttctttttttttagcgttaaatcgaaagttccctagttaattcccacaattaggaggggcccaccagttccacaaataggaaatctctgcactgctcttgctcgtaaagtgtatttgctttttcataaattgcttatgttctttgagccaccaatggtttaatgtcagaataatatagatcattagagcctctcaagatcccacaaggaactgcactttctcctgtagttaaccatccagtcatccatgcaagaaatatttattggatgctaccatgtatcaggcactgagccagtattgagatgtgaagacacagtgcataatctaagcctttacagaggccacagatgttgggtttttatggcttgagaacaacatacattgtttctttccaggaagctaattggggtacatggagccactttgactaagtagcaaggaacaggaactgcacactggttccatcttggcttccaatttgtattcagacccaggcaagagttaaagagttcgatgatagataagcacagatgcaaaacagtacagtccagtgcctctttgcttaggctaatatctgccctctctttatcctctccagccctgccttcctgcctttgacgcagggagctaagggtctgaatgaaccctgttggaggttgcaattaaatctttgtggacaaaggcacacacacacacacatacacagaatcctcagataacaggaggcaataaatccaacagcacatccacgttcagagaacagtgtccctgctgtcttgctaacagctgccaatacctcactgagtgcctcacaccaacatgggctccaaggtaagatttttctctctccggacaaatttaatctttccttgtgatttgtgtctctg

SEQ ID NO: 40081 - DNA, 2300 bp, Homo sapien
ataaaattctacaatcactctaagaatataattcgaactgctatctgcatagcctccaaagctgtacatgatctggccctgccctctctcctgctgctctctgcttagctgtgtccattctagccccactttccttcttctgcctcaggaccttggcacttgcaaaaccctctgcctatgccacacatctcttagagcttcccatgatctgctttctctctccattcagatctcagatgactgagaagtgcattccctgatcacatcatctaaaatcttatcttcgtctagatcactcttttctctttatcttgttttattatttttcatcatacttgacactaccaggcactttatttacatgtttgttttctgactttctccctccaacaggtatcaggatgacagagtctttgtttatttacaaatatatctccaggacttagatcagcacccgatacacatgtgcattttctcaacagatgtttgttaaataaatgttggggttaccactctacgtatacacattagaccacaactaatttctattaccagagtaaaaagttaaaaacaggttttttttaaagtaaaagccatgaactactcctaaaagaataacataaaaattgtaacaactaacagtctgatattcacatatgaaatttacctaccattgtgaaaaattggcatgagaagactagatttgtaatttttattaaaaaagttgttatgcattgtatttgaaaaaatcagtacaaacacctgttaaagcagtgaaactacatagaaagattattaaattaaaaataaaatttctcctactgttcacatgttaatctactttacatggcattttgcaattgcttttttattttaaacctaataatgtgtcttggactttttttaaaaaaaaaaactcaacccttgagcctccactgaattcttttcaaaagtttgagaaatacctttgacttaataggctataacttatgaatgggcatttagattgtttctaggtttatgctattacaaaaattttttttgaatatctgtgtgtatgtatatatacatgtatatgtctgtagaccatatataataatatataccatatggtgcatgacgtaatgtattatatataatggaaaatatttgtcacatacactgagtggatagatagatacagatatatctacagagagagagaacgataagttcctagtaccaaaatatttgaatgagatatcaccaaattgttcttctaaatatcataccaattgtgctcttatcagtaaagtattacaattcctgtttaattttacacgtgccaactttggacattagttaaacttaaaaattataatcttctgggtgcagtggctaacgcctgtaatcccaacattttgggatgccaagacggcgggatcaattgatgtcaggagttcgcgaccagcctggccaacatggtagaacctcgtctctactaaaaacaaaaattagccgggcgtggcggtgggcacctgtaatcccagctacttaggaggctgaagcaggagaatcgcttgaacccgggaggcggaagttgcagtaagccgtgattacgccactgcactccagtctgggcgacagaatgagactccctctcaaaagaagaagaagaagaagaagaagaatccattccattgctccggcctccagcctgggctgtcatcctacactagtcccaccccttacacagcttccaaatctgcccctatttttcacaccgctacgcacatcctataacaagccaatatatgtttgtcgaatggatacatgcgtgaacgaattgggtagggagtaaagtgaactaaatgatgccacatgtgttaataatcactgaaacatgttttccattgcttctgtttttcaaagcggttttcacagcttgagttctctccattcagcgtcacgaaagcccattcgaaatggatatcagctgacgttggcctgcacgcgtttgccttcctcccctcactccgcttgtgcgcctctctttcggctggctttcctctctccttccatctcccctctttcgcttcccttccctctgcgcccgcgcgcgcctcccagcacgctggtcagctcctcttgctcgcaagcaggtctggccccagcggcgcgaagtcacgaggctgggggcggccggcggcgaagggggcggggcgaggccggggcgccgcagcgcgcataggcggagcctcgggccgcgggccgccttggtatatctgcgcgtgcgcggcgtcgctgctgggccagtcggg

SEQ ID NO: 40082 - DNA, 2300 bp, Homo sapien
tactttcagcagcacttgacaacttttttttttgagacaggaactcagtctgttgcccaggctggagtgcagtggcgtgatctcagctcactgcaacctccgcctcctgggttcaagctattctcatgcctcagcttcctcagtagctgggactacaggtgcgtgccaccatgcccaatttgcctggctaattttttatatttttagtagagacggggttccaccatgttagccaggctggtttcaaacccttgacctcaagtgatctgcccaccttggcctcccaaagtgctgggattacaggcttgagccattgcgcctggccatttgacaccatttttaggaaacaatttcttgacttggctttcttaggtcttctatatcgacatcaccctgaaaaccttctctgctgctctttttcacttctcctaacctgcctgacctccagatgccgagtgctccatgttaaccatcctcaggcctctcttgtctttctgcatccgctctttggtgaccccatctagtctcatagccacttccacactcccagctctgacaagtgcatctgcagctcccagcagctgcccactcaccctcctgcctactctccatcactccctggatgccaaataggctttgcaaactgaatgtcttcaaccaaactcctctctttggcattgtccctgactcctctctttcgctcactccctacatctgatcctttagcaagtcctgtcagctcaacctcaaaattacattgaaaactgttttttagagacagggtctcactgtgttgcccaggctggtcttgaactcctggcctcaagtgatcctcctgccttggcctcccaaaatgctgggattacagacgtgagccaccaccacatctaaatccacaactaccaccctagactattagcctgtaattggccaccacttctatcccccgtctcctcaataagcttcttccccacccggaagccagagtgaccttccccaacctaaggcagatcaaggtgtcagctgcttaaagccatccaggggctccttgtctcaacccaagcaaagccagagctctttgagctgcacagcctccttgttctctgatgtctgctggctcctggtttctgtttctccttcccagccttgctaattgttctccagccaggctgcttcccatgtgggtctcacacagccaagccccctctgcctcagggactcaggcttttatacttggggtttcttctggtacccctctccccctagattttcatatgacttgcacctcattttcttttcttcttcttcttttttttttttttttttttttttgagtcaggcccaggctggagtgcagtggcacaattgtggctcactgcagccttgatccccggggctcagacgattctcccacctcaccctcccaagtagctgggattacaggtgtgcaccactacgcccggctaatttttgtatttttagtagaaatggggtttctctaagttgcacaggctggtctcgaactcctggactcaagcaatctgcccacctcagcctcccagagtgctgggattacaggtgtgaaccatcatgcctggctgccccctcattttcttgaagccttttaaaatgctaccctaacaaaagaagaccttcctgcataaaacagccacctcccagaattctgttctgtcctctctgctccagtttcccccgcagcactggtacccgcagcactggtacccgcagcactggtaccacttgctatagtatacattggtttgcttctggcctctccacaccactgtaaccctaagttccaggaatgcagggactgtgactgttttagtcacttgctgggtcccgagtgtttagagtagaggcttgcatgaagtgggctcccagtgaatgtttgttgaattatcagacaaaggaagaaggaacggagcacccggtggtggagacagtgctgggctctgacatgtgtttctctactgcccagatctggaagtcggaatcagcactgtgctgtgaccactcccacccacgctgacttctgtcttgtgtcttcttccaggtctacggctctcgcaggctctgtgagggctttgctatgacctcagtcccctcacggagccacgactgccccttgctgccacagcctttccaagaccctgcccggccctgccccatcctcagccccgagtcaccatgggcagcgtcagtagcctcatctccggccacagcttccacagcaagcactgccgggcttcgcagtacaagctgcgcaagtcctccca

SEQ ID NO: 40083 - DNA, 2300 bp, Homo sapien
attgcttttcctcaaaaccagcatttccctgagattccatagccactgtcttagtctaagttgctatcatagttcccttgggaaattaatagacctgttatatttgtttttttttttcctagctctcccaaggctaccctattgccccaaaaataaagcccaaatgtcctaacatggcagagaaggccttcatgactgggactttctgtatctttgtatcttcatgtcatccgccaccacttcctctcctcccctccccaggcctgcccgccctctattctgagactggagtttgtaaatctgtcattttctccctcagaccctgccctaggttttcccacgctgctccctaggcccaaagcccctgggactttgctcagaaggcactcttctgctatgaagccttcccgtatctgtgaggccccttctgcgtgttcttacagtgggcattaatcactctgtagcacagctgctctctactttgagctctttctcagtagatggcaagactgtttttcacccaacactgtactcccagcttcgagcgcagtaccttctggcccaagactcagtgcttgtttgttgaatgaatggataagcgtgtgtttatgcatcgtattttattttatggtgcctatgttctaccagctaccctttcccaaatgcaacaccataaaacactctacacagtgggtgtttacgaacttttcatcccttctcctcatcctagggaaccccttggaatacactaggtagcttggagcatagcggcaatcatctccatcccggtgtgtgatggaggcttctccatgtgggcactcatgcctcagtggcactctggcctgagcattgggtccgagcctgtgggcgtgttggagtctgtgggcctgagtgttagaccccccttatgtggagataagattacagctggacagcgtaacccaatggggcgtaagtgcgtgtaccagcgtcaacactcccttggtgtcgagcttttctgcactccaagctccactttgtgaaaataatctgggacacagcacaaccaactgtcctgatctgcctgggactgtgggaatttctgggatgtgggatgtcagtgctaaatcaccaggaaagtcctcgtaaagcgggatgcattggtggccccacctaaactggaagttaggatttgtacaaaagattgaattagttctcagtgacccctcgacctaacccttggtccctcactgagtgggctccttggagcgctgtgatcaaaaacaaagatagagtggctgccatgatactgtgtgtgtgtgtgtgtgtgtgtctcaatgggattacctctcaggattgtgatattcgcttcctggagggaagtctctgaagggcagtgggtgggggacagatactaatgtgtgtggaagagatggataactcattaactggggacagaaagaattatggttgggcgccatggctcaagcctgtaatcccagtactttgggagactgaggcgggtggatcacctgaggtcaggaattcgagaccagcctggccaacatggtgaaaccccatctctactaaaaatacaaaaattagctgggtgtggtggcgggcagctgtaatcccagctacttgggatgctgaggcaggagaatcacttgaacccgggaggcagaggttgcagtaagccgagatgatcgcgccactgcactccagcctgggcaacagagtaagacttcatctcaaaaaaaaaaaaaaaaaagaattgtccatatgggttagctcccagccttacttcccccacccgggagaagctttcctgcagaccccagagagaggtgggctgggagttggggaagggcctaagcaggagaaaaaatctaagaaggcataggtgagggaatcctaaagggtaaggggcaatctcggggtaagagaggagaaagagaaggaaacaaggaaggacgaggaagatggaaagtgctggtgggtccagtcctagcagcagagggaggggttaagactgggactccggagaggacctccattgtgatgcaaatgagtgactgggcagagagaaggggccctgtggggaagggtgagggtgcagggcaaggacagcagtaggagcttactgcagtgactgtatcataactgctggttatgaggattggatttcttttttgcagatgtcacgtgccggggtgaactgttattaactaaaaggagtcagggcttagctgcaagaaaggaggtatgtggttgagtgcatttcaacatgggtagaagaaatggtgtagcctgcagaaatg

SEQ ID NO: 40084 - DNA, 2300 bp, Homo sapien
tactgctgccactttctgatcgagtgtcttttagcaatttatactctgagtcacaattttctcatctgcagaatgagtgtaataatagcagccttgcagagtcatcgtgaggacccagtgtaaccatctgcatatgagatgggagcagccagcaccgtggaatgaggcaaggtttggaggggaagagctcacgacatgcttctaaacacttagctatgtgaccatgaggaactcaccacccctccagcttcatccacctcacttttcacatgagaaaagtaacaaacttgtgctttgttggaatcaaaggcggtagcaagtaaatgtaataatgcttttaaactgtcaagtcctattcagatgaaaagatacaccattgcctttctcctaagcagggcattgtgcctccatgaatacctacaatcaaggtgttcccaggccccatgtatacactgccagtgccagtgctgggggattccaaaggagcagaagttgtgggcccctcccagctggagaataacatcaaggtaacccgaagcaggatgtaagcacagtttagactgcgctgtctcagtgacatgctggtgtaaggaggaggcacaggatgtgggaaaggcccgtagatgaggccatggaggagctgaggctgcgatgggtccaggaggatgagcatcctgggtgttccagcctcaatgcctccagaggcagacaaaggctgggcaaaaggagtttgcctgagagatgcgcagatgttctcatcaagcacaagggagagagtgagaatatgagtcaggacaggcagcaaggcccagaaagggtccattgttgtgcaagccacccctgtttgtttgcagctgggctcaaccctgctgaggggccaggaagctgcggtgtatatctgctcattccagtgccacatagaattgacagtgcttcctgtcaggaactttctgacattcccttggccagagaatgttctcaggccaagagacacagagagctgaggactgcgggcaggtagcccgaggggatgtgaatgggacaccgacagcatctgctagctttggcagatgggagctagggccactccatgctaagggacagcatgaacaaaatgaaggagaagatgggttgagtgaggagctcgccaagctttgctccagagggagagagtatttgaaattgggactatctgcaaaaatcaccaaatatatgaagggcagcaaggaaactctaagaggggaaaatgggcagcagtgtggagctgctgcacaccactgatgatgggaggtgttagagagggaaatgcctcttgttctggggtgatgatgatcttgcagcaccggcctgggccggcagttggacaatggtgaccggatgagtggccagtcatggttccactcaatgctggtgaatgaactatcccctggcagtttgcaaagctcaggtccacagctgactgtggaactggaagtgccacagcacccacccctgccgccaagccgtgccccacttctgctgctaaatggagaaaggatggagcctacattagaaaccagagacctggcaaagtgggtgggacaggaggttcctggcaagcgacagacagaactacagaatgccgtaagagaaaggaaggtggttggtctttcagtcagaagtgctggctggacatggagcactgctacggtgaccagcgcagccaccactaggaacagcgactctcccagaccctccctcacctgccacccatcgtagtggctgctcctcttgaacggctggggcgagagggatactgcatgcgatggaactgataaaccagttcaaatagcattagactcactcaccgatactgtctcattgaaacacattgctcatttattcctcttcgtcatcctttgagacacagtcattattttccagatgaggcctgctcaagagcatttggctgatgggggctgaaacctctcactgcaaccaggttcatttggctccaagtcctgtgtgctctttatgaagtcatagcaaggcctggactagggtgagaaaggacaggtgcctgtgaggcaggacttaaaggaggcgctggccctcaggggcatgcgagggcagggtgagcacctgagagtgagggcctccttaaagtctgtggtccagggtcctttggtcccctaatcccagagcagaaaagaaagccttcaaatccagctgctgcctgaagagcctcagactcactcccctggggcagcaaagtgcatttctttacccacaaggccctgtagtgctgactggaagatggg

SEQ ID NO: 40085 - DNA, 2300 bp, Homo sapien
gcatttctcctccccaacagattaactatttgaaatgcacataaactgtaagtttctctcagcagagaaactggtccctagaaactgatattttccccctaaattttcttacggcaccagaactttgtctatacttatttaccataaaaacaacattgtgcactctaaaagtcaagacaggataaacaccaaaactctcacctgtaatatcaccttaaacctaacgtactcttcccagcctaacaaaatcattagcaattcttggattccctccaagtcttcactcatgcactgacttcacgtagctgtaattgttagcaaaactgatttcacgaagagcatctattcctacaaactcaggtttcaagcattttaagatgaactcagtataacaagatgaacccaagtgacaccaattttgagattttttttttttgaaacctggaaattcaaactgcagtgggctgacttggagctgcttcacctggacagggtgttgtgcccctatttaggctagaaaaccctacctttgggtaatttgatgattggttgtattggagctcagagcttgcaggtgggagtaagcttctcttgaaacaagggaaaggtcaatcctgggactgggaggggttgaaaggccagtcttggtcagctgtgagcaaaagaacttcctcctctctctaggctgaggggtagaaattgggccagtatctccacaccccgacaacttccaaatgccgctctggccacagggaggcaggaagtatccctggtgtgggacagtcctgggagggtcccaggatggctctgggcctattttgtgcttacaaattattctccatactcttcttccttccattatccgtagacttccccctcaaaccccgaaacggagtctcactctgttgcccaggctggagtgcagtgccgtggtctcgactcactgcaacctccgcctcccaggttcaagcgattcttgtgcaatagcctctgagtagctggaattacaggagtgcacaaccactcccggctattgtttgtatttttaatagaggcagggtttcaccacgttggccaggcttgtctcaatctcccaacctcaggtgatctgcccaactcctcggcctcgcaaagtgctgagactgtaggcgtgagccaccgcgctgggcctatcctcaggcttttactaaagacacttaaaggttacagcctggtctttcttatttgagttagtttccaatgactgctgaacagattcacaaacttgtcttaacacaacagaaatttgttatctcgcagtgctggaggccaaaagctaaaatcaagatgtcggcaggactgtgcttattacaacggcttggggagaatccttctttctgtctcccgctttaggcccctgtgttcttggcttgtggcagcatcactctacgctgtctgtctccacgtggccttgcctccgtgcctgttttccctcttcttctcctatgtgaacaccgtcactggaattagagtgcaccctggtaatctaggatgatctcatcttgagatgcttaatttcattactttgcaaggatcctatttccaaaggtcacactcacagattccagtcggacatgattttttttgaggcaggtccattcaacgtgctatcattgtggtgtgggaaattcaagacagaaactgcaccaccttggagacaaactggactagtggagagcagtgttccttcccctacagccagagctgggggaacaactcggcacagtggaggtctcacaaggcaccaggagtaaagcaataggcaaggctatgacagcacacccgaatcccaggacccggggataagtcgtatcttaggaatatctgcccatgaaggcagtgggccgcaggatcccactttgaggtgccagtgctgattgtcattccttccaagatggtaaaccattaggacatctggatccctccctaagatcaaccctggaggagctgcagaggagaaacagggcacaagaggaccagagagggctgtggggagcggggaagaagaaaacgaaccgttaaagttctgttgctccctctcccccagcatcctcctgggacatacagcgatggcccccacacctggaaggactcaagctctgaatccagcaccttcaggaagcaagtgatggcatcccagaggccctatgcttgagacagactgacgaaaacaggtggatctaggtaaaatcagtctctgctaccctcctcatctaaaccctcagtgcaggtgagtcaggatgcaaatgtaaggagggttc

SEQ ID NO: 40086 - DNA, 2300 bp, Homo sapien
ccagctgctgtgatgagagaagattgtcatggggtggggtatgggggcacagggcaaagcaggaggctgggagaaggaggctcttaacaggcacagtgtcggtggctcagatccaggtggcagcagtggcggtggtgagaagtgtctggattctggctgtattttgaaggtggagctgccagggtttggcagtgtatgaataagagtcaaagaagcgccgagagttttggcatgggctactggaaggatgcagttgtttccagcagggtgaggaagactgtcataagtggagggaagccccaggttttggggggaaatacggggttgggtttggatgtgtcaagtgtgagatttgggtattaggcttgcagctagaggtgttgagttggcaggtagacagataagtctggggctcagggcagaggtctcgtccgggggtataaatctgggggttggaagcacagtgatggtgtttcaggccatgagatgagtcccagggagcaggtgcatgtagagaaaaggagactgagccctgggtatggaagacgggaccagcaaagcaggctgaggaggagactgtggggaggtggcagggagcccagcagagagtggaaggaggcaggagggaggaattggctgtgtccagtgctgctgatgggctgagggagatgaggcctgtggattcctgagcatccatcagacaggtggggccaaacaccaggctgaagcaggtctaagagagaatgggaggagagcaagggacaggtggtgtagacaactcgattgaggggttttgctttcaaggggagcagaaaaatggagtggtagcttaagaggggtgtgtggtcacgaggaggtctttttttaattgaagatgggtgatgtaatagctgatgggaatggtctagaagacagcaaaatcatgatgtaggggagagagaaaaaaatgagctgtctcattcatgcttacaaaggccctatgtggtagataccagtttgcagacaaggaaactgaggcagaggttcagccatttgtcccaggtcacagagccagtaagtatcagggccaggagttgaacgccgatggctgagctctagaatgcccagtcttggctattgtgctgttctcctcttggttttctggctggagttgtgagctcttccagagtgggccctcctcttgcgcttttatatctaacacggcaccctgcagagggctgtgcagaggtaggacctgatcaatctttaatgggcaagtgattagaacaccaggaactgtgtgctgtaagtggtcagtcagtcacctggcccacgtgagagggacgtgtgacctcagcctacctcctcaccccaagtccttcccaccaccttgcgggaccttgtgtggagagagtggtgctcaggaaatactggaaagcatttgtagggtgggtgaagaatggatgaggagcttagaccaacggttctcgctggcataactgcactactgggtgtgactcgggttcctgtgctgggcaaccttgggcaggccccttgcccacacagtgcttcagtttccttatctgtaaaataacaaggttgggtgaggtgatctcccatctggctctcaccagaattcctcaggagggcatgtgtgtgctgtctgcacccaggctgctgacaatcccatcatgagcattgtctgaccccaaatgccagtgtcctgctggtgggtgcacgggggccccctcgttgtatgacgctgagccagtcactttatttcccatatttgtaaacagggccatacacacctggttgcttgccttttaggcttgtgatgaattttaagtccactattgtcctagattgccatggtacagctcaccctgcaccagctgcttcctaagcgctccctcaacctgtatattaactcctttactcctcaccacagctttaggaggtaggtcctgtgaagtgatccccatttcgcaaagggggaaactgaggcacagagcaggcacatggaagcatatcgagtactgggagacatcttccagtgagggggcagctgtgtcctcctcatgcttgtgtggcctctgacctgctctcttgttcctcctccagggacaggggcagacccggtggtcagcgccaagagcaaccattgcctggatgctgccaaggcctgcaacctgaatgacaactgcaagaagctgcgctcctcctacatctccatctgcaaccgcgagatctcgcccaccgagcgctgcaaccgccgcaagtgccacaaggccctgcgccagttcttcgaccgggtgccc

SEQ ID NO: 40087 - DNA, 2300 bp, Homo sapien
gcctcgggcctccaggccaagcctgcctggcagtgtaattcctgtcaagttttatcttttaacctacacttatccaaagccggttccttatgctccccaatttttggaaaaaaagccaagagaccttgtcagatgcgaagtcacttcctagaacatgagaggcttggaggaatgacagggagggcaggcctgaagggggctttccccaactccaatccctaagccctctgtcccagactcgtcactacccagctagggcctaggctcgaagcaggcacaactggatggctgggggagaagatggagggaggaaggtcgatgccccaggacggaccacaggaaagaggcgttcacaggagactcgctctctgtgcttccaaggccgggagcagccgccttcccgcctaaatcctcaagatggaagttgctccctctagctttcccaatagctaaggctgctggttttgttagtgacccctcccttctcgtccaagtcgatttctagcatttactggattccagagtcttgttatttaagaatgcatcttaaacggtactatcaaattcatgttacgtgcagcccagattgttttgggcagcacgaaaagtttctgaggcgctgcgtgtaccccaccccaggacaccgtgtgtgcgcgccgagctgagtgcgaggaacgtggcgcgagggccgggggatgccgggctgcgtgggtgtgagccctcgcgcgaccgcgaccccgcgcctctcccgctctcgccggaacgtgaccgcagccgcacctctcctccagccctttcccagccagacgcttccttttaggtccttctgggcgtttattgtaaattctgcgactaaaacacgccggtgagcccggcccaccgacagatggatcaatcgcccccttcccggctaggggaggaggaaccccccaaccccggagcctagggagccgggagctgcctcgggacgagctcctcggagcccagccggctgcggagccccggcccgggtcggtctcggggccctcctgccggggtggggtgcgagcccctgcccgattcctctggggcggttcaggcaggtttgccggcctccgaggaggtggtcagggcgccctggcccagcaggcttcttcccgagccggggggaggggagaccggctggggaaggggcatctcgaaggggtggaggccggggcgggcgggaggcaagcgcgccgcgggcgtgagggcaaagttcccgaggtccgcgcggagagcacacgtgtatgtgcgcgcggggctaggccggggccggcaggatgcgttgggttcgggggcgcgcggggccggcgccgaaggggataattcctttccctggcaccatcggggagacgctttgtcggcctcggctcctgggcgcagggacgccttagcccacggagggtggagcccccctcagacccgggccaccggctggggtttttctaacgccctgccccccgagcccccggatggctcgggccccacggactccgcgccctccagcctcagctcagctccccaggcttcccagacccagcggcgcagggggcgggggcaggggcagtgggggttggagggcgcagccggtccccagggtggggagagctgcggggggaggaggaggagggtgccgacgcttgagtgggttcgagcccgagccgtagccgggggagccagtcagtttccggccaaggcagcaggtcagtcccaggaagggcgggcgattgagccgagggagccggcggctgggctctcctctcggcccgcgatccccggcgccgccgccgccgccaccgccaccgccaccgccttcgccttgtcgccgccgccgctgcagagcatcgtagctccgccgcgctcccgcgccccgcgccccgcgccgccagccgcctgggagcccgagcgccgagcccggggcggaggagaggggcgctggcgcgagagcccgggcgagggagccgcgaagggagaagggggcgggcggagggaggagcagggagagtgggagaagggggagggagagaggagagcgagggagagctggagagagcgagagcaaagagcgagcgagggagaggagagagagagagaggagagagaaagacacacgcacgcagagacacacggtcactggaattccattagaaaaaagtgagccgagcaagggttagcgggagaagatttttttgaatcttgtcttcgtcttggtgcgaaagaagcgactccagtctctcgtcctcgaagctccgactggattgttcttgggcgctgacacc

SEQ ID NO: 40088 - DNA, 2300 bp, Homo sapien
atgtctctgggctcctgtttacagggtttccccatggctaggcagaaggtactggggttagtgcttctacatcagggtcgccacaaatcctgctagggacagttgaaggggcctagaaggactgcaagggtgttgctcttggtatatactctgctgccctatcttctgcagtcaacggctaccggagaactcctccagcttccataagcaagggatgacaagggagtgtctggattgcctggggttcaggcctccgggtttaaacaactttcaagtaatctggtaaacttgggtgcccccctgtggttctgagtggaatgtgtccattttgccttcagggaaggcgatcaggttagcaggggacatcctctgtcaccttgctactcagtgtgctttgacccacccaccaccggcagcatctcagggctcattccagacctactttattggagtctactttgaacaagatctacatgttacagtttggaaggcactgctctggcagcccctaagatggccataaagccctcctcttctcactccctgcaccaaagaccatgcagctcccaggcagagttgactctccttagggactaaagaggaagattaggtcacatcccatttccatacccctaaccacttcccaaggtgtgcttttcccaaaacagtatgcttggttctcccttgagctttggatcaacctcttcaaacccaggcatcacggctgagggcagtgagtttgaagtgactcatccttgtcctcacagagctcatgacattcatttttttcaagcttatttggtccagtccatggcatgtacagcagaaggcctaagctgtgcacggtgctgctcgctccttgccacggtaactgaacccctgttgtagaggaaatgggcctgtttatataagcacctgttatgggattaaccccaagagtgttggtctgagtctcagttttttccaacccttctgcactgtgcctccatacagattgcttctctaaaccatctggctttaagttaaacttctctgagcagcttggatttccccacagcaatggatctttttgcatggatctggattccatttaggggccctgcaaaatgttgaattaaagatcaggagccctggtctctacttcttcctctgcccccaactacctctgtgacctcaggcaagttgcaaataagtgtgttcatacctgccctgcctttgtcaaaggatggcgtggctgatgaaaagtgtgtgcctagaagctttgcgagctacgaagcactttcggtaactctgaaccattttcaaaatgtatatgaaagtgattgctattgaaacttaagataatttgcagatgaaacctaagcatctttctaatgctcaggaatgcttgcaagaaggcaaaaatccaacagttgagatgtacttggggagtcagtcccttctccagaggggatgatcatctttctagaatctttacagggttggtgtgagtgtgtgttgttggcagacagggagtgctcgcatgtagttaaacggttgcctctctctctctctctctctctgtgtgtgtgtgtttgtgaaactggtatctggttaggcccacatgagctgtcttatgtgtctctctgtgcagtgccgtgtgtgtcattcagctgttaagcgttgagagacctgggttctggtttggtgaccttgaataaatccctcagactttccaagcctgtttccttatttgtaacttagtggtttgtcccttccaacttgcgtacagcttggaggggggggccttcactactgatttcactgtctagtttggtttctgggtctctgttccagtgggccagccactctttgctggcgcctccctgtgccaacttctgtacctgaattgttgctcactgaagagctggcatttagctttttggaaattgtctctaactcactggaaatgcaggaagcttgagtataaaactcactcagaaaaaaaaaaaaaaaagaaaaaaaagaacacacactcagaagaaaccgcagggcctatcagcctgtcgtcatcgagcagactagaatagtatagaaaaccctaggcagagaggaaatgaacttcagagaagggaaacacacggctaagaagagagaggcaagggcaggagtgaaggagagagctgaagcctggggctccgagatggtcagaggatgggagacggggcagtgaaacaaggcttcttgtatcttcagcagcagcagacgtttggaaaggtaggagtgaggctgggctggggttgggcagggggcctgggagg

SEQ ID NO: 40089 - DNA, 2300 bp, Homo sapien
agcttggccaacgtggtgaaaccctgtctctactaaaaatccaaaaattagccaggtatggtggtgggcgcatgtaatctcagctacttgggaggctaaggcaagagaatcgcttgaaccagggaggcggaggttgcagtgagcagagatggcgccattgcactccagcctcggcaacagagcaagactctgtctcaaaaaataacaaataaataaaataatgttctgcagcgtccagctatatggaaaatgggttatcaaggggcaagacaggaagcagggaaactaattaggaatctattaccagagcacaggagaaaggtaatggtggcttggaccaaggtgttaacagtggagatggatggagaagtggtcatattgggtatatattagatatagattgaacaggacttgcaggtgacttgcatgttggggactgataagacttgaagaaccaactcctgagtgtttattaggagcaactggatgaatggtggtaccatttactgaggaagggaagacacagggagaaacacggggaggttggggtgcgggggtgggggaagggagggtggacagaaatttgggcctggcccactgtgaaactgttacctctattcagtccagtagggaatccaaagaatttccattgcaattgtgactctgagaatatttcattgcccgatgccaggttcagaaagccactgaccccatcaccccgcctctttatacgctcggagctaatgattggacgctgggaggttttggggaaaaacaaaaacccaacatctgaaaaggtctatgctcgctagaagttaacagtcaaaagctctgccacttaaatcttctgcctcttaaatcttctctgagtcagcctaattggcagagcctaatttgcatacagaaccctagctgcaaggaagtttgggtaatgtagtttccaggtgccctacctctgcaaaccaggaagacctactaggaggacggaagtcgaaatgaatgctgagcaccggtccactacatccaccaagggtgtgtaattcactaccaccatcatttgcatatgatggtagtcccctgtaaatacaaacttcaaacaatcagtgctctcagaatccagctatgatctaacctgggggccttaaaaggaagccacagtggaatccaatggaaaacaggaaccggcattatctaacagataattcctagtgaggaagactggaattggcctcagcatgcaggggctgaccttatctgacccagagagatggctttcccactcatacctccacaagaccgagcctaggggtcctaaccaccagccccgctgcctcttccagcatctgaccctctcgggaggcagtctagagtattggcaacgaggacaatgtctttgggaagccagaactgtgccttcgtatgttttgatcatcaccaccattcggtggttatttccatgaatgtttatcaaggacgaaaggacagaaatgaaaaacacgagatcaaccactggggttgctggtgaaatccagaccagagagcgatggccctggtccagaaagctagacagacacaagcacagaatcggcccccgttgagtagagggcattggaaagtaaggaatctcgcaggcagcctaggtggggtgtggggggtccccgtagctgcagggtggggtgggggtgggggtgggagacgtccaggggcgagtcaagggggaagacggttgggaagagaggaagccactgggtgcaggggtcccggggcggcgacagacctcggcccccatccaggagccctcaccacgcaaacgagcagaaggcagcgccaactcccactccagcgcccgcctgccggagcgagcgcggcccctttaaaaaccatgtaaacaaagctttgttcccccagctgcccctccttcgcgctcccccggcccgctccttcctcccacccggcgtctccgggccgctgacgttgcccgcgcctttacgccgtcccagcggtgctgcgcattctccaaccacggcccgggccgccggggcctgcgcagctgagcggcgctacgccacgagcgcagcgcgacgagtccccagcgcgcaggcgcagcggcgacggcgtcggcggcggcggcggcagcggctccggccgaggtgcgcgctgggggggagggggggccggagaggagcatgaatggagcaaaatggcggatcatgtgcaggtgagaggagccgcgggggggagggggcgaccacgaagagcggcgagtggagtcgggggtgcacacggcccacagggcgcca

SEQ ID NO: 40090 - DNA, 2300 bp, Homo sapien
taactaggatctaaatgacaagaaagattctggtagccctgcaaagataaggagtcttctaaacagaaaacatctgcacgagtcctgagataggacaggcttgctgggacttgtggcaggagcctggttggtggggggaggctgtgggagcaggtcagaccagtgagcagagccagatcatctagtgccttcgcacagcagtagtgaggagtgggcatttattctcattgctgtgggaagccgctagagtgttttcagcaaaggattaaaatgatctcatttaagttttttaaaggctaccatgtgaagaatgggactaaaggcaggtaagagtagaagcagagagaatgtaagggaaaggtggatttggggtttattttagagttagatgttgatggattcagtgtggtgggggggaggaaggaggaaggactcctgggcttttgaggtcttaccaacttgaatctaataaagctcatcaaaatgtggagcagacaaaagagtcaggaacttaaaaccaagatggttacaaatggccttctctgtctggcttcttttggaccattccaagtccctatgcatcttttcttcatataaaatggtaacaatgctttggcccctctccctcagttgccactgaagccataaaggtccatgccaactaatggctgaagggctctgcattagtatcaagaggcgacgggtagaaagtatactttaatcaaggccgggcacggtggctcacgcctgtaatcccagcactttgggaggctgaggcgggcggatcacgaggtcaggagatcgagaccatcctggctaacatggtgaaatcccatctccactaaaaatacaaaaaattagctgggcgtggtggcgggcacctgtagtcccagctacttgggaggctgaagcaggagaatggtgtgaacccgagaggcagaggttgcagtgagccgaaattgcgccaccgcactctagcctgggcgacagagtaagactccatctcaaaaaaaagaaagtatactttaatcaaataaaattgagaattttcaaatagtaattttatctactgctgctttttttttcttataaatgtttttaatttgagcagcagaatctgaatctagcatgttggtcttcaatatagaagctacttcatggttaaatatctataacttggttattctcatattaggataggcaattgcttaccttaatgtaaatgcaggatcacccaaggtactcagatgagagcctcaagtaccccagtcttccaagaaaacacctctgactttttctcctcctgtgctctctgctcaggtcccagcgactccagtttgatgtctcttcccccaatggcatcttactcttccgagaaaccagcaagatgataacaatgtatggtaagtgcttcagataatcatgcctctagaagttaattccagctcagtcaccacactgtaagcagcatgtgggtctctggccagtcctggcaggagccaggacagcattcgtattgtatgctaatacatgtgcattagagtgccacctgtcaccaggggcctactggaatttgtatgcctttggagtaggaaggctgatctaaacgagcgcttctaatgtggttgaataaacatatatgacatgtctactcaggcaatcgcatcctgacactaggagaggtcccaaaggatcaggtctatgctctgaagctcaagggcatctccatctgcttctccatgctgaaggctgctctcagtgggagttacgtcaatttcggagtctttcgtctctatggagacgatgccctggacaatgctctgcagaccttcatcaagctgctcctctctattcctcacagtgatctcttggtaagccttacgctgcattgccacaatcttgttcctcatcacattcagcctttttcacctgagaccaagattgaacactgctcttgagaaactatgtaagctagctccttttgctctaactaagtcttctgttttcccacctaaaaggagctaagctatttaagatcgtctccctgcatgctggagtgcatagtgcctaagctgattttcttcctcttcctctcccacaggattaccccaagctcagccagtcttattattcactactggaagtcctgacccaggaccatatgaactttattgcaagcctggaacctcacgtcatcatgtatattctctcttccatttctgaaggacttactgcacttggtaagcacctgaggtgggtgggtgagttggtgggtttgttttttaccacttaactaaaca

SEQ ID NO: 40091 - DNA, 2300 bp, Homo sapien
ctgttatcaaaaagacaaatgctggcgaggatgtgcagaaaagggaactcatacactgttgttgggaattaagttaatacagccattatggaaagtagtatggaggtttctcaaaaaactaaaaattgaactatcacatgattcaaacagttccactactgggataaataaccctagaaatcctgattcctagggaatcggtacctgatttcctttcctttggataaataatccaggagtgggattgctggatcatatggtagtcctatttttagttttttgagaaatctccttacttctctccgtaatggaaatcagtatccaaatgaaaggagggatatctgcacgcccttgtttactgcagcactattccaagagccaagatatggaatcaacctaagtgtccatcaacaggtgaatggaaaaagaaaatgtggtacctatacacaatggaatatatccagccataaaaaaaatatggaagccctgtcatttgcagcaatatgggtggaactggaggtcattatgttatgtgaaacaagccagacacaaaaagacaaatttcacatgttctcactcatgtgagagctaaaaaaaaaaaaaaaaaaaaaaaaaaaaaaaaaaaaaaagtagaattaatgggagtagagagtagaatgatggttactagaggctgggaagtgggggtggggggaggatgaacagaggttgattaatgggtacaaacatactgtttgatggaaataagataagttgaaataagaaataagttgatagtacagtagggtgactatagttaacaataatttattgtatatttcaaaatagctagaagagaagatttgaaatgtttccaacacaaagaaatgataaatgtttagccgggcccagtggctcatgcctgtaatcccagcactttgggaggcctaggcaggaggatcactgaggtcaggagttcgagaccaacctggccaacatggtgaaaccccatctctagtaaaaatatgaaaattagctgggcatggtggtaagcacctataaacccagctacttgggaggctgaggcaggagaatcgcttgaacatgggaggcagaggttatagtgagctgagatggcaccaccgcactccagcctgggtgatgagagtgaaacgccatctccaaaaaaaaaaaaaaaagaaaagaaataatgttgaaggtaccccagttaccctgatttgctcattacacattgtgtgcaagtataaaaatatcatatgtaccccataaatatgtacaattaatatgtatcagtttaaaaagttaatgacgatggtaccaatattatagcctcatttagcagatgaggaaactgaggcactgagctatgaattaacacacctgaaatcacagagcacagtccagacttgaacccagactgtccagttccagtgtcccagctctaggtcatgacctcagggtcatccccctcccctgcctccatttagccttcactgtgacccccagctgcagcctgacatcagtgtgattattcacggggtgggtagcctggggccactgaaggccggtttgctttgagcactgctctccaatgaggctggaagccctttgaggggctgtcgtattcaccgcgggatgcccaggtcccgcccaattggcggaatcaccgtttgttgagtgaattcttgaacgtctgtgcatggcatgcatgtgcctgccatttgctcatctttaccacacacttggctgcaatggctgtcaccttcaataggcgccttgccagggacagagagctcagggacagccaaggagactggaactgctcagctggggatagggagcctagggggccctggcaggcccccaagcctctcctgggttgtcctggccaattcacagggaggctgaccccagcttccaggaataaaagattctgacctctccgtggcaatgagcccctgtcccaggggtgtgcgggagatccctggttatctgaggtgtctccagggtatatccgctgaaaccccacttcctcttcactgcccactgagcctgggaccagctgctggtcacgtgcttggccctgtagcgtcgctagccgtgctcctcagtgtgctccccgccccctgccgcggcgcctcgcctcccggctcacctccccaccccacctgcccgctgcggctctccgcgggagatctcaccgttctggagacagggctcgctcgctctcacggtaggctggaagaacgggctgtctgggccttaggaaaggcccatgctgtataaggcatggggaaagg

SEQ ID NO: 40092 - DNA, 2300 bp, Homo sapien
ggtacaaacatactgtttgatggaaataagataagttgaaataagaaataagttgatagtacagtagggtgactatagttaacaataatttattgtatatttcaaaatagctagaagagaagatttgaaatgtttccaacacaaagaaatgataaatgtttagccgggcccagtggctcatgcctgtaatcccagcactttgggaggcctaggcaggaggatcactgaggtcaggagttcgagaccaacctggccaacatggtgaaaccccatctctagtaaaaatatgaaaattagctgggcatggtggtaagcacctataaacccagctacttgggaggctgaggcaggagaatcgcttgaacatgggaggcagaggttatagtgagctgagatggcaccaccgcactccagcctgggtgatgagagtgaaacgccatctccaaaaaaaaaaaaaaaagaaaagaaataatgttgaaggtaccccagttaccctgatttgctcattacacattgtgtgcaagtataaaaatatcatatgtaccccataaatatgtacaattaatatgtatcagtttaaaaagttaatgacgatggtaccaatattatagcctcatttagcagatgaggaaactgaggcactgagctatgaattaacacacctgaaatcacagagcacagtccagacttgaacccagactgtccagttccagtgtcccagctctaggtcatgacctcagggtcatccccctcccctgcctccatttagccttcactgtgacccccagctgcagcctgacatcagtgtgattattcacggggtgggtagcctggggccactgaaggccggtttgctttgagcactgctctccaatgaggctggaagccctttgaggggctgtcgtattcaccgcgggatgcccaggtcccgcccaattggcggaatcaccgtttgttgagtgaattcttgaacgtctgtgcatggcatgcatgtgcctgccatttgctcatctttaccacacacttggctgcaatggctgtcaccttcaataggcgccttgccagggacagagagctcagggacagccaaggagactggaactgctcagctggggatagggagcctagggggccctggcaggcccccaagcctctcctgggttgtcctggccaattcacagggaggctgaccccagcttccaggaataaaagattctgacctctccgtggcaatgagcccctgtcccaggggtgtgcgggagatccctggttatctgaggtgtctccagggtatatccgctgaaaccccacttcctcttcactgcccactgagcctgggaccagctgctggtcacgtgcttggccctgtagcgtcgctagccgtgctcctcagtgtgctccccgccccctgccgcggcgcctcgcctcccggctcacctccccaccccacctgcccgctgcggctctccgcgggagatctcaccgttctggagacagggctcgctcgctctcacggtaggctggaagaacgggctgtctgggccttaggaaaggcccatgctgtataaggcatggggaaaggaaaggaagaaaggcaacgaacaagaaggagggcttccaactgcagcttcctgccggctgcaggcctcccttcctaagctgagctgaggcttcctctccatgggctggggagggggcgccaggaggcctcggcgggtccgcaattggccgggacagcttctcacgaaaggtcctgggccggcatcatcagcctcacctgggaactggttagaactacaaattccctcggccccacccagaccgacgccaagggcagctgtggagtggggcgcggcaatgcgccccttaacagccctccaggtgattctgccgcgcagaggaggaaagaatgggagaagggaaggggagagggaggcggcttctttgcgactaattggacacctgcccttccccttcccaggcttcttagcccgggcttggacagccgccttccggccagaggggatgaggttgcgctgcgctccgggagcgccgatggcgtgactggccccgcgcggagcagcgacagtaaggctgtgtggggggagctgggacctaagccgcgcgcacacccctttctctgcgtctggtggaggtgcacagaggcttttgagtcaggcccaagcgcagccaggtgacctccccgcggcctttcaagcctgagctcggtggacagctccctctcccgtgagtcccgctgtcctgtacgcgcccggtcgagccccgggctgcgcaccccg

SEQ ID NO: 40093 - DNA, 2300 bp, Homo sapien
ctgggggctgggagtggtgaggatgtggatgtgaggttgaaggtttctcagggaatgagccagagctgccagaagaggcagagtgtaacccagactgcagatgatgggaagaacgcggaacagaagtgacctgaaggatccgcagggggaaagcagagaggtgggcacgcgggcacctggtaccttgtcccagccatgccaccagctagctgtgaggctttgggcgagtcccttgccctctctggctctcatccaaggaatgaggaagttggaacaaatgatgaatccctaagaccccttctaggtttgacattctttgagttgcattccaaaaccctggactcccccaggtaagcaaggccagggcttgccccatcctccccacacaagctcaggcagcacccactcctgggctgggttcccgaggaagagcctgcggagaggagaccccggagctgcctgcactggtcagtgcatgggggcaggggtggcagaccactttgtggattgatggagctcaggaaggtgagaagggacccacaggtgagagtttcgctcccctggtcatctctttaggtaaataaatccacatccgccacttccccttcccttcccaccctgggggcgctgagaactccagggagcccagagctgaggcctgagctctgcttgctcacactgggtcttccctcagagacccccaagccctcctatcttctgcagtcaccgtcatccacttttctgtagggagggaacagcatggagctctctgttcaccggtctccaggacctcggattccacctttaatcctgaaaacccaggaaggcttctgtatccctacaatgaagcaggtttggggctggatctgcagggtggcaactcaatccatgcagaacagaagaagcatggacttttccattctggctattccattcactagctgggccattctgagcaaactacctcccaatgtgcctcagtttcctcatctgcaaaatgggctagtcgctggcattgtaccgagcagtatgagaccggaggtcatgggaagaggctggtaggcacttcatcccaggcagctgctcagggacatgggacacagggaggggactccgagctgctcctagctcagagaggctctagggacaggcactggaaggaaggggatgcagaatggtgagtggagctgggtctcagaacacagacatcttgaagtctgctatgtgctgatttcacacttgaccccccaacaccctgaggcattactgtcctcatttctcagatggaactacagaggcccaaggaaaaggggcttaggccaggacacccagctcttctccaagtgtctgtctcaggctagcttttgcaactctccattgggattcttcctagatctccatctgtacctgccaacccacctctgacccccaacctgttgcgcccagtatttgctgccgatcaggacagccttaacccctccttcccgggcaatcagctgctccaagccaagcccacccctgccccctggagggaggcggctccttttaaggctgcttctgggaatttccactccagagccagaaccagagaccccagccccacttgacacctgcggctcacccttggggaggtggggcgccagacctgagtgcaggagacgcagacctggaagggctccccctccctgacctgccacacatcgagtttgtctgcgtcgagtttggccagtctgtgagggtcaggaatagagcaggagacagcagggccacctccttcagaaggcccccaccgctccatccctgcactgggtggcccaggagagactggcagcccagagggcacagcgcgcacgcccccacccgcatctgctttgcagcctcactggccaggaaggtggacacctcatacctcagtctcccaattacgccctcctcctccccctcctcctccctcttttctctcctcctcctcccctttctctcctcctcgcccccctgaaaacctgtggctcggagagaccttggcttctctgggactctacccctggggacttcccacatctgctcctgagcttgggggcaggggggcaaccgcctgaggaacctctccagcgatgggagccgcccgcctgctgcccaacctcactctgtaagtgtgctacctctcccactggagtttcgttgccatttccagcctcagggcagccctcctcttcccgggactcccacgcgtgcgtgcacggggctggcagggcgggggcgggggcctgggtgcaccctaggcttgcagctggcaccca

SEQ ID NO: 40094 - DNA, 2300 bp, Homo sapien
acagcagggccacctccttcagaaggcccccaccgctccatccctgcactgggtggcccaggagagactggcagcccagagggcacagcgcgcacgcccccacccgcatctgctttgcagcctcactggccaggaaggtggacacctcatacctcagtctcccaattacgccctcctcctccccctcctcctccctcttttctctcctcctcctcccctttctctcctcctcgcccccctgaaaacctgtggctcggagagaccttggcttctctgggactctacccctggggacttcccacatctgctcctgagcttgggggcaggggggcaaccgcctgaggaacctctccagcgatgggagccgcccgcctgctgcccaacctcactctgtaagtgtgctacctctcccactggagtttcgttgccatttccagcctcagggcagccctcctcttcccgggactcccacgcgtgcgtgcacggggctggcagggcgggggcgggggcctgggtgcaccctaggcttgcagctggcacccacacctgggcttacctcctctccccacacaggtgcttacagctgctgattctctgctgtcaaactcaggtaggcgggcattcccaccggctttcccccaatttttccaccctacctgaccagggcgggtgcaagggaccggctcctttcaggtggacagaggcagagtctggcctctccctgggtccaggaggcactgaggtttggaggggagtgagcctttgaccgggtgggcagggaagggggctgactgaggttttgtctctgtcctccctctgaggaccctccccacttcccctgggtctctgctcctcttcctccctctccatcgggttcccccagacttgagggatggagcctggagcggttggaagcaggtggaggtgatggctcaggtgaggcttgggtttgccagtacctgaaaggacaggttttgatgcaagaccacttgtatgtccttctcgccaccccactcccatcaatatggatgcctggggtgggggtctcgtgagcatgtccagaatgcctggccagggtgaggtgactcctcacctagagggcacagaggtcaagcccaaagaggtttgtttgggacgggatgcagggttcgcttctccacactccccccaccccaagtcggccccccacctccctccatgcacacctcccacccccaagtctcagcccccagtgcgaggcttgctcccttttttgtgatcctccataaaagtgcagctattaaaatgcactggtccagaaccgctctggggagagatcgcttggctttcccaggccagaggcccgcttctcttcatatccagtggggactttttttgaaggtaaatgccttttctctgggagagggaaaggggcagcctttgaagcagtgggggggtgggagagggagagacaattcccccccccttccttcccccttttgctccagccccgttccaggccttttgcttcacacatccagggggagccagaagaaagcccccagcctggctgggagggggctgggggtgggcccaacctgttctggaggggaactagcacaatggtgcggctggccgggcgtttatggcctggctgaggccccattcaggactcagggaaggtggcaaagcggtcctttcccccttgaagtgccccctcacccccctgggagggggggccagcaggccggaccacagccatgcttgaggggctgtctgacaagcagctgtctgcagtggtggaaggggaggtcctcccgcagcgggaacatgaaagggacaggctaggtcccgcggggagagggacttgtgggttgtgggctgtgggggggcgtggggctgcttttgtgaaaagcttgaagggggacgaggaaaggagggggcttcgggggggcgctttctgctcctgacctggaacagactgccagaggaggccgtcggccaagaggggcggagggcctgaacctgggccaggaggcggggctgggataggcaggaccccaccccctggaagggaggccagcgtggggcaggctgggcaggtcccccaccccaaatgctccagggtggggcgaggggcaggtcttgcagaggctaggcagaggctgctctatggggaggtgcaattggaaatgagcaacggtgcacagtaagtgttaaccccgcgcaggttaaatgtccagctctgagagctgctccctcactccccctgcctcaaaggtgatatttcccaccccctccctaggagagagtagccccta

SEQ ID NO: 40095 - DNA, 2300 bp, Homo sapien
acccccctcggcctgccctcagctgtcctgcctggcttctctttcccagctcctcacagaggaccctcacccaagattccctcccgctctgctctctgtctgccagctgcccctctgagcaacctcagcatctcagccaccgcctccttgcgcgtgactgctctctgccaaaccctggggctctgcaccgtggccagacctcactgggatctatctaaatatccactcgctccctacatcatctctgtgcctctcaacactgccctccagtccagtacatccgagtttgctccacttaccttccctaccatcaaccacagctctacccacgccacactatcccggccaaactccttagcgtcatctttaagactcctgtccagccctgtccagtctccctattcggccctagccccacaactcccctttaagaatactggaaaactggaactctatcaagcaagcatgtccccattctcatttgaagggtccccgccacctggcgtgtcctgctctagcacacacacacacacccagaccgcaggctcctcctctgctccataggctcttggcactaccccgggatgagcgactgtctccactgccactggtcttgccagccattcacttgcccttgccttgtggtacatgtcacagcttgtccagaactgtcatgatgtatgtgcttgtcatgattccgctaaatagcaagtgccccagatgtagaaatagtccatcttttcctccccgacagtgcccagcacagtatgttgcacagggtaaatgtttattgaggaaataaaccacttgaagccctagaaagaagtcattggcccaacaccccaccatccctctaggcagaggcaggagagaggccagaatcctgccttctccttccttctttaggcagacgtgggtggggcgggggcttaagcagttagtcccagtgtttattttccccccacaacattcaagtcctgtgctaatccttctgttaataaaaaacatggacaagatagagctctcaaggcacttgaaatttaattggagggataaacccataaaaaggcaattatttgttctttggtgggacttttggaaaaccctctcttacacatgacataacaaagcaaccttttttttttcgtacgtccccaaagagggaaaggggagataagaattattgggaataaggaaactaatatgtaccgagctcaggagatgtgctaggccacactcagggcatacttgcttgcaatccttctttagggcagtgagatgttcccatgtagcacatgtggatgagttcacactcagaaatgccaggccattcacggtctcacagctagtgagcactgcactctagattctgcccggcttccacactttgcctgcaaagtgtgcccaggcatcgtgagttctggggcaggagagagcacaggccagggtgcttgcgggggctttgtggaaggtctggggtttgcatgatttcagatgatttcagtggagaaaatatgcacagagcggaaaatgacgagaggaaaaacgggcacgagaatcaaggcggcaaaatgggaggtgtgctccagggaaggggaatagtccgtctacttggctggagctgaaatttgtgtagagaagtggcaggaagtgattggatcaaatgatgaagagtttggtccttatgctgtggcagggaggagatggtgaggggctttgcgggggccagatgcagtggtctggtggcagcatgctgaaggagtggaggctctagggtctgggcagcagagtccaatgcccggaggcaggggcacatggctcccaatctctggtgagaatggtggctttggggccctcatccttccttttcttcaggtctctgtcaccctttccttcctccctgagtgtccaggtgccctggctccacctctcccgaagttaatgtttagatagctcccccgcccagcaggttggtgtgtagggtggggccggggggcactggagtgagacagaccagacgtggacagagaagcctatcgacagggcctgggggagggaggaggcagcagggccggagtccacccaggacatctggcaccagtgaccttgtggggaaaggagccaagaacggggcgtcggggggcctgggacccccctgcctgagagatacaggaatcctggccccgtgttgtggacacaagcgcccatcctcaaggtcctgagaactcctgaacttccaaaggtatgagagccctggcagccgcctcctgcctgctcagtatggagcagagctgaggaag

SEQ ID NO: 40096 - DNA, 2300 bp, Homo sapien
atccttctttagggcagtgagatgttcccatgtagcacatgtggatgagttcacactcagaaatgccaggccattcacggtctcacagctagtgagcactgcactctagattctgcccggcttccacactttgcctgcaaagtgtgcccaggcatcgtgagttctggggcaggagagagcacaggccagggtgcttgcgggggctttgtggaaggtctggggtttgcatgatttcagatgatttcagtggagaaaatatgcacagagcggaaaatgacgagaggaaaaacgggcacgagaatcaaggcggcaaaatgggaggtgtgctccagggaaggggaatagtccgtctacttggctggagctgaaatttgtgtagagaagtggcaggaagtgattggatcaaatgatgaagagtttggtccttatgctgtggcagggaggagatggtgaggggctttgcgggggccagatgcagtggtctggtggcagcatgctgaaggagtggaggctctagggtctgggcagcagagtccaatgcccggaggcaggggcacatggctcccaatctctggtgagaatggtggctttggggccctcatccttccttttcttcaggtctctgtcaccctttccttcctccctgagtgtccaggtgccctggctccacctctcccgaagttaatgtttagatagctcccccgcccagcaggttggtgtgtagggtggggccggggggcactggagtgagacagaccagacgtggacagagaagcctatcgacagggcctgggggagggaggaggcagcagggccggagtccacccaggacatctggcaccagtgaccttgtggggaaaggagccaagaacggggcgtcggggggcctgggacccccctgcctgagagatacaggaatcctggccccgtgttgtggacacaagcgcccatcctcaaggtcctgagaactcctgaacttccaaaggtatgagagccctggcagccgcctcctgcctgctcagtatggagcagagctgaggaagcccacccgcctggggcctgagccaacaggcacctgttgttcagtgttgccagctttcaagggggagaatctcccctctcagacaagccatgggggagttcagttcagctggccttgagaggtcagaggccttcccagggggaggaggccggaggcagagtgagtcttcccatgggacaaggacagtgacgaggtagggtcagaggatggcatgggtgagaagggtccccttgcctcccctctgaacgcccaccaccaatacacacacacacacacacacagacacacacacacagcccagatccctggcagcaaaatgaccttggcagctaccactcctcaggtcgacagagggagccctcactctgcagtccccttgggtccaggcctggctgggctgagcactcttcctgcccaaggtggcccgcccgccccacccatggagggacattccgatagaatgtgagactcaggcatggtgggggacagtgggaatggggccttgaggaattggaagagagctgtcccttgctctgagttttctcaggtggaatgagagagggtttgggaccaggtgaaggtgctcacagagacggcagaggtgtggggcccgcagccgcgtgcccagtgcagccagcgcccaggggcctctgaaccctgccggagcaacccctctggcccttcagcacaaggactgtccctgccttgctgcctgtcattgtcccgagctccacactgggcttcctggagtggggactctccccagtgctgcatactcttcaagactggcctgctctccagccctgaattagggttctcctggggtcacccctaaagccaattctagagccttatgaaaggaagtggggggatggggtacttggtggggttcactgggcaccctagctcctgaagctgtcccctaacccccagccccagcactgaggacccaccctcaggccccctccctccatctctgaggaagaggcagcgggaggcacagcttcctcctccccccctccctgctgccgcggctgagccgggcctgagctgccggcaggttgtcttggcaacaggaggtggagaggagatgcgccgagggatggaggtgtatgtcaccgaggaggctgctgcgctcctgccccacgccctgggcccttgaaggtaccgagcaccctcccctccttctcccctccgccctttccccttgactccccctactctgccctacatgcactggcttcaataggaggaggca

SEQ ID NO: 40097 - DNA, 2300 bp, Homo sapien
ctctgtccccaccagccagatactttctgtcccctcctggcctcttccctcaagcccctccccctgtgcttctccattcagacaccccagagccccctccccagattctagatttccccaacaacagctgataccatcagctgaccggctgggggcagggttgccagggcaacggtgagggctgcctaggtaggcaagtctgcggtgtggaggtggagaggacattggggccagggcgagggtcgagggcaaggcttgttgtccttccccatcctgcccagggggcccgaaaggccaatgagaggctcctggggtggttgaggctttgctagagacagggaaggcacatgcctgtaaattctgtgctgggacccaggggttaccaggcaggaagctcctttttcatgaagccaccctagggagagatggggtccttctctctctctgctgcatcccattggagttcccaggggattcaggttactgaggggccagctcaagtctcagtactgaggacctggttgcatccctccattctaccctcccaggagagagctcatccttgggtaaccaattctggcctgtgcctgcacccccacctcaagaggctgggccccagaggcctcagttgctgctgtcagatggtggggtggtcatgaatagggtaggaggtgcaggtgcctggagaaagcaggcattgtccgcctgggtcatcagtagccccctccctcgacccaccgcccacagcaacttgaactctggctgtttaggaggaggctgaggggctctgggtgcgtgtgggtgtgtgtgtgcgtgtgagtgctgcagactgcggtgtgggaaagggagaggacagtgctggctgattctgctttgtcatgacgctgggttaatgctcctcttgtttgaaatggattgagctgcagcgctggtggaagagcgcgcacatccacacacacacccttgccagccacacgctatcagctggaagtggggagggcgcggggagggcgtgggggagccagcagcccgcccgccctcccgcccccagacgaggactccccagcaccgggggatccaggcggccgtgcgttgcagagaagcagggtgggggcaaggagggtgggggcccagaggggagatcagaccgctcagccgagaccagctcccctccttcgccagctcccaccccgcccacccaccctaagccggcatttttcctgttatttgtgctccggggaagcgccgcggggttcctggaagagacacctattacctaggctcctgggggaagtgacagcccgtggatctggcctacgcctctcgggcctctgtggcctcagagcgtctgggccacactgtctgggaagaggtaggtggcagggtctccgcctctcctcccctctgtgggcactctgggccacagcgcttgctggcgagccaggctttgggtggcagcagggtatctggggggagcccactgtgggccctgttcagtgggaggatgggccggcccctgggaccagctgggcctgatctaatggaaccttctgatctggggaagagggcctggggtgttctcatcccaaggatgagaactgctcccagcccaatcccctctttgccagcatctctgcctggcctacctagctgagcaggccagcaatggaagggatggactgtgggggcacggggtgggcaggggagcattccctctctgctgaatactggcccgctggcctccccaaaaccactccacatgctctgggggttggagcagtacatttaggggcctgaggctgtttgtttggagcctgctttttagggggagtgggaggagagcctgcccccagccagtggctggccaggctggggtggggctgagtgaagagtgaggctgtggcagggcgcagctgcaagcccaagcccagtactccccctgtgcccgccgctggggtgcttgaaggggccagggctgagcagacatgcagcccccacagggttctggggctccccctccctagctctgtccctcagggcctagcaggtccagccccctttcttgggcagacacacccagtgtgtcccttccagggaccagttgcctggttgtgagagtcaggggagcagggacaggtccaagacaaggaaggcagttgggctgtgggaatggggagcccagggaaggcctccagagctgggtaagtggagggctctgtgtatgttgctgtacacgtgcactactctgggatggatgccagggagaggaccggtgggtgggtgtgagcgggtgttggcag

SEQ ID NO: 40098 - DNA, 2300 bp, Homo sapien
ctgtctgggaagaggtaggtggcagggtctccgcctctcctcccctctgtgggcactctgggccacagcgcttgctggcgagccaggctttgggtggcagcagggtatctggggggagcccactgtgggccctgttcagtgggaggatgggccggcccctgggaccagctgggcctgatctaatggaaccttctgatctggggaagagggcctggggtgttctcatcccaaggatgagaactgctcccagcccaatcccctctttgccagcatctctgcctggcctacctagctgagcaggccagcaatggaagggatggactgtgggggcacggggtgggcaggggagcattccctctctgctgaatactggcccgctggcctccccaaaaccactccacatgctctgggggttggagcagtacatttaggggcctgaggctgtttgtttggagcctgctttttagggggagtgggaggagagcctgcccccagccagtggctggccaggctggggtggggctgagtgaagagtgaggctgtggcagggcgcagctgcaagcccaagcccagtactccccctgtgcccgccgctggggtgcttgaaggggccagggctgagcagacatgcagcccccacagggttctggggctccccctccctagctctgtccctcagggcctagcaggtccagccccctttcttgggcagacacacccagtgtgtcccttccagggaccagttgcctggttgtgagagtcaggggagcagggacaggtccaagacaaggaaggcagttgggctgtgggaatggggagcccagggaaggcctccagagctgggtaagtggagggctctgtgtatgttgctgtacacgtgcactactctgggatggatgccagggagaggaccggtgggtgggtgtgagcgggtgttggcagcaccatgtgtcacagtgagggggcctcgatgggagagtgggggcatgagctggcacacagggcttcggagtctccccgcgtgcatgcgtcctgcaacggtttcagcgcgggcgcttctgcctgtgcccacctgtccatcttgtgtccgtgctgccggcctctctgtggtcaggcgttagactcctgggtgaggttgtccacccgtgggtggatgtctgcagaatccctctcctagagctcctgggtgttgtgggactggaacagggaggccctgggatccagaaagctgaattgaggctgcatctcccccagctctgccagtcccacttgtacaacaggaccagctataaatggaggggaagcagtccgcctgagggggctgcaggatgcagaaagcagaaagcggggtctcttcagagggtgggtggagagggcacatagaaaccaaaccagagagagacctaggagaagatggctgcacagatgcgtctctgggtgggctagagaggcaggagggggcacctgggcccggttttgttgttattgagagaacaagggagggcaggccttgagcagggggactctgggctccccacccacccaggcctggtcctttatccgagtatgagagggtgccctgtagtgctgggttaggggaaccctcatcccagcagacacaacggtaaaaaacattggagtaggggagagggagaaagtgggagaagaggagggagtccccaggctctgccagccttaggacagacttggagttcaggcttcgcctaagtaagggacacctctgatgagccactggcccagagcaggcctcagcctcctggtgtccttttccagtggcgggggggtgcggggagcaaggtgccctaccccacccacatcacacgcatgcacagcacccatgggagcgcctggcccctgccctgcagcgccgcactgctccaccctccctgcccctccccacccaggatgctgttttgggaactggtgacctagctggattctgcctttatttctggcattgaattgttgccacagtaactgcgggggtggggctgggtaggggagagggtgaaagggaaagagggagggagggagaaaagatgaagaaagccaagaaaagggaccagaagagaaagcagaaagacaggaggaagaaagggagagagggccaggcagtcgcactgtgaacagaacaggagaaggcgaagcggggcaaagttccctgcccaccgacgccagcctgcttggatgacttgcctcgtttcataattcacttactgtctgcaccagccggcctccagcctggctggaccctgctgcctgtgtggcccggagccaga

SEQ ID NO: 40099 - DNA, 2300 bp, Homo sapien
gtatctagctcaaggtttgtaaacacaccaatcagcaccgtgtgtctagctcagggtttgtgagtgcaccaatcgacactctgtgtctagctgctctggtggggccttggagaacctttgtgtcaacactctgcatctagttaatctgatggggacgtggagaacctttgtgtctagctcagggattgtaaacgcaccaatcagcgccctgtcaaaacagaccactgggctctaccaatcagcaggatgagggtggggccagataagagaataaaagcaggctgcccaaggtagcagtggcaactcgcttgggttcctttccacactgtggaagtttttttctttcactttttgcaataagttgctgctgttcgttctttgggtttcccactgcttttgtgagctgtaacactgacggcaaaggtgtgcagcttcactcctgaagtcagcgagaccacgaacccaacaggcggaactaaaaactccagacgcgccgccttaagagctgtagcactcaccgcgagggtctgcagcttcacccctaagccagcgagaccatcgaacccactagaaggaagaaagtccaaacacatccgaacatcagagcaaactccagacgtgccaccttaagagctgtaacactccctgcaagggtctacagcttcattcttgaagtcagtgagaccaatgaacctaccaattccggacacaatatgatgtcagtgataagcagagacactggtttttgtttcttagagagacactattttgctgtcacccagtctggactgcaggggcacgatcatagctcattgcagcctcgaactcctgggttcaagtgatcctcctcccacctcagtctcccgagcagcttggactacaggcacataccaccacacctggttattttgtatttttattttttgtcaagacaggatcttcatatgttgcccaggctggtcaacagccttggcctcctaaagtgctaggatttcaggcttgagccaccacactcagctgcagacttttttttttttttttttttttttgagacggtctcactctgttgcccgggctggagtgcactggcacgatcttggctcactgcaacctctgcctctcgggttcaagtgattctcccaccttagcctccacataccaccacgcttggctaatttttttgtatttttagtagagacgggttttcaccatgttggccaggctggtctcaaactcctggcctcaagtgatcaaaccgccttggcctcccaaagtgctgggattacaggtgtgagccaccgcccacagcccataaacattttctgatagccctgtcaaaaaagtaaaaagcaacacgtgaagttaattttaacaatatacgttatttaacccaacacacctaatagtcatttcaatatgtaatcaatataagccatggttgttgcagtttcacactttcctttcttactgtatcttccaaatcggggtgtgcttggcacggcacatcttggttgggaccagcacatttcaggagctcatcagcccatgtgcctggggctgactgagacttcaattcaggaggaattgtaatttctcttcgaaaacacctcccttagctcccgccttaatcccagctactcaggaggccctggcgggagggtcgcttgaggccaggagctggagatcatcctaggcagcacagtgagacctcccctcccagtaaaaaaacaaaaaaaaaaaacaattggccaggcgtggtggcgcgcgcctgtggacccagctactctggaggccggggttggaggatcgcatgagtccaggagttggaggctgcaatgagcagagatcgcgccactacactccagcctgggcgaccaagcgagaccctgtctcggaagaaaggaaagaaaaaaaaaaaaaaaaaaaacacctcccagccaactctcagggcccaccgctggcggttcccagcccgactgggcgcccccagccggggttagccagcgccacgcagccgggccgggaaggggcggagcggccgggccccgcccccctcgtcgcgccggggccgccggggccacggggctgcctcctccgcctagagcgctgccgccgccgctttcgcccgggagccgggggccgggcgccatcatgctgagccggctcggggcgctgctgcaggaagccgtgggggcggtgaggccggcagggccgggccgggccgccgggagtcgcgggcctaggccgggctgggcgggcgcggagccgggcgcggcccgcaggagggcgggcgggcgcgg

SEQ ID NO: 40100 - DNA, 2300 bp, Homo sapien
ccctgcctggagtacctgctgcagcacaagatcctggagactctctgcacgctgggcaaggccgaggtgggaggccctctgcgcgctgggccaggccgaggtgggaggcctctgcgcgcttggccaggccgaggtgggaggcctctgtgcgctgggccaggccgaggtgggagaccctctgagtgctgggccaggctgaggtgggcggtgggcagtgggcagcctggggctccctggattccaggcctttctgcctatgctcttcccagtcctgacactgaaagtggcagttcgggcgagaggagcaaacaggacgggcactgtggctgtctcacttagaacactccaccatcccagcgctcctgttcccagttcactccacaaagatgggcctgccatgtgccaggctctgctctagatgctggggacacagcagggattcatactgacaagagccaggcatggtgatgcgtgcctgtagccccagctacgtgggaggccgaggtgggtggattgcttgagcccaggagatggaggctgcagtgaactgttatcgtgagaccgcactcctgcctaggaggcagagcaagacactgtctcttaaaaaaaggaaagaaaactcgacaagaatcctagtgggagaggcaggaccatcctgtgatgggtcaataatgacccagtcatggagcacagtgatgcaggaaaaggggttgtgagtgccaggaaggctagtttcgaacaacgtggcaagggaagcaggcctgtgagaacgggccctctgagccggaactgagggaggagttgagcctggggctctctgggggtgcagtgttccaggtgggggacacagctctgacaggcgctctgtccctggcctcagtaccccccaggcatgcggcaggcaggggacacggctctgacaggcgctctgtccctggcctcagtaccccccaggcatgcggcaggcaggggacacggctctgacaggcgctctgtccctggcctcagtacccgccaggcatgcggcaggcaggggacacggctctgacaggcgctctgtccctggcctcagtaccccccaggcatgcggcagcaggtgttccagttcttcagcaaggttctggcgcaggtgcagcaccccctgctgcattacctcagcgtccacaggcctgtgcaggtgaggggcccggaagccaaggggtgtctgggtgtgaggccccctctctcccctgccacccctctcccctctgtttctgtcctggtgctcttccagaaactcctccgacttggtgggactgcttccggatccgttacagaaaaggaggaggtgcagttcaccaccgtcctctgctccaagatccagcaggacccagagctgctcgcctacatcctggaagtgagcactctgatcgggaacaggagggggagggcccagaaccccagggcaagccccctctgccctcctgaggaggcagaagcagagatcaggtacccgggaggcacgcaggcagcttcccctccagctccaggccgacgccctgctggcagcccaccctgcggtcccagtgggggaccctgggaagtggtccccaccaggtctggcctcatctcaccctcttttcagggtaaaaagattgtaggtaggaagaaagcatgcggagaacccactgccctgcctaaggacacaaccagccacggggacaaggactgctcccacgatggtgctcctgccaggccccagctggacggggagtcctgtggggcccaggccttgaacagccacatgcctgctgagaccgaggagctggacggtgggaccacagagagcaacctgattacctccctgcttgggctgtgccagagcaaggtgctggcagcagagatggagaggttgggggtgggggaagggtgggttgacggctggggggtgatttgggggctcacatgcatgtccctgaagttgtatcctcatcccctagaagagtcgggtggccttgaaggcccaggagaacctgctgctcctggtgagcatggcctccccagcagctgccacctacctggtacagagcagcgcctgctgccctgcgatcgtccggcactttgccagttgtaccggtccatgcctgtcttcctggaccccgcagacattgccaccttagagggcatcagctggaggtgggtgcccagcccgggaaggccggccagcatcttcagttgctggcagccctgcctgtctttggtggccagctcccctggggttccacgttgctagggacccctgctggccaccctctccccaa

SEQ ID NO: 40101 - DNA, 2300 bp, Homo sapien
ttgagcctggggctctctgggggtgcagtgttccaggtgggggacacagctctgacaggcgctctgtccctggcctcagtaccccccaggcatgcggcaggcaggggacacggctctgacaggcgctctgtccctggcctcagtaccccccaggcatgcggcaggcaggggacacggctctgacaggcgctctgtccctggcctcagtacccgccaggcatgcggcaggcaggggacacggctctgacaggcgctctgtccctggcctcagtaccccccaggcatgcggcagcaggtgttccagttcttcagcaaggttctggcgcaggtgcagcaccccctgctgcattacctcagcgtccacaggcctgtgcaggtgaggggcccggaagccaaggggtgtctgggtgtgaggccccctctctcccctgccacccctctcccctctgtttctgtcctggtgctcttccagaaactcctccgacttggtgggactgcttccggatccgttacagaaaaggaggaggtgcagttcaccaccgtcctctgctccaagatccagcaggacccagagctgctcgcctacatcctggaagtgagcactctgatcgggaacaggagggggagggcccagaaccccagggcaagccccctctgccctcctgaggaggcagaagcagagatcaggtacccgggaggcacgcaggcagcttcccctccagctccaggccgacgccctgctggcagcccaccctgcggtcccagtgggggaccctgggaagtggtccccaccaggtctggcctcatctcaccctcttttcagggtaaaaagattgtaggtaggaagaaagcatgcggagaacccactgccctgcctaaggacacaaccagccacggggacaaggactgctcccacgatggtgctcctgccaggccccagctggacggggagtcctgtggggcccaggccttgaacagccacatgcctgctgagaccgaggagctggacggtgggaccacagagagcaacctgattacctccctgcttgggctgtgccagagcaaggtgctggcagcagagatggagaggttgggggtgggggaagggtgggttgacggctggggggtgatttgggggctcacatgcatgtccctgaagttgtatcctcatcccctagaagagtcgggtggccttgaaggcccaggagaacctgctgctcctggtgagcatggcctccccagcagctgccacctacctggtacagagcagcgcctgctgccctgcgatcgtccggcactttgccagttgtaccggtccatgcctgtcttcctggaccccgcagacattgccaccttagagggcatcagctggaggtgggtgcccagcccgggaaggccggccagcatcttcagttgctggcagccctgcctgtctttggtggccagctcccctggggttccacgttgctagggacccctgctggccaccctctccccaaggctgcagctgatccccaggggacttcttgccctccagggaagtactggttttgctgcctctgtccataaaacccccaagataactgatccccagccacagaggttccacaggagaggggaagggcccagtttcaggacacattgaggaagaccttgaagctccttctccactctctgagacttcactcccctcttccttcaggttacccagtgccccgtctgatgaggcttccttccctggcaaggaggccttggctgccttcttgggctggtttgattactgcgaccacctcatcacagaggcacacacggtgagcaggggcgggcggaggccgggctctcatgctgttccctgtaccatctccatctcgaggaccaagtggagcagggacatggaaacatggggtccaggagctaagcggggccccaggcgggccgggaccctctcctgtggcatcaggcgccgcgcaagaacacggttatttctcagctggaattgtaatgagggcaaaacacattggcgctctctggcacccaggtggttgcggacgccttggcgaaggctgtggctgagaacttcttcgtggagaccctgcagccccagctcctgcacgtgtaagtgtctagttccctcaggcatgactgtggtctacagtaaaccacctaccccacccagcctcgtcctgtccctaaggccagacaccttcttgaccagaatcccatttgtggaccccattgggtgatgtttgccaggcctgccccatgatgtgcacgtggctctgagctacgtgggctaaacg

SEQ ID NO: 40102 - DNA, 2300 bp, Homo sapien
cagctggaggtgggtgcccagcccgggaaggccggccagcatcttcagttgctggcagccctgcctgtctttggtggccagctcccctggggttccacgttgctagggacccctgctggccaccctctccccaaggctgcagctgatccccaggggacttcttgccctccagggaagtactggttttgctgcctctgtccataaaacccccaagataactgatccccagccacagaggttccacaggagaggggaagggcccagtttcaggacacattgaggaagaccttgaagctccttctccactctctgagacttcactcccctcttccttcaggttacccagtgccccgtctgatgaggcttccttccctggcaaggaggccttggctgccttcttgggctggtttgattactgcgaccacctcatcacagaggcacacacggtgagcaggggcgggcggaggccgggctctcatgctgttccctgtaccatctccatctcgaggaccaagtggagcagggacatggaaacatggggtccaggagctaagcggggccccaggcgggccgggaccctctcctgtggcatcaggcgccgcgcaagaacacggttatttctcagctggaattgtaatgagggcaaaacacattggcgctctctggcacccaggtggttgcggacgccttggcgaaggctgtggctgagaacttcttcgtggagaccctgcagccccagctcctgcacgtgtaagtgtctagttccctcaggcatgactgtggtctacagtaaaccacctaccccacccagcctcgtcctgtccctaaggccagacaccttcttgaccagaatcccatttgtggaccccattgggtgatgtttgccaggcctgccccatgatgtgcacgtggctctgagctacgtgggctaaacgaaggcctcctacccttccctgcaggacctcagcagggatgggcaagtgaccacagacataccagccaaacatgcgaggcaagcaggaagggttcggccacccgcactcatgtgctgtctgcacacaccgggcctggctaaggtgccctcttcccgtaggtccgagcagagcatcttgacctccaccgccctcctcacagccatgctgcgccagcttcgctcccctgcgctgctgcgggaggccgtggctttcctcctgggcacagaccggcagcctgaagcccccggggacaacccccacaccctgtatgctcatctcatcgggcattgtgaccacctctctgatgaggtacagtgggggacctccatctctgttcctctcaccacccctgccagagggatttcctgaacactcttcccatttcattagtgttcccagttgactccacctttgagacactgaactgcaaaacactgccgagccacttttatcacacactaattttctatgatcatatactttttttttttttttttaaagagacagggtattgctctatcacccaggccctggagtgcagaggtgtgatcataactcactgcagtctccaactcctggcctcaagcgatcctctcacctcagcctcctaaagtgctgggactgcaggcatgagccactgttcccagcttatttttttacagtattttatattttgcacacttggctcgctggaaggctaacacgtactacttcgtgaggtaggcgaggttgatactcccatttctcagacatggaaagtaaggcacggagaagcgaattggcttgcctgaaattgcacatcaaattagtcacataccagggaccacccagacttctggattcctaggcccacaccccccaactacccccaaaacctgccaccttagcatccagccaagggaggtgactctgcctcagaggtcttttcttatctgggttagccatgccaaggcacccctgggagctgggtggggaaggggctatcctgccgacccccttcctgctccagatcagcatcaccacactccggctgtttgaggagctgctgcagaagccccacgaggggatcatccacagcctggtcctgcgcaaccttgagggccgcccttacgtggcctggggctcaccagagcctgagagctatgaggacaccctgtaagtgaaaccggcgccctttggactcagcccagcccttagcactcgcacgctcactctgtccattcattcactggtgccgtactgctctgccctggccacagagacctggaggaagacccctacttcaccgacagcttcctggattccggctttcaaactcccgcaaag

SEQ ID NO: 40103 - DNA, 2300 bp, Homo sapien
catgactgtggtctacagtaaaccacctaccccacccagcctcgtcctgtccctaaggccagacaccttcttgaccagaatcccatttgtggaccccattgggtgatgtttgccaggcctgccccatgatgtgcacgtggctctgagctacgtgggctaaacgaaggcctcctacccttccctgcaggacctcagcagggatgggcaagtgaccacagacataccagccaaacatgcgaggcaagcaggaagggttcggccacccgcactcatgtgctgtctgcacacaccgggcctggctaaggtgccctcttcccgtaggtccgagcagagcatcttgacctccaccgccctcctcacagccatgctgcgccagcttcgctcccctgcgctgctgcgggaggccgtggctttcctcctgggcacagaccggcagcctgaagcccccggggacaacccccacaccctgtatgctcatctcatcgggcattgtgaccacctctctgatgaggtacagtgggggacctccatctctgttcctctcaccacccctgccagagggatttcctgaacactcttcccatttcattagtgttcccagttgactccacctttgagacactgaactgcaaaacactgccgagccacttttatcacacactaattttctatgatcatatactttttttttttttttttaaagagacagggtattgctctatcacccaggccctggagtgcagaggtgtgatcataactcactgcagtctccaactcctggcctcaagcgatcctctcacctcagcctcctaaagtgctgggactgcaggcatgagccactgttcccagcttatttttttacagtattttatattttgcacacttggctcgctggaaggctaacacgtactacttcgtgaggtaggcgaggttgatactcccatttctcagacatggaaagtaaggcacggagaagcgaattggcttgcctgaaattgcacatcaaattagtcacataccagggaccacccagacttctggattcctaggcccacaccccccaactacccccaaaacctgccaccttagcatccagccaagggaggtgactctgcctcagaggtcttttcttatctgggttagccatgccaaggcacccctgggagctgggtggggaaggggctatcctgccgacccccttcctgctccagatcagcatcaccacactccggctgtttgaggagctgctgcagaagccccacgaggggatcatccacagcctggtcctgcgcaaccttgagggccgcccttacgtggcctggggctcaccagagcctgagagctatgaggacaccctgtaagtgaaaccggcgccctttggactcagcccagcccttagcactcgcacgctcactctgtccattcattcactggtgccgtactgctctgccctggccacagagacctggaggaagacccctacttcaccgacagcttcctggattccggctttcaaactcccgcaaagcctcgcctagctcctgctaccagttacgatggcaaaacagcagtgaccgagatcgtcaacaggtggggagcaagttaggcagtctgaaccacttgagttttattttattttattttattttttgagatagagtctcgctccgtcacccaggatggagtgcagtggtacaatctcggctcactgcaacctccacctcccgggttccggatccaagcgattcctgtgcctcagcctcccgagtacctgggattacagacatgcaccaccacacccagctaatttttatagttttagtagagactgggtttccccatgttggccaggcaggtctcgaactcctgacctcaggtgatccgcccacctcagcctcccaaagtgctgggattacagacatgagccaccgtgcctgccctgagttttactctttggccacagccctggggtccagtcagggagggagatggggtcccacaagcaggggagagcagggtgagccgggagcgcctccacaccggcttctatctctcagtttcctgtgcctggtccccgaggaagccaagacctctgccttcctggaggagacaggctatgacacatacgtccacgatgcttatggcctggtgagtggctcctgctaccagctcccacttcctgtccttcagaacagctgggtcataagctctgggttccgcctctctcatctgcccaaggaccccagcccatccctcctgcgtggggccctgtctgctggttcccagtccccaggcccact

SEQ ID NO: 40104 - DNA, 2300 bp, Homo sapien
gctgggactgcaggcatgagccactgttcccagcttatttttttacagtattttatattttgcacacttggctcgctggaaggctaacacgtactacttcgtgaggtaggcgaggttgatactcccatttctcagacatggaaagtaaggcacggagaagcgaattggcttgcctgaaattgcacatcaaattagtcacataccagggaccacccagacttctggattcctaggcccacaccccccaactacccccaaaacctgccaccttagcatccagccaagggaggtgactctgcctcagaggtcttttcttatctgggttagccatgccaaggcacccctgggagctgggtggggaaggggctatcctgccgacccccttcctgctccagatcagcatcaccacactccggctgtttgaggagctgctgcagaagccccacgaggggatcatccacagcctggtcctgcgcaaccttgagggccgcccttacgtggcctggggctcaccagagcctgagagctatgaggacaccctgtaagtgaaaccggcgccctttggactcagcccagcccttagcactcgcacgctcactctgtccattcattcactggtgccgtactgctctgccctggccacagagacctggaggaagacccctacttcaccgacagcttcctggattccggctttcaaactcccgcaaagcctcgcctagctcctgctaccagttacgatggcaaaacagcagtgaccgagatcgtcaacaggtggggagcaagttaggcagtctgaaccacttgagttttattttattttattttattttttgagatagagtctcgctccgtcacccaggatggagtgcagtggtacaatctcggctcactgcaacctccacctcccgggttccggatccaagcgattcctgtgcctcagcctcccgagtacctgggattacagacatgcaccaccacacccagctaatttttatagttttagtagagactgggtttccccatgttggccaggcaggtctcgaactcctgacctcaggtgatccgcccacctcagcctcccaaagtgctgggattacagacatgagccaccgtgcctgccctgagttttactctttggccacagccctggggtccagtcagggagggagatggggtcccacaagcaggggagagcagggtgagccgggagcgcctccacaccggcttctatctctcagtttcctgtgcctggtccccgaggaagccaagacctctgccttcctggaggagacaggctatgacacatacgtccacgatgcttatggcctggtgagtggctcctgctaccagctcccacttcctgtccttcagaacagctgggtcataagctctgggttccgcctctctcatctgcccaaggaccccagcccatccctcctgcgtggggccctgtctgctggttcccagtccccaggcccactgcctctactttcccgcctgtctcagttccaggagtgcagctcccgcgtcgcctcctggggctggcctctgacccccacacctttggacccccatgagcccgagcgacctttcttcgagggccacttcctccgagtgctgtttgaccgcatgtcccggattctggatcaggtagctagtgggcctgggccaggagaactccaggctggtgcctctggggtccttcaagagcagaggttggccacagggttgcctctgcttcggttctttggtgccacccctgtcctttccccaggtgggaagccccgtctcacccctgctccacacgtcctaacacgttctggccctcagccccatggaatccatgacacacacacatcacgtgagcctcccacccccacacacgttcacagtggccaggcaccttgctgggggagtgcaaaaatactcaccagccctgccagccctcggctctgtccaccatgttcctacagccatacagcctgaacctgcaggtgacctcggtcctgtcccggcttgccctcttcccccacccccatattcatgagtacctgctggatccgtacatcagcctggcccccggctgcaggagcctattctccgtgttggtgagggtgaggacgcctcggcccaagggagtgtgcctagtgaggtggaggggacatcagggaaagggaacggggcaggtggttgggggctggaggggtgggcacccttgccagtgccagggaaagcacagtctcccatgctctgcatggtgtggcagggccaggggactcactggtgttgctggcccc

SEQ ID NO: 40105 - DNA, 2300 bp, Homo sapien
gacatgatctcactctctcaaatcatccctgcgaggcagacaggagtctgggtccaacttcccccacttcacaggtgggaaaactgagggattcacacatgtgtgtgccgcaagacacacacacacacacacacacacacacacacacacacacacacagagcaaatatgttgacaagttgctctgcagtcctggggtcctgtgcctgcagttatttggaaggtgagaggtccatgatagggcctggcccagcggcgttcagcaagtgcctcaaaattcatgggccttctagtgatatcccacagcctaacacagggccctgcctccagggagcctgtggtcagtatcagcaggtgagaggagcctaaagagatgcatcctgcgttgctgaagttcctgagtccagttctaaggcagctctacaggcacatttcgccaggcatggtggctcatgcctgcaaccacagcactttggaaggccaaggtgggaggatcactgaggccaggagttcaagaccagcctgggcaatacagcaagaccctcgtttctacaaagaattaaaaattaaaaatttagccaggcgtggtggtgcacacctgcagtcccagctactcaggagtctgaggcaggaggatgactcgaatccaagagatcaagtctgcagtaggagctgtgatcacgccactgcacctccaatctgagcaacacagtgaaaccctgactctaggggataacaaaagtcacatttcatgagggcaggccttgcgtgtggtagcaagagctatggtggagagggaccacccctgagggttggtgggctgcctggggacggtgcccagtgctggacaatccacacagctcctctccaattgttgtggcttcccaacacccctgtaaaagaagaattgctatgatcctgctctacaaataagaaaattgaggcccacagctcacccaggagcacagagcaagccagtcagcagtggctggccatctggctgcaggtcctgagctttgtccacaccaccaagccacagtctccctagcagggaggcgcacaaaactatcagaggcagaggaaaggggtggcctctgccaggtgaggagccagacggcctgcttcgcagatcccttccagctggctttgccttccagtgctgaggtggggtgaaggaggaaaggccgagctgggagaggagcaggcgctcgccacaaccacccccaccctgctctccacgcgccaggtcctgcacgctgggtgggagggtgacgacaaggatggaggagcagggccccacccccgccctcccagggcgcaccatctgcagcagagagggccttgagctgcgtgggaaatgcggtaggcagagggacactgatgagggtgggccggctgacggcagccttctctcagccccggacccctcccgccatccccagccctgccccctccctccttccagcgcctgtcactcttcctgcccaaaccaagcatttagcacttagcctcgaaccctcagctgactcctcatctaggactccgtccatctctccaactattgcagaatctccttcaaggcaggggtttatgtcccccaccccacgggccatgtgacatttataactctttggtggaatgagaagaaaggtatttgggatatgatcaactccggcaatgccattgtgtgtttacggcaacagcgggacagtggttccagggggcggccccgggcctccgtgacgtcaccggattgtcgcgtcaccgtcgcctaccccggcggcgcaacgcgccctgcaggaaagatgacgtcaccgtcggagctcctgcagaccagtgcgcgctcggggagttggcgagcgggtggcggctgggagacgtcccgagcgcacgggactgacaggcggcagaagccgggcggggtccgctgggctccggacccgtgcccccccagttccagggcggccccgggcggccccgccccctcggtgaatgccgcgggccggccaatccgggcaggccgcggcgccgcgcagcctatcagcggccagagctcgcgtgcgcttccgcgttcgcgtgcgcttccgcgttctcgtgagctcccggcccgctgccgcagggactgggagcgggctccgcagcgcactctagcccgcggctcggctcagtcggtctgcgaggatccggcccgccgccccccgggggacccgatggcctcggagggcctggcgggggcgctggcttccgtgctggctggccaggggtccagcgtgcacagctgcgactcggcgccggccgggg

SEQ ID NO: 40106 - DNA, 2300 bp, Homo sapien
tttagatttacagctgagtcacaaagatagcacaggaagttcccaattatccttcacccagcctcccctattgtgaacatcttacataaccatggtgccttgatcaaaactacgacattaatattgataccacactacgaacgaagcaacaggcctcaccaggatttcaccagttttttcatgaatgccctttttctgttccaggatccaaccatgcctgcatttgacagatggcctggagggtagatgtggcgtccccagggtccctcagagagctagcctgtggccagccctccctctcccgctgtagcttgggttcctgccctcctcaccttcctaccttgtcaagacacaggccttgttgctctgtccatggctctagcatcacagatgccctgatacaaccttgccctgcctgtccctatccccatccccatccccatggtcgcctacccaggccttcctgctcctgtgctccccccatcccacccccaccgcacatgcgcacatatgccctgaaacggctggctctggcttggctcccaagggtgctgggagcattaagctactcccattcaccatactgtgcggcccgccacactggccagggttcttccctctctgtgactggaggacacacagttgacttgatggggacactggtggttcctatctagcctcccgtcctccctcagctgcctcccttgtctcagggcctctccagcctctgtctcactgctgttctctcccaaggccttgggaactcctgcctctttgttgtctcagcactcccttcacagtttacaagaggctttgggggagggctttaccccccgggataatgggaggcgtggagccacggtttgctgcggtctttgctctctgggcagtgaggccttctgttgtttaccttaggctgcctctgaagctcccagatccctgcctagacatgatctcactctctcaaatcatccctgcgaggcagacaggagtctgggtccaacttcccccacttcacaggtgggaaaactgagggattcacacatgtgtgtgccgcaagacacacacacacacacacacacacacacacacacacacacacacagagcaaatatgttgacaagttgctctgcagtcctggggtcctgtgcctgcagttatttggaaggtgagaggtccatgatagggcctggcccagcggcgttcagcaagtgcctcaaaattcatgggccttctagtgatatcccacagcctaacacagggccctgcctccagggagcctgtggtcagtatcagcaggtgagaggagcctaaagagatgcatcctgcgttgctgaagttcctgagtccagttctaaggcagctctacaggcacatttcgccaggcatggtggctcatgcctgcaaccacagcactttggaaggccaaggtgggaggatcactgaggccaggagttcaagaccagcctgggcaatacagcaagaccctcgtttctacaaagaattaaaaattaaaaatttagccaggcgtggtggtgcacacctgcagtcccagctactcaggagtctgaggcaggaggatgactcgaatccaagagatcaagtctgcagtaggagctgtgatcacgccactgcacctccaatctgagcaacacagtgaaaccctgactctaggggataacaaaagtcacatttcatgagggcaggccttgcgtgtggtagcaagagctatggtggagagggaccacccctgagggttggtgggctgcctggggacggtgcccagtgctggacaatccacacagctcctctccaattgttgtggcttcccaacacccctgtaaaagaagaattgctatgatcctgctctacaaataagaaaattgaggcccacagctcacccaggagcacagagcaagccagtcagcagtggctggccatctggctgcaggtcctgagctttgtccacaccaccaagccacagtctccctagcagggaggcgcacaaaactatcagaggcagaggaaaggggtggcctctgccaggtgaggagccagacggcctgcttcgcagatcccttccagctggctttgccttccagtgctgaggtggggtgaaggaggaaaggccgagctgggagaggagcaggcgctcgccacaaccacccccaccctgctctccacgcgccaggtcctgcacgctgggtgggagggtgacgacaaggatggaggagcagggccccacccccgccctcccagggcgcaccatctgcagcagagagggccttgagctgcgtggg

SEQ ID NO: 40107 - DNA, 2300 bp, Homo sapien
gccattctcctcatggcctccttcctttcccaccacagcctgtgttggtgtcagggatccaaaggacattgcagggcaacctgtgggggacagaagctcttggggcacttggaggccaggtgcaggcgctgagccccctcggacctccccagcccagcagcctgggcagcacaacattctgggagggcttctcctggcctgagcgtaagtgtccccaacacaggggagagggagctgggagcccaagccctagggatcgggtggcagaggagtcccagggtgaccccgaggggctggaagcaggtgttgctgccgccggggcaggggcttcagggctgaggaggccaatggccgttctgtctcctcctgtagttcgcccaaagtcagacgagggctctgtcctcctgctgcaccgagctttgggggatgaggacaccagcaggtgtgtatgtcaccaagggccagccctacctccccgccaccgcaggccccgcctggttcagccctcccctcctcctctgcccccaacccccaccccgtggtccctggtactctcatgtttgccctctgggagttaccccggtggtggtggggctttgatggggtctctggtgcccaggttgggcctgctgggcatgaccccctaccctgacagggtggagaacctagctgccagtctgccacttccggagtactgcgccctccatggaaaactcaacctggcttcctacctcccaccgggccttgccctgcgtccactggagccccagctctgggcagcctatggtgagtgtccctccactcctgcccagtctctactcccatgcctgtctgcctgtcatctcggggcacacgagcgtctgtgccaaggccctggggcctgaagcgcttctctgattccatttctttctttctttttttttttttttgttgttgttgagacggagttttgctcttgttgcccaggctggagtgcaatggcactatctcggctcaccgcaacctccgcctcccaggttcaagcaattctcctgcctcagcctcccgagtagctgggattacaggcatgcaccaccacgcccggctaattttttctatttttagtagagagggggtttctccatgttgaggctggtctcaaactcctgacctcaggtgatctgcccgcctgggcctcccaaagtgccaggattacaggcgtgagcaaccgcgcctggctctctgattccatttctaactgttctttctctattgccatgcaggtgtgagcccgcaccggggacacctggggaccaagaacctctgtgtggaggtggccgacctggtcagcatcctggtgcatgccgacacaccactgcctgcctggcaccgggcacagaaaggtaggtcctcggccagaggcaggagcggggacaagctacagaggtgagtgtttgtcgccaccagccctgggcctgcctgagcgctctttcctcctcagacttcctttcaggcctggacggggaggggctctggtctccgggcagccaggtcagcactgtgtggcacgtgttccgggcacaggacgcccagcgcatccgccgctttctccagatggtgaggaggcagccgggagccctccccttccccccgcccagccctagaagctcgtccagtcccaccccagtgtgcggtcccatgtgctcgctccctgccccacgccctcaggtgagctgcacagacccaactcgcacagacaggtgcagagaaggcagaggggacccggagttctgccgtggggctcagagaaggggcaggggctgcggcaggagagcctggacccgatgatgaaatgagagcaccagctgcccgaggctggacgtggtgctagggccttaggcacaattatctgttacccgtctcagccccccgccccatgaggcaggcactgctcctttcccattggcagatgagaacaccgaagctcagtggcagggctgggatctgagcttctgtctgtcatggccccaggtcactactctatgctcttcctggaggcaggcagcctcctctgccttctgagactccgtccggctgcccaccttttggtatttgcatcttgttaggggagactgcctggaggagatgctcccggaggggctagcaaggaagggggctgagggaagtggagggagagatgggtcaggtgaggagccagggaaggggaaggtgatggggtgggctggaggcaagaagcttgaggcgcaggggaggagagagtccaggggtaaggcgagggcagccccgtggttcccaagtcc

SEQ ID NO: 40108 - DNA, 2300 bp, Homo sapien
aagctggtgcggccgatccgcgccgtgtgccgcatcctgcagatcccggagtccgacccctccaacctgcggccctagagcgcccccgccgccccgggggaaggagagcgcgagcgcgctgagcagacagagcgggagaacgcgtcctcgcccgccggccgggaggccccggagctggcccatggggagcaggcgcccggtgccggccacgacgaccgccaccgcccgcgccgcgaccggccggtgaagcccaggtaagcgccaggagcgcgccgtctggggacactcgtggcgggggatttctgagccgagcctgcggtgcccgtacggagcgtgttccccgtgcccctgtgggctgggccacacattctgacacctgaaagttaggaagcccgacgcggccagaccacggcggagcggtggctccagaaaacctgggcgccctctgccactgcgccgtcacctcccgcctggggcttcgtcgctctggccgaagggaccgcgccaaggcagcgctgccgctctagtgccacctgtcatcctggtcccttgcacgcacgttcaattttccctcccttgcctctctctggggcccagcccgctttccccgcctccttccctctcccctccccgccaggctgaagtttccagcggcggtggcggctgccctggcactgctggctgggctagggcagcttgacccatccagctgaggcttcttaatccccctcccctgtgccggcgcgctcttcccgctgggggccagggcggggttcctagccccctgcagttgtcctgggactctgcttgagaagccgagaaactgcagggctctgggaagaggctgactcagggccgcccaggtgtagagagagacacagccagcggccctggctggcagcgttccccagcgactccagcctgccaggcctgcacttcccacggctacaagcctggctggggctgtaggctagggttgggctagcagcacccccaaaaccacggattgcaggatgggaagaatcctctgagccgacccaagcctcaagggcacactgaggcccagaggagtgacatgatttgcccaaggccatacagcataggacagagtcaggctcaggatccagcctttttcttcattcagtgccttccactttctgtcctccctcatgggtcgtgagcagattcctagcttggtgaggccaggacatgccctactagcaatggcagcctccgctgaggggcactggcccaggtggaatttggggaaggggtaacatccccacactggaggagcaagatgtgtctggctgcatgtggagaggcagcatggtgcccagttgtgggctggcacttgccttactggtttgagctgcctcagtgttgccagggcggtgcccactctgtgccaggctgtaaggtgcttgggacatgtgccccagaagctcatgctttgatggttatgctccagggacccccctctgggagagccccatgagggcaggagagtgatggagagtacgcccagcttcctgaagggcaccccaacctgggagaagacggccccagagaacggcatcgtgagacaggagcccggcagcccgcctcgagatggactgcaccatgggccgctgtgcctgggagagcctgctcccttttggaggggcgtcctgagcaccccagactcctggcttccccctggcttcccccagggccccaaggacatgctcccacttgtggagggcgagggcccccagaatggggagaggaaggtcaactggctgggcagcaaagagggactgcgctggaaggaggccatgcttacccatccgctggcattctgcgggccagcgtgcccacctcgctgtggccccctgatgcctgagcatagtggtggccatctcaagagtgaccctgtggccttccggccctggcactgccctttccttctggagaccaagatcctggagcgagctcccttctgggtgcccacctgcttgccaccctacctagtgtctggcctgcccccagagcatccatgtgactggcccctgaccccgcacccctgggtatactccgggggccagcccaaagtgccctctgccttcagcttaggcagcaaggtgagtgcaggggcagagagggtacctgtggctctggcctagcaaagttgctcggtggtccccaagatgcccttccactgtgatgaaaagagaaggcagcaccgaggtagaggggtctatcagcttggagctgtcccaggccccacagtcaaccccaagcaagccctaccctgagca

SEQ ID NO: 40109 - DNA, 2300 bp, Homo sapien
gagaacacagatgggggaccacagacacaccccagcccttaccttcacccctggagccagcctgggagtgggaggccgggcctcagggcctggggcctccagtccatgttagaccctctacaagcatctcccctggcacactcaggtcccagccaccctcaggggagctggggaggaagggagtgttactaactcagtcatgtaaacaacccctaccagcctgccttgccacagaactggcctctgggggcaggccaggggcagggtgaatggatgccaacatggcccaagtccggcccagtgcccgctcctttagacccccgctccccaggacccccactcttctcaaccggtagaaggctctaggccttgctcatcccttaggaggaaggctcctggctattcagggctcccctctgcagggatggtggtgtgacttgggaccaagctagaggcatccagaacccatcgcttgcaagggatgggaaagagggagtgcagcttctgtcccaggcaggccaaggttggcttccgcagggaggcaggggagccgagggtgggaggtgggtgcctgaggggaagggaagcgcccgttgggcgtgtgggtttctgtgtgagtctgaatctgtctgtgtgtgtttgaatctgtctgtttgtgtctgcactggaaccacccccgcagcggagccgggatgcttcctcgggtggagggtgccctgcttttccatttcctctcctcctctctgcactctcccgggagccactcccatgggcgcctctccagcccctggcctggaagcaccaggaaccctggggatggggcagaccctcacagcccggggtctggagccggtgtcggagctcatctgggcccatgacctctccagacatttggcaaaatcaaggcccttagaccagggacagacccaagcccaggccctcccagaggtcctaggacgcaaccctttgtgcccttgggctctggaagaggtttgggaagggtttggggtggaagatggcaaagagcagcttggccaggtgaggatgaggcagggcagacacaggccagtggggcgtgccatgtgccacagatggagaggaccaggagccagtggcccggcaggcacagcccggttggcgtgggccagagcgcccatcactgacccgtgagaactcgactgcccctgccagctctggcactgccccctcccagccgccccgccctagcaccctggggggcaccccgcccaaccgtggcctggtccggcccctcccgccctttgctccagttcccgggcttggcacctatagtgggggtgccgcccgcctgccaggctccggggccgggcccacgggagggtggggcggctgggaagctggcacgctgccccgggggagcctctctcggcaggcgcccgggtgccgcgggggggagggggaacaaagggctcattctccccgtgcgcagccggtggcatcgccggggcgttggcggaagcccccggggcccgggagggggcaggcccaggcgcggccgccgaatcacgggctcctgtttcccgcagggtgctggaggaggaaaccggcggagcagcttccccactctcagttgcgcttctggcgatggcgatcagaggtcctgctgcgctctccgccgcgctctacctccattagccgcgctgcgcggtgctgcgccctcgccggtgcctctctcctgggtcccaggatcggcccccaccatccaggcacgacccccttccccggcccctcggcctttcccccaactcggccatctccgacccggggcgcgtgttccccccggcccggcgccttctctccctccgggggcacccgctccctagccccggcccggccctccccgcggcgcagcacggagtctcggcgtcccatggcgcaacctacggcctcggcccagaagctggtgcggccgatccgcgccgtgtgccgcatcctgcagatcccggagtccgacccctccaacctgcggccctagagcgcccccgccgccccgggggaaggagagcgcgagcgcgctgagcagacagagcgggagaacgcgtcctcgcccgccggccgggaggccccggagctggcccatggggagcaggcgcccggtgccggccacgacgaccgccaccgcccgcgccgcgaccggccggtgaagcccaggtaagcgccaggagcgcgccgtctggggacactcgtggcgggggatttctgagccgagcctgcggtgcccgtacggagcgtgttccccgtgcccctgtgggctgggccac

SEQ ID NO: 40110 - DNA, 2300 bp, Homo sapien
accagaggtctcaagagctgggtagggggcagacgcctgggcaggaggaggattctctgctgctggagaagtcctgggggccacagttggtgtttccgggtaggcacaaaggtctcaagcccagggcagagtggagctggcttcctctccccggtgggtagcttgtgggggtaacctggaggggaggggaggtggggggaggaggaagcgcactgggaggtgcagactgagaagaggaattaggttagggatgtaggtgggtgggcgggaggggatggcggcatctgctttggagcttcctccgggttccaaacgcatccccacacttcccttcccctcctccccacaccctgcccccacccccgcgggtcccgggagaattcgcctggtattcccccttccccatcccccaccaggcgttgccacagggtggggggtggggtggggggaggccagcctcagctgtctgaaggatggaggggctggggaagcagggctaggtgcccagacggccgcgtgtgtgggaggggatgtcctcagatgccctccacccggcagtccccgctctgacgtgggtgccccccctctccccgcccggattagtggcagcttggcctgactctccggggctccttcccccgcccccgcctgctgccctcccctgggccgggggctgctccgcccggggggcactgtgcttgcccaggtaaggggctctggggatggcatgagggccgccggctcgtgagtgctgctgtgcccgtcagcacgagcgtgtgtcagcgagtgagtgtgtgtcagtgagccaggggtcggtgcggggctggggcttggcccctgaatggctgggggtgctggtcagcttgcctttgtccacaagtctggcattgtgtccacgcgccgtgtggcttttcttctgtgtttgtgtcttttgtgtgtctcctcagctctgctccgtcttcaggcacagaacagccggctacaaggactctgtgggcctgtggcatgggctccaaagcgggatggggagctgggcgagggtggggaaggggtccttcctcccatcccgcgagtccccacgagcccctgggcttttcaggagcctgtccccaagagccctgctactctagtccagggaccgtggcctgacaaagcagacatggcaactggggttgggggggatatctgccccactcccctgggatagtccccatcccctttggggatgtcagcgataggtcctcagggttctggacagcgcaggctcccatcttggcctctccgaggccccaagccgcaggaatctccccctggcactcccacaagcttcggctgctgaggagggagcacagagaacacagatgggggaccacagacacaccccagcccttaccttcacccctggagccagcctgggagtgggaggccgggcctcagggcctggggcctccagtccatgttagaccctctacaagcatctcccctggcacactcaggtcccagccaccctcaggggagctggggaggaagggagtgttactaactcagtcatgtaaacaacccctaccagcctgccttgccacagaactggcctctgggggcaggccaggggcagggtgaatggatgccaacatggcccaagtccggcccagtgcccgctcctttagacccccgctccccaggacccccactcttctcaaccggtagaaggctctaggccttgctcatcccttaggaggaaggctcctggctattcagggctcccctctgcagggatggtggtgtgacttgggaccaagctagaggcatccagaacccatcgcttgcaagggatgggaaagagggagtgcagcttctgtcccaggcaggccaaggttggcttccgcagggaggcaggggagccgagggtgggaggtgggtgcctgaggggaagggaagcgcccgttgggcgtgtgggtttctgtgtgagtctgaatctgtctgtgtgtgtttgaatctgtctgtttgtgtctgcactggaaccacccccgcagcggagccgggatgcttcctcgggtggagggtgccctgcttttccatttcctctcctcctctctgcactctcccgggagccactcccatgggcgcctctccagcccctggcctggaagcaccaggaaccctggggatggggcagaccctcacagcccggggtctggagccggtgtcggagctcatctgggcccatgacctctccagacatttggcaaaatcaaggcccttagaccagggacagacccaagcccaggccctcccagagg

SEQ ID NO: 40111 - DNA, 2300 bp, Homo sapien
ctgctgcccagtagaaagataaatatcactttgacagctgctgcccccaggggggagctcttctgaggggtgggaggcactttcctcccttggcccgagtgcctggctttctgtgtgtgcctgctgggtcacttgccctggggcttgtccacgtccagagtgctgcttagcaacccagtggaattgggtgactgtgtcaacagctcaggaccaaaggctgcaagaggcaaggtctactcactctgccaagaccagggatggtgacactcctcagctgccagcctcttgccctccgtgctgagccttgctgtcagcgcagacctctgacatctcttctctgagatttcccaagcacaggcattgggaccaggagtctccatacgggagaccatcccagctgaatgagctttgggcgggcccaggtaatgtttcccagcaaatgggggtagacagaggcctgtgatgctgaggtcaggtgcgtggccccagaaggcagccagcagggaagggacagttctgcagcacgcaccaaaggacccgaggctcacgtgtgcagtgacctcctgagtcatggatgtccctttcagctgctcccctattcagtcacagctttcctccttcagggagacccaggacacttttcacctagagaaccatgtctgtgcctaaagatggacagtggctggggccttccttaggagttcctctagcccttggcctttttggttactccaatgtgtgtgtgtaaggggggacaggtaaatgtgagggttggttaagagaggagagggagacatggggcctcggggaagtttctcctgtgggctggtttcactgctggctctcacacccagcaataccaataaaactgatgacagtaattaagaccatataatcaccgtgtgtttatttatcccccagaagcctcctttccctggccccatgattacctattccatccttatgatagctggtgggggttaactgtggctccaataaaaagcagtaactgcctgtgtttccaccccacatgcccggacagctttgctcccaccctctgcaaggtggggggacactattttcagagggaacaacagaggcagtaagctgaagatgtcaaaaagaatgaaacctcacagggcaagtagtagaagcagcaacgtttgccttcttttttagagccttcccccttcttcctggcatctgcctccctcccagaggaacttatccggttccatggccctctgcagggccactcagcctgcagctgctgatctctcagaagactgatcaagccaagcatgtagccaccagccagcaataaataccactgggtgataccaggaaagttacttttcaccactgagcatcctatttcctacatggttaaaagaagtttgcaaagactaagaccttgcgtgcaaacgtgcattacaaaatggcaatggttgatactactattaagggcccagggttatttgtgtacttggctcagaggaataggtggaatttcaaacttctgctgaaggagtgtgggagctgagagctctacccagaatgcctcaaatcatcgcggtcagcctgccccggagtcagggatctggaaaggcatcccagagagaagggaacccctgaaacctggtggggcaaaaagtccctcaggttccctctccccccacacctcccccctttccctcctggacccactggtgtgagacccggacttgctggcgctcagccaagcttccttccagctcctgactgagcctgcagaggagatccttccctctaccccaccaaccgcatctcatgcctttacccggttcacagaggggaaaatgaggcgagagggaaagacaccgggaaaagccagtgaagggtcgcttaaactctggagtccagattttctttgtgtgccgacccccgcactccccctgcttttttgttacagcttcccacacgctaatctttccgattgggaaggtggctccactgtgggccccacgcgcgagtcccgcggcacatcgcccctttaaggggccggcctctcgcctccctgacctcgccccgccccctccggggctacactgcgcctgcgtggcaagccggagccctggggttgggcagcactcggttccgtgcaactttcaagtgagttgcgaactccgccctgtaggccggtgctggtggcccggcgcgctggaaccgcggcgacccgctccagcgcgggaccagcagcaagggccgagcgccaggttctccgcggcagaaagggcgggtgggagctgtaactgccccgg

SEQ ID NO: 40112 - DNA, 2300 bp, Homo sapien
gtgtgtgtgtttttttttttttttaattatagacggagtctcactctgtcacccaggctggagtacagtggcacaatctcggctcactgcaacctccacctctcaggttcaagcgattcttcctcagcctctggagtagctgggactaagggactataggtgtgcgccaccacgcccggctaattttttgtatttttagtatagacggggtttcaccatgttggccagactggtctcgagctcctaaccttgtgatctgccaacttcagcctcccaaagtgctgggagtacaggtgtgagccaccgcgctcagccaaaaatgtgctgagccaccgtgctcagccaaaaaaaggctgggtgtggtggctcacgcctgtaatcccagcactttgggaggccaaggagggcgaatcacctgaggtcaggagttccagaccagcctggccaacatggtgaaacgccgtctgtactaaaaatacaataattatctgggtgtggtggcgggcgcctgtaatcctggctacttggaaggttgaggcaggagaatcacttcaacctgggaggcagaggttgcagtaagccaagatcatgccattgcactccagcctgggcgacaagagcaaaactcagtctcaaaatattaaaaaaaaaaaaaaaaaagtactttaaaaaattttttttttttttagacagagtctcgctctgtcacccaggctgaagtgcagtggtgccatctcaggtcgcggcaacctctgcctcccaggttcaagcaattctcctgcctcagcctcctgagtagctgggattacaggcatgcaccaccacacctggctaattttatatttttaatagagatggggtttctccatgttggtcaggctggtcttgaactcccgacctcagttgatccactcgcctctgcctcccaaagtgctgagattacaggcctgagccactgtgcgcggccaacatgtgctttttttttttttttttttgagacggagtctcactctgttgcccaggctggagtgcaatggcgtgatctccgctcactgcaacctctgcctcccgggttcaagcgattctcctgcctaagcctcccaagtgctgggaccacaggtgtgcgccaccatgcctgggtaatttttgtatttttagtagagatgggatttcaccacgttgcccaggctggtctcaaactcttgaccttgtgatctgcccacctcagcctcccaaagtgttgggattacaggtgtgagccaccatgcccagcctgtgctttttaaatgtatgtttgattggactctacattaaagtccaatcagcgggaggggattttgaaagtttcgagtaaggaatatatagcatatagtagtatatagcagagccacactcatttattgttatttataagaaaataaaagccttggattgtgggaggcttagaggagcagggatgcaacatacagctgtgcaggatgcacactgcaaaagccaacctagccaaagaagtcagcaaggactgaaactgattccatactctgctggccaagcctgtgtctgtggggctacatccagccagagggaaacttttctctaatcttacaaagatgcatgtgagcaacttgcagcagccttgaccagctctatttctgaaaacctggagggcctgggtaggcagagccctgagagcatgtctttctctgtgcccccctcctctgccctcatgatgcagggacctgcggggcaactcactcaactgtgactgcaaggtgaagtggttggtggagtggctggcacacaccaacaccacggtggcacccatctactgcgccagcccgccccgcttccaggagcacaaggtgcaggacctgccgctgcgggagttcgattgcatcaccacaggtaggaggtgcccctgccttgggtgtcagtccacgcctaccccaaggcagctttacagacacgaaaccccccaccctgccccacaacacccagcggcagcagtaaagcaaccaccatcacccaagcagcccttcccttctccctctggtcttcagtaacgcacctctcatcttgcagattttgtgttgtaccagaccctggccttcccagcagtgtcggctgagcccttcctctactccagtgacctctatttggctctggcccagccaggagtcagtgcctgcaccatcctgaagtgggactatgttgagcggcagcttcgagactatgatagaatcccaggtacctgcgcccaatctggttctgctggcccttgctagggggaggggggagtg

SEQ ID NO: 40113 - DNA, 2300 bp, Homo sapien
gaggacaggagaacccccgctccccctcttcagagtgcggggaccagggggactgcaggggtcctcagggctggagattccaggcaccagtcgggcagggagttctgcagttttgcaggctcagcggccatgggtggggaaagcaggagttcaccaccaagaatgaatcatcatcaccacgagcgacagtgagacctactgtgtgctgtgctccagacttgggggggttgcttacacgagcatgtgggcccctgcctgtgatgtcacaccaagggcaggagagtggcggccagagcaggatgagaatgagctatgccctcccagcaccctggcatggggcacatgcccgccactgaccagccacttggcactcagctcggccagcctgtcactcacaacagccagcctcaggggctcccccttgtctgtgggaccagagaggttgtgaggtccttggggaccaggatgccagcccccacccccatgccccatctctcaacagcacccagcccattgtgggtgtttggatgatgatgacaacggtgtgggtgatggaaccttttcttgcctgagagggaagctgagcctggggccatgggtgccccaagaggcaataggggaggaccctggtgaaggcaggcagtgaatttgggaggagaagggaaagacacacagatgggggctaaattaggtgaaatggggcatttccagggcaagtgagtacaaaagctactgccctccgtgttcacctctccctgcctcagcacagcccttgcagaccccacagtactgactcgggtgtccccgcaggaccctggtgaatgccgccttctcagagatccaggatggagcgttctcccacctcccgctgctgcagttcttgtatggatagggccttgtggaagggttgggggaactatggggtggtagcaggggacaaatcctgggctggggagagggagagtggacagaggcagcctctgcagacgaagatgcaggtgtcccttgcttttgttctgataggatgtacccaaaagacggggcagccttgagtcaggggagtcggggcagcaggaggacagctagggatggcacagagaagccaagcaagtgggatgcggggatgggcttggctgctctggaaaccccagagaattgggtgcgatagcctgggctagtgcccaaggtgggcactgtggggccatcttagagacaggtgatcccaggaatcagagttcccagaaagagctgggggctgaaagaaagggatggcaggagtgtctccaaccctacaagatgccgtccatgagggacagttgtccatgaggggctggaatgggacagaatgagggtgggggagagggagaggagatgccacccgggaggaccaggagctggcttgacaagagagctctgccttggcccatgtttaggatccaacagggaccctgggagcttctggggccagaacaggctcctgcctggccttgttgcccaggtggcccagggattccccatggggtccccaggggtagcagcagggcagtcatgtcttggggaagcccagggctgaggcagcgggctgggggctggggcagcaggcacacccttggaagctctaattccacctttgtctctgcaggttactcaactccaacaagtttacactgattggagacaacgccttcacaggactgtcgcacctgcagtatctgtgtgtgggagggaaaggggcaatgggaaagcagaagggagggggaccccaggcctgggaggccgagggactgggtagggagtggatgagaatgccgcaggaagggaaggtgatgggaggcgagagcccttgcatcccgtgatggcaggacctgagcagaaggtcgtttcattcattttgcctctaccctacctgatgctctatctctatggcttggtgatgccagactccatttggaaacctgtctcggggacacgggctgaaatctaggctggggcgtagggcgagtgctgctgggggtctggcatcctgtgtgagcactgaggcaagttcccgctttccccagcttcattgagaacaatgacatctgggcactatccaagttcaccttccgaggactcaagtccttgactcacctgtgagtacgtcacacatacacacactgcaccaaagccccacctctcctgtggcctttggccttgctcatgatcttcagatgacctggcggtctcttttgcagctcgctggccaacaataacctgcagacactgcccagagacatcttccggcccctggacatcctgaa

SEQ ID NO: 40114 - DNA, 2300 bp, Homo sapien
gctggcacctccctgccaccggcagctgctaccgcagccaggggcccgcctgcggactcctcctgccctcgggcgccggctgcggtcccctcccctgctcgctcccgcgatccggctcgggagagaagagcggagcgcggagctggagccgcagccggggctgaccgcgccgggtggctgcggactgcggcgcgggcggcgggggcgcgcgcggggcggcgcggggcctgggagtcacggaaggggaggcgtggccgctgtgtgctctaccgggcggtctctggggccatccgcgtgtggggctgcgcgtgagtgcatgcgtgtgagcttgtgcttgtgcctctgctgggcacgactgtgcgcgccggtgctcacctgtctctgcacgggcacatgcactcactgccttgtggaggcgcttcggcgttagggatccctgtgcttctgtctacctgggtttctttgcatggggggacacatcccctaggcagcatcatgggcatgtcgtgagtgacagacgcatatctaagttagcatgcaagattagaagcacaagggcgtcctggaggagtctgaagtgcgcttctaaccggattcacatgtttttccacgcgccgctgaacagaatgtacctttgtgtcagcatgagctgaaaagggaaacgcagcctctggagctggagtgggactgtgtggaattctggaacatttctcacgctcaaccacagcctgttaaagctgggaagcgctttggatatttttcagtccagccctttgtctaacaaatgaggaaactgaggccccctaagcttgctatcgcaagtgctctgtactttccctacttaatcctctcaatcgtttgaggcaggtgatagtaattcccttttacagacaagaaaagtgaggcctgtcgcaccagaagaaaaaggtatcagcagggatttccgcccactctgcccagcttcaaggttcacggtcgtccttccatgcacggctcttccaagtgtagccctgggagcccgggggtccttgagaacctttcaggaagtctctgaggtaaaaacaattttcctaatattgttaagacatgatttgcccttttcacttctatgaagctccaaatttaaaagatttccaaaactgtaaagaaatgacactttctctctaattttattttgctttgtaaaataattttgctttgtaaaatcgtttttccattaaaaatgtgatttatgtcataacctatattgggtttattactgatattttaaattcacatgtaaataaaaatgtaatttctcagtaaatatcaacagacatatcccacataaacaaaagctcttgggggtcctcaatactttttgagagtgttaaggggtcctgaaaacaaaaagcttgaagactgctgctctctaccacgttagctcccctgtggcggaggatgactgtcctaagagctcataggcacggggcaaggggagcctggctgtcagctgcctgggcttctagtcttgtgctttttgcacaccagtccagggaacgaagaccactggctttaagatgcttccccagctgtccccagactctgccagcaggggattctctggtctgagcttaagttgtgttctcccagccagggatgcccctgccctttgatgtctccttgctgccacacatttagccgccctccccatgccagcttggggggagggaagcagtgagggtagggaggtggctggggcagctgggcaactgtccccacccgtccctggcacggctctgcccagtacacaaagagcaaagtgaatcttgtccccacccctgcagctgaggggctggaggaggaaacggggaggcccacacagaaggggtggccaccgtggggctgtccatcactcagggctctcagagggagtcaacccagaaacagacaaagagggtgagtctgggctgtgttcttagctagtgagaggtcccctagaggatgaagtagatgatgctaatgaggatgactggatgtcacacccatgatgctattaggtcctcataatagcatagtgaggtggacagctagtacctgacccatctcacagatgaacatactaatgcctaacaaagcagaacgactcacgctgggtcccagagctggccagtggaagcactgagacctccacatactgaaggcatggactattgaccgctgttggtattggtctcatcattgactatcattaagtgttggctgtttgcatgcttcctgcccagtggcaggttcaaagaagcccgcaggaagcgtgctcc

SEQ ID NO: 40115 - DNA, 2300 bp, Homo sapien
ctgggaaagaaaggagcacgcttcctgcgggcttctttgaacctgccactgggcaggaagcatgcaaacagccaacacttaatgatagtcaatgatgagaccaataccaacagcggtcaatagtccatgccttcagtatgtggaggtctcagtgcttccactggccagctctgggacccagcgtgagtcgttctgctttgttaggcattagtatgttcatctgtgagatgggtcaggtactagctgtccacctcactatgctattatgaggacctaatagcatcatgggtgtgacatccagtcatcctcattagcatcatctacttcatcctctaggggacctctcactagctaagaacacagcccagactcaccctctttgtctgtttctgggttgactccctctgagagccctgagtgatggacagccccacggtggccaccccttctgtgtgggcctccccgtttcctcctccagcccctcagctgcaggggtggggacaagattcactttgctctttgtgtactgggcagagccgtgccagggacgggtggggacagttgcccagctgccccagccacctccctaccctcactgcttccctccccccaagctggcatggggagggcggctaaatgtgtggcagcaaggagacatcaaagggcaggggcatccctggctgggagaacacaacttaagctcagaccagagaatcccctgctggcagagtctggggacagctggggaagcatcttaaagccagtggtcttcgttccctggactggtgtgcaaaaagcacaagactagaagcccaggcagctgacagccaggctccccttgccccgtgcctatgagctcttaggacagtcatcctccgccacaggggagctaacgtggtagagagcagcagtcttcaagctttttgttttcaggaccccttaacactctcaaaaagtattgaggacccccaagagcttttgtttatgtgggatatgtctgttgatatttactgagaaattacatttttatttacatgtgaatttaaaatatcagtaataaacccaatataggttatgacataaatcacatttttaatggaaaaacgattttacaaagcaaaattattttacaaagcaaaataaaattagagagaaagtgtcatttctttacagttttggaaatcttttaaatttggagcttcatagaagtgaaaagggcaaatcatgtcttaacaatattaggaaaattgtttttacctcagagacttcctgaaaggttctcaaggacccccgggctcccagggctacacttggaagagccgtgcatggaaggacgaccgtgaaccttgaagctgggcagagtgggcggaaatccctgctgatacctttttcttctggtgcgacaggcctcacttttcttgtctgtaaaagggaattactatcacctgcctcaaacgattgagaggattaagtagggaaagtacagagcacttgcgatagcaagcttagggggcctcagtttcctcatttgttagacaaagggctggactgaaaaatatccaaagcgcttcccagctttaacaggctgtggttgagcgtgagaaatgttccagaattccacacagtcccactccagctccagaggctgcgtttcccttttcagctcatgctgacacaaaggtacattctgttcagcggcgcgtggaaaaacatgtgaatccggttagaagcgcacttcagactcctccaggacgcccttgtgcttctaatcttgcatgctaacttagatatgcgtctgtcactcacgacatgcccatgatgctgcctaggggatgtgtccccccatgcaaagaaacccaggtagacagaagcacagggatccctaacgccgaagcgcctccacaaggcagtgagtgcatgtgcccgtgcagagacaggtgagcaccggcgcgcacagtcgtgcccagcagaggcacaagcacaagctcacacgcatgcactcacgcgcagccccacacgcggatggccccagagaccgcccggtagagcacacagcggccacgcctccccttccgtgactcccaggccccgcgccgccccgcgcgcgcccccgccgcccgcgccgcagtccgcagccacccggcgcggtcagccccggctgcggctccagctccgcgctccgctcttctctcccgagccggatcgcgggagcgagcaggggaggggaccgcagccggcgcccgagggcaggaggagtccgcaggcgggcccctggctgcggtagcagctgccggtggcag

SEQ ID NO: 40116 - DNA, 2300 bp, Homo sapien
ggtttaaaaaaagaaggagaagaagcagcagcagcagccgccacagagcttgtgacagctacagcctaagggcaacaggcaggggagaccaaggaccagaaagagcagaggctttttcaaagaaagagatccctctcccagcacccagcgatggcggcaaaccccacccacagtgcctgctaagaacaagtcccacgtgagaacaacatggccccccgagatgcccacagggaccccgagatgcctgcagtgcttggctctcccgctggccagctgcccacctggctcaggcccagtactcgtgagtcagccgatcaatcccaatgttgccaggatgatgggggcgggagtaagggccctgggggagggcaggggtgggcactgcaggcgagctgtctcccacatctggcacctgcacacagctgaggccgagctgagaggatgcttctgtgggctccccctcctcccggcacccctcccctcctttcactgtcctaggacactctctggctgctggagtcttaggcaaatatttaaaggggcagcaagggggtgaggagggtggtgggagcaaacacttccctccctttcttcctccctgcgcttctcaggggctctcagttcagatgccatgctgttatgcaaccttggggctgaaggccctccagatggagagggggacaggggaacctgccagctcatgaccgaagggcagggcccaggtgggagggggctggggcaggggacaggaactggggtggcatgttaaaggacaggaggctggttgggcatggtggctcacacctgtaatcctagcactttaggaggccgagatcacttgagcccaggagttcgagaccagcctgggcaacatggtgaaaactcatctctataaaacaagcaaaaattagctgggcacaatggcatgcactggtagtcccagctacttgggatgctgaggtgtgaggatcaccggagtccaggaggtcaacgctgcagtgagcagtgatctcgctactgcatgccagcctgggtgataaagtgagaccctgtctcacaacaaaacaaaacaaaacaaaacaaaaggataggaggttaagggagcgagcccaggcctggactctgccacagtcacctgagtttagaggtgaagggactttagagaccacctggcccaaggagtgaaagggaacctgagagaaagggtgagccagcccaaagtcattggcagatttgacctcgtaaatacatagagatggctttgggaaggcactaggaaagacagagaaaagagaaggagacagtcctcaaagctgatcgtatttgggtgagtattattctcagggcaaatttaggatcagaggatgcagaaaggggagtctagaggggtagagtgtagaccacagggtgagtgagctgattcgaggatggggagactgggagcccaccagtgaccagagccagccctgttcagggctgtccgggcagaagaaagcagtgtcagacctggaatctgccatcagcacagcctgcaattgacagacaagcccagagcaaagaaggaagcactgcacatgagtaagagcttgccaccagtggggacagagtttccagaattaggaaaataatcactgggggcaagtttgaggttggtaccagatatgtgggaggaggcaaggtaagggaaagagtacttgaagttggaactggtccttgcagggaaatgcacatttatgaaaccccgaaaactgatgtcaaagcacctcctgccttgggcagagtcctctcagagtctacaggtgctgcctccagaaccctcttcctggagcgcatccctatgtatctagaaattctgctgggaaatatgatggtcagacccttggccacctgaaaggttcagggtggtagaagaaaaaggaaagccacagggcagcaggggcaggtgccagcaaggaaggcaggcacgccaggaagacacccatggtgagaagtgcagatggcccgagggcaagtttgctcaactcacccaggtttgctcttgctggggccaagaggactcatgtgccagggccaagggcccttgggggctctcacagggggcttatctgggcttcggttctggagggccaggaacaaacaggcttcaaagccaagggcttggctggcacacagggggcttggtccttcacctctgtcccctctccctacggacacatataagaccctggtcacacctgggagaggaggagaggagagcatagcacctgcagcaagatggatgtgggcagcaaagaggtcct

SEQ ID NO: 40117 - DNA, 2300 bp, Homo sapien
agatgagcattggggcgccggaagcccagcaacgcctggccctgagtgagcacctggttaccactgccaccttctccatcggctccactggcctcgtggtgtatgactaccagcaggtgggtatgcccagacctcctgaccctgggaccaatgacaaggctctgctagagccacccagctgggccacttcatccacatccatctctccctctcctccagaccttttttgcctgagccccagattctagtatgactcccgtgcccaacctagagggaggtggctaaggacctgggtcagggagagagcagggcagggacccccgaatgatctccagcattctgtgcctagctgctgatcgcctacaagccagcccctggcacctgctgctacatcatgaagatagctccagagagcatccccagtcttgaggctctcactagaaaagtccacaacttccaggtgtgtgtgtgtgggtgaaaagagtgggctgtctccctcccagggctgctgggaggagtgtccgaatggtggctatttgtcacctgtaaagcactgttcctcattggctgccagctgactgcccctctcctattcccctgcacgactcctttccttcccaccccactgccaagctgctgggctcagctgagtccactcactacctggtggcttctgactctagcacagcccctctttactgatgagaaaactgaggctcagagagattgcctgatatacctgaagtcccacaataagggctgcacatgggatagaaactcacttcctacattccagatggaatgctctctgcaggccaagcccgcagtgcctacgtctaagctgggccaggcagaggggcgagatgcaggctcagcaccctccggaggggacccggccttcctgggcatggccgtgagcaccctgtgtggcgaggtgccgctctactacatctaggacgcctccggtgagcaggtgtgatcccagggcccctgatcagcagcggaggagcgctcgggccacctgcccgggctgtggaggagcgctcgcgctgaccaggcgctggggcgtccactgaagcggggtcatccaggcaactcgggggaggggaagctcacagaccggtacttcccactcccctgattctctctgtccatcctcaacattcctttgcttcacagggtcagtggaagccccaacgggaaaggaaacgccccgggcaaagggtcttttgcagcttttgcagacgggcaagaagctgcttctgcccacaccgcagggacaagccctggagaaatgggagcttggggagaggatgggagtgggcagaggtggcgcccaggggcccgggaactcctgccacaacagaataaagcagcctgattgaaaagcaaagggtctgcttctgtcttcctgcagggcgcagtcctgccctggcgggggccggccaagaagggaagggccttgggagagcaaagtggggtttgccattcgccctctgtcccagggcgctggggcactgggtccacctcggcgggggagaggggctcgcagggagccatccacgggctttcggcgccctccagcggcgtctccggaggagggagagacaccaagacagcgagagagacagagcgcagagagcgagacgcgagagagcgagggtccaagaaggggagatagggagacgcgggcggagagaccgacccgaggcgggggcgcggggcaggggcggcgcgaggacctgacagcgtgtcccgcggcggggcgggggctcggccgcgcgcccgcgggggaggccgccgctagagggcacttcaggagggacagccctcccggcaccccggggcccgagctccagccccggcctcgcggcccgcggcccgcggcccgggcggcccgagccccctccccgggcgcgcggctctccgccttccccgccccggctggcgcgcggcccggcccggccgagcactgtcccggccccgaggggggcagagctcgggcgaaaacccgccctccagcgagctcatttccctaaaaaggggggggggagtcggagggagggagggagggagagaaagaaagagagaaaaagaaggaaagggagagggagacggctggagcccgaggacgagcgcggagccgcggaccgagcggggggcgggagacaggaaggagggaggcgagcagagggaaggggaagaggtcggggagcgagggcgggagcggtcgcggtcgcgatcgagcaagcaagcgggcgagaggacgccctcccctggcctccagtgcgccgcttccc

SEQ ID NO: 40118 - DNA, 2300 bp, Homo sapien
accctaagccaagaaggagaagaaagagcctgaagaccttcagtctgacccctgccaccttccggggcatttgggcactgtagggtgagtgccatctccttgcctgggcccatgcccacctcctccaccccacccccctgcaacctgctccccccagctcccaggtgaggctgcccactcctgccccggacactgaagcagccttcctcaggactcactttcccccactcattcatccagccattcacttacgcgttcactcgcatttggcaggtgtaattttacccctgctgtgtaccaggcactggactaggtttctagggcacaaatgtgaggaaggggtggagcgaaggctttgctcagtccgtaagctgggccccccaaagcttctagcacagtcactggagatgttgtccttagtgaaccccaggatggctcatagggtgcccttcacccccacattttctgcagggctgattcaaaggcagctcatggagggctctcgatcaggccccctctgatgtgttaactgagcaagaaaccttgggaaggacttggggactccacctcttggcctggttcccatggcccctaggggtctaacctacctgatcctgggttggagaagcaggaccttctggaagcccatgttccagcgcttgggccccagtcctgatggggatcaggaataggcccccttgcacagacccccacctggccagctcagtgccagcagacatctttctacctcatggttcatctatggaattctgggggtccactggatccctcatcttccctggctatgcctgcttctatgccaggcacaccatcctccaagtgaccacagacagacctgagtgtatgtggctgcggcacacacacccctgtgaccaagtgcacttctgtgcattggggcacagattgtgtgttcatcgtgtgagtgcatgtgtgggtctgtgacacgtggccgttgctcctctgtgagccatctgctgatgagctacatctctgcctttacgcgtgactttgtatccatgtccaggtgtccatgcgcctgtgtgtgcagatgtgtcctgtccctgggtgtgtctgtgcctgtgtgtgcgttgatatctgtgcctgcctcttcacacataggtgggaatgcagagtgtgtattctttgtatgcacctgtacacaggctgggcgggcaagtgaggatgcgtatgtggttggctgtgtctgtatctgcatttgcatggtgtattggagattggagctgtgtgtctgtgcgtgtgtgggtagtgtgtaccgtgtgcacatgtatgtgtgtgcctgtggaccagcacctgtgttgccacatttgggtgacggtacatccatgcactgggtctgcaggtgtatttgcgagtgcgtgtgtctgtctaacacactctgtagatgtcgccgcctgaatgagagccagagcagagctctccccagcccttcccaagtactgttcccctctaccgacgactccccagttctctccttccctgatgcaatgcacgcctagtgggctacgtgtgccaaccctccaggccttctcctgccacaggctctgtctctgtcccgtcgctgtgcctcctgcccctgctaacccagccctccgtgccctggatgcgcccggacatggccaccctgcatgtgtgtccgcctgccctcccgccccaccctgcccctcagatccacctcagaggccctgggtctggttttcactgctgtccctccctggtccctgccctccacccccaccccttggtcccttttctccttctctctctcgtttcagaaaagaggccagctctgcagccccctcggggacgcccccaccagctcaaattccgagtgcagaaaagaaaccggaccccccagtgaggcctgccaggcctcccggaccccttgttactcaggaacctcaccttggacggaatgggatgggggcttcggtgcccaccaaccccccacctccactctgccattccggcccacctccctctggccggacagaactggtgctctcttctccccactgtgcccgtccgcggaccggggacccttccccgtgccctaccccctcccattttgatggtgtctgtgacatttcctgttgtgaagtaaaagagggacccctgcgtcctgctcctttctcttgcagtctgcttgtccatgtgtctatttttccacttgtccatctgtccagtaagcaggtaatggtgacccatgctggtccgctcggacccccatcctcctctccccacagctgggccctgctcag

SEQ ID NO: 40119 - DNA, 2300 bp, Homo sapien
ctcatgacatcccgagaaggtgggaggcagggatggtgctggggctagttttcctttggcagaaggggaaaccaagtcacagagaacctgcctttttccttgcactgcccctctgtgtggtcctagggacaggattttattatttatttatttatttatttttcgaggcacaatctcactctgtcactcaggctggagtgcagtggtgcaatcttggctcactgcaacctccacctcccgggttcaagcgattcttgtgcctcagcctcccaagtagctgggattacaggcgcccaccaccacacccagctaatttttatatttttagtagagatggggtttcgccatgttagctaggctggtctcgaactcctgatctcaggtgatctgcctgcctcagtctcccaaagtgttcggattcttgtgagccactgcgcccggcctgggacagaattgtagtccagatgtcatgtgctggccatcaccaggaggttacgttttgcatctcttctgagctcaccagctcggcgtgggtatgtcggagcaggacgtagtcatgcttggccaagggggtgcttagtcctgcctcagtgccacgcaccaccccacattcggcagttcaggacctggccaggctcactgaggttctcacagccgtttcaggcagggttggcttctgcttgtctttgcattctgtgaactctcactttctgctgctgttacctcctctgacttttgcactgaggcctgccgcctcaactccctcttggtgagtgtttcttaggctcagctcacaccttctcctgctcaccaagacctcaccctgggcctgcctggtgtcagctgcccccgtgccaatcctccccaccccagccgcactcctgcttccacagcctcctctggcctgcaccctgcacgtgccctggagccgcccattgttctttctctgaatgagtatctgtgccctacgatttagttgtgtgctcctcattctctaattgcatcctctaaatggccatcttctctcccgtagaggactgtgggctccttgcaggaagatgctgtcgatatgatgggaacaagaacagttctgacatgtgactggcacttctgatgtgccaggcccagggctgggcgatttacctaattatttcattccatgatgacaataaacctgtgtgatcccacttgacagatgaagagaggttgagtggcttgtccaaggtcccccagctgggtagcagtagagcagggattctcagcacatccatctgactgtgagcctgtgcttttcaccactgcgcaaccctctgtccctgcttgctgctggactcacatttccttggatgttcttcccgatggcctccacggagtctgcttcttgatggcagaacagcctcctgctgccgtgagagcagaattacattctctccccaagatgcccagggccggcttcctttgtgctcagagagtggggtgggctgaggacactcagagcttggtgtgttctcccacccccattttcttacccctgtgcaccctgcactgtgccacagcctctctcccagccccttttcctgtggacccccaagctgccagagggttcttgccagacccacagggatccctgagctgcaggtctgccatctctctctagagttggtaagaaaatggaaccacagttcaccaaaaggccccaaggagaggctccggactgaagacagccaccccagcttcacaccccccatctggacctttcccctctacagcctccctccccttcccccaatcagagtctttgctttggggcccaagcccttggctaagctccacccctctcccagcatcctaaagtttgggggctgcattcaagtcagagatttccaagtagggggtgtgttggagggacttctgagggcagcttgtcctggaagaatgggggaaaggcggcgtgtgttgctgtccctgaggacatctgtgtagctccctgggagaccctctgccctttccccctcccaccagcccggcgagcagggaccaagcctgcttattatcacctgacgctgcgcagccgctgatcccattggtggaggcagattcggtctggctctctcgttctttctcccttctctgcctctctctcctccacgctgctttgatttcgctcttgcctctcttcttgcgctgctcagctgggaacatcgtctcaccaggggcagcagcgacgcgctgcacagccagacaggagctggctgcggggcatggaagcagcctccttggcagccgggagaggagcaagc

SEQ ID NO: 40120 - DNA, 2300 bp, Homo sapien
aataaccccaaacggaaaaccaccagatgtctttcaaagggtgaatggttaaacaaaccatgaatactctgcaataaaatggaacgaactattgatacacacaacttggatgatctgcggggaacaatgccgagtgaaaaaagcaatcccaagaagtcacatactgtatgattccatttatgtaacacttttgaaataacaaaatggcagaaatggagaacagattagtggtgggaggaggtggggggagggaggtgtggctataaaagggcaactagagggatccttgtggtgatggaaacttcttgtatcttaactgtaccaatgtcaatattctggtggcaagaggttactactgggggaaaacgagtaaacagtacttgggatctctctacattatttcttaccactctacatgaacctacaatgttctcaaaataaaaagtttaatttaaaaaatgtttttagagatagggtcttgctgtgtcacccaggctggaatgcaagggctggatcatagcttactgaaatctccaactgccgagcctttcaagcgatcctcccacctccgcctcccaaagcactgggattacaagcctaagccaccgtgcctatcgcaaatatttacttaaaaaaaaatcttcttttggccagttatcccaggacgggaaatctatcccgggaatataatccaaaagaaaacaaaaacaaaaacaaaatcgaaaaaaagcaagtcaaatgtaccagacattcactgcagcattatttaaaacagggaaaaaagaaacaatcagggaaatacttaaatcatgatacagccactggagaactacgcagtctttgatgtcgcaacagagaaatgttatttgaaaaaggaggatacaggccaggcgtggtggctgatgcctgtaatcccagcacattgggaggccgaagcgggtgggatcacttgacctcaggagttcaagaccagcctgggcaacatagtgaaaccccgtctctacgaaaaatacaaaaaaaaaaaaaaaaaaaaaaagaaaaagaaaaaattagccgggcgtggtggcatgcacttgtagtcccagctactcaggaggctgaggtggaagcatggcttgagcctgggaggcagaggttgcggtgtgttgatcgcaccactgcactcccgtctgggcaacagagagaaacctcgtctcaaaaaaaaaaaaaagaaagaaaagaaaagaaaaaggacacgaaattgtgatacgacaactctgtgaagactactagatacattacaaaatttttaatagtagtactctacgtggcattctggtagaaatgatttcctttcctcaaactccccataatattgttacatggtttttatacggtctgggggatgggggataacattaaatgacaccttttatgttaaatcacaaacgctggagtcaacaaaagttctttaaattcctccagcagtagagcaaacttggtattccaattccctccaggctttgaccaagagcgcacacgagggccaccgccttcgtgatcagaagcgggtatgactgggcaccggttggtccactgcggctgttccaagctgcccccacagcctcaccccaggactccaccaggagcacagggaaggggtccccgaaagtgggcgaggtcgctgcccggaggtaatgaccactccaaggtcaccatggagaacccgcagacagggctcggtgtggcccaggactccccgactcttaagtccaggtctcactctctgcgccgcgccgcgcccctcgccccatcccgagcagctaccccgaagctcccaggggctccgccgaggcgaatcctcacattgcggcgtggtggccgacaaaacccgggaccctgatcttggcgcctccacgccaccgcccggaggccaagacccccgagcgccgcagcatagcgtagcccagaccagtcacctcatcctttttcgccctctcaacccagcttttcccgactccgggaagaaccgggaagagaaggcggaggggagcgaagcgccgcctgataaatactgtggcccagtcccgcccccctaacgtcacttccgccccgcgccaagatggcggcgcccaggccctgccacgcagacttccgcccggcgcggagaccgaaggctggcggctggtcgcgttgcaggtgaggttgtgacgcgcggtgtggagccgcggcccgggtgcgtccctgtctggttcctgggcggggttcctggagagggcgtgtcgcgagccaaaggctctcacctgggtggtcccgggagt

SEQ ID NO: 40121 - DNA, 2300 bp, Homo sapien
ggggtgtgtgttcacttcttataaggaaatatttcaaacacaaatgagagaacatatggccagatgcggtggctcatgcctctaatcccagcgctttgggaggctgagacaggaggatcacttgagcccaggagttcgagactagcctgggcaacgtggtgacaccatggctaatacaaaaattagccaggcatggtggcgtgtgcctgtagtccccgctacttgggaggctgaggcgggggaatggcttgagtccaggaggcagaggttgcagtaagcctagatcatgccactataccccaaccttggcgacagagtcagaccttgtctcaaaaaaataagagaacgtaaaccgccatgtaccagaactcagcttcagcagtaactgatattttgtccgtgtatgtatttgtttgctgtgggttttgtattttaaccatagcagacagccctaggagaaggcactctttggggagctcattttgacctttgctgtgcctttctcttggggagtagaagggggttcatgaaagatggaggaaagagctcctagcccagtgtccatcctctggttttctccgcaggaagccaaattggcagagaatgcttgtaccctggctgacctgacagagggtcaggttggcaagctactcatccgcaagtctggaagggtgcaactcctcttgggcaaggtgactctggacgtgaccatgggaactgcctgctccttcctgcaggtaagagcctccttaggggcaaggagggaccctttcaggagtgaaggaggattgaagagccactgctaaataagggagggggtttctgggagtatcatgtccccattcacagctctacacgccgggcacgtggtggtggttctcatcactgtctctgttaattggcaggagctggtgtccgtgggccttggagacagtaggacaggggagatgacagtcctgggacacgtgaagcacaaacttgtatgttcccctgattttgaatccctcttggatcacaaacaccggtaaaatgagcaggtggaggaggacggcgcctgtgcccacggctgctgcctgctccagacattttgttcttgaatctgtgagacccagaaggggcccactgagcccactcactccagcctttggcaaccattgttccaggtcccccagggcttcctcccacagcagctgtgaatggcacagtgaccttcctgcagcgtggagatggcacatccttgctgctggggacttggccctgctatttatttttgtatttatgtcttaatctcttccactgatgcatcctccaagggtagatggggagggtctgtgtgaaggggccggcttctcttggtgcctgctgggttgcaggggcaggaagcgtgtggactgcagcttctgctggtgctccccccgtcctcctggaggcagtataggagagagagcaaggattgagtctgagacttaagcactcggtcccagcttgccagttcctggttctgtgtccttggacaaactacctaacctttctgagcctcctatacctcatccgacacaaatggggatgatacctacctccagggttggcgtgaggattcatgggctattatagatgaaaactgcacaaggccagaaccagcaggcactcaataaacgttcatgtcctttttctctacctgagtctattttcaaacaaaatagagattctaaatctcccagaagcagcgactagagctgctcccgtccccactcttgccccttcctgctttatatcccgtcctcaccctgggcctgatgccctaaatttatggtgtcagattgttctatgcctttttctcctggctcctgttagccaggtgcctcctgtgtgagttactgtaatagctgcaggtaatagaaaggaagaagtcagagacccctcccagcaccctacaaaagcctttgggggacatgttgggcccaggacatgttccctgcactctttcctttgcagttagtactcatgtatgagccgaagtcatatattgctaacaaaaaaactaaatccttcataagagaagttagggatgtattgaataatggcctctttgacacttggccgatgatgcccacttcaaaaactttgggtttcagaggcctgcccgtctcctgtcctagcactgccagagccacctactcagtgttacttttttgggtctgtgatcctgttccctttaccaggtcattgtactgtgttgtccctggaggaacagcttctcctcttgtcttgacagtagggctggggttttccctggttca

SEQ ID NO: 40122 - DNA, 2300 bp, Homo sapien
agagaagttagggatgtattgaataatggcctctttgacacttggccgatgatgcccacttcaaaaactttgggtttcagaggcctgcccgtctcctgtcctagcactgccagagccacctactcagtgttacttttttgggtctgtgatcctgttccctttaccaggtcattgtactgtgttgtccctggaggaacagcttctcctcttgtcttgacagtagggctggggttttccctggttcagctggggagacgtttgcaggttagaaaaaggtctcatgcggcagcgtgtgtggctgttagacgctgatggcacaacttccctttgctggcgtcgtggcacctggcctctgggacagtatgaaccataggggctcaggaagaaccgcttcccctccacccccatccctgattcctagtggccccttagattttgggtacatcttccttcaggctcaccttccttcttttcaaagttcctcaagcctgttactcatttgtcaaggctgggcttctcctacaaagccctcaacctgcccagccagcagctgtgaggctgactgaatatttggtgaccatatcaccctttctggtgctgaagctcatgtcagctccattggacagtgttattctgggctcttctcactgtagaggactggagcagaaagggttccttggaaacctgtgctgggaagccctgtttggtctaaggctaagctttggttaactctgggctccagccctttcttcctttaaatagctgatgcacggccagcaggtctccattctcatcctctctttctattctgtttctttggttcagaaatactcttctgctttttttggacgaactcaatggcccgatgttagatattgggtatttttcaatcttctgttttctgacccttccaagaaagtttgaggaagaacatgtactgctttcacgttcatttcgcccattcagatgtcttggcttgaaccttatgactccgtatcaaagtcctcacaacctgtctcagatccctgatgcacaaattaggtcttattaataagtgtgggaaaagagaggagagtccaccttcttggtcaggcccctgaggcatgcatttctaccaaggaatatggacagatgacagaggagaagagcccaaagccaaatttatacatgagtgcaagtggatgcaaatttgttgctccctgcatctgtgtatatgctttctgttaaatacagaaagaaggaacaataggcttgcacacttttctaactacatgtttaagtggcagagtccaggctgtcgagtcacggttgggtttgaatctgactccaccagtaactttggttggaaaaaatcacttatcctctttaagcttgattttatttattttattttatgtaagagtgagacagtagtagcttaatagggttgcttttaaattagagtgaacatgaggcatttattcggtgccagacagataactgcctataacaggatgtgatcagcacaagtaacagaaaattagcctgacggtggcttaagcaatgggaatgtttatctcacatagcaaaaagtctgtaaatagatggttctagagttgggtggaagccaaaatgtcatcaggatttccttggaaccgtctgctttgccatcctcagtattgcagaatggctgctcctgcgccaagcatcattctgcaaatgatggtgtccacagccagagtggacagtagtacaggagccttctcattctgcccttatccgggaataaccgtcagcagctccagcaacctcccccctgtctctttatagagtggggccacgtgcccactcttggaccaggccctggcaaagggggatgggtcgactagtgtatcccctggcactgagcacacttgcccttgagctggggttttgttagtagggaggaagctggagtggcagttggatagacaattcatagtagctgctgccatgttcaaaaaatgctgcaatgtaaaatcataaagtattcatctaggcataactttttaaaatattcagtcaccttttattctactaaaatcaattttaacattttagtgtatattattttattttagattcagcaggtacatgagcatgttagttttgttttgttttgttttgttctgttttgttttttgagatggagtctcactctgtcgcccagtggtgtgatcttggcttactgcaactctgtctcccaggttcaagtgatcctcccgcctcagccccccagatagctgggattacaggcacatgccaccacacctggctaattt

SEQ ID NO: 40123 - DNA, 2300 bp, Homo sapien
ataggttttaggccccaccagtaatgtaattttctgcccttaatcttgctgtggctctggggatcttattttctgaacagcagcaacaacaacaacaacaaaccagaatacatggttggaatagaaatatttatggtgaccaagtgcccagggtatttggagtcatgactgcctaggaaaattcaggttatgtatagttatggggccattttcactctgaattttagagactggcagggccaggtggacagaatttggtgttacgacttttttgagttaaaaaaaaaatctgtgatttatctcaaaatactatctcttagtgtgatatacgtgctctttttgcccctttcatttttaattaacaaatagcaattacatatggttatgtggtacagtatgatattctgatatttatttacattgtggaatgattaaaccaaattaacatatccatcacctcacatactcatctttttgtgatgagattatgtgtgtcctttttaatcaatatcctagggatggctaattaacaattaaagtactctgttagggaatataatctccaaaagaggttgattagcttttgaaaggtcctaaatagatgtccacgtttcagaaagcttcaaccatttttatgtccaatcaacagcaggactatatggattttcctttggttaaataagtagtgttaatgatgtctggattagctagaaatactgtacgaaggccacctacacttgcatggatggacaggatatagaaatctaggaaacccaatgtgcataccctttgtaatggtgctcttggtttaggttcccaaatagaagacatactcaggaaattatctgaggattattattcccttacttcaactagaagatttgctgaatcctgcccccaaaatattgtttcatgtgtatagaataagtgtgtcatgcaaagtttggtcggagttcctaaaagaacaaggagttggatcttcacgaaagttacaaaacagtttgtataactgtttttgactgcacttgctaccattaagtatttgcacaggcaggagaattgcttacaacataacattgcaacagctgcaagttaagaaggttgtgtggtaaaggaagtgaaaatgttagatcatggtaaacaaatactatctaggaacagtgaaggggcatcgtgccaactggattcctgagttgaaaatcatcctgctccaataattttcagactatcctcattcgggaaggatagggagggcccttgtatgtgtggattaaaataagtcatgggatatctgaggcctggaaaaaataaggttaacccttctctagtcctattccatgcagagcccttggatgtctctatagcatccgccaaagccttcagaagctttacctcaaccacactgtaaaacctgggtgtgggagagggatgcagttatttgacaaaatggttgggagagggtcagaaatctttctttgggtaaaatcattctgtagttgctgaagtaaccactgataatttaatctgcttcctagaaagctcttcttggctcacagatttaggcatcaataaaaataggcaacatttatcgagggtcgtcttctccttgtgctaagtattttacatacgttatgtcattatgtgtgtacatttccattcaaccctatgaatggatgtttttagtttttatctctgttttatgtataacgaaagtgatgtgcagaaatcatatgaattaggtgtttgaatgcgcactcgagcttaccgtttctttttcaccacctgtatcgctaatcctcttaactggcaggaatggggcaagtcaatttcaacacgcgagtcttaggctaaatctgtttataggagttgcccccagaaagggagtcaggatctccaaaccctaacacattttaacgctgaggttcacataactcccagcgctccttccgcacgaaccgcccctgcacagggaacctgctggaaaggacgagcctctcttgcagatgggccaattagatagcttgctcttgtgaacgacaggtcttgtggccaatgggctcatccccggaggcctcgaagagcggaaattggccctggagcatgtgggccccggggcgtgggttgagctcggtcttcccctgaggccgcgcggagctgggcgactggggcgaggactcgcgcacaggtgagtactggccccggttgcggcatgccaggcaggccagggtcgctcgggggcgggcaggttgggtttttgctcaagcacgtggggtgagccgccctcccgggcctctcccctc

SEQ ID NO: 40124 - DNA, 2300 bp, Homo sapien
tttaaggcacaaatgtccctctgagcactgcattagctacagtccctgatttttttattgtctgatttttcattttccttcagttcaagatattttctcatttctcttgtgctttcttctttgatctgtgggttatttagagtgtattataattttcaaatatttggagatttcttatttttctttctgtttaatacattttggcaagtctagatggtttatttttctgatttttctttttttttgagatggggtctcgctctgtcaccaggctaaagtgcagtggcgcgatcttggctcactgcaatcactgcttcccgggttcaagtgattctcctgtctcagccttctgagtagctgggactacaggcgcgcacccccacgcccagttaatttttgtatttttagtagaaatgggtttcatcatgttggccaggatggtctcgatctcttgacatcatgatccgcccacctcggcctcccaaagtgctgggattacaggtgtgagctactgcgcccagcctatttttctgatttctttttttaaactaacctatccatattgagactaaagactctgttatttctgtggcgtgcggctgctgatgtctttgctcggtttttccttattatcattttttaacctggcttcctagtgatcacccccttgtctgtagagcttagtcattcggataatgatttggagagcagttatactcaaaccccatgactccataaggcttccatctctgctaatggatttgtgtgtagattgaagaatgctttcaaaattaaatgtagttctcccatcttttttggcttttaactctcagctgagatttcttggctctcttctaagcatagatggtttcccagtcagccaaggatgtgtggccttctatggctttctgattaccaggatttagcccttaaatttctagttgatgcactgcccacctcaacttagacaacaaatctaggctaacagaactttgcttttctccattgccacttgtagttggcttgccatgggttcccatccctacccctagattaagttttctctatctcaaaaggttgtacactttttggttctatttctgtaggagtctcaaaatgacaaagctagagaatagactggtagttaccagatctagggaaggagggggagtgtgaatataaagggcagcaggaaatagtcccttggtggtgacatgcaacagtttggtatctgattgtggtaacctatagatgtgaggaaactgtatacacatacaaacacaccagtgtatgtaagtaacaatgaaaatggagtaagatctgtagtctagttaatgatattatagcaatggcagttttgtacatgagactctatgtccacattttgcaactttctatgatttgatgagtatttcaaagtacgaaattttaaacaattaattttaattaatttagggacagggccttactttgtcacccaggatggagtgcagtgatgctatcatagctcactgtagcctcaaactcctgggttcaagccgtcttcccacctccctcagtctctggagtatctgggactacaaggtacgccactacacctggctaattttttaagttttttagagatggggtctcgccatgttgcccaggctgatgtcaatatcctgggctcaagcaatcctcccaccttagcctctcgaatagctgggactacaactgtgagccatcatgcctggtaggcctatattctcttatttcctgcagttcaggccctcttaagctttttccttttttttcccccaccaaggaaataaggtatcactatgttgcccaggctggtctccaacttctgggttcaagcagtcctcctgcctctgcctcctaaaatgctgggattacaagcgtgagccactgcatctggccaagagtcccatcttttaacacaactggagccttctggtgctatatagctgtgattagattcctcaattacttgatcccctatccctttcatactgttctggatatatactgtgatccaaaagtcttttatctctttccaaaggcatgccatttatcagcagaataaagaacacttccaggatgagtgtactaagcttctggttggcaatattgttatcacccgatataacaatcgtacctatcgtattgatgatgtggattggaataagactccaaaggatagcttcacgatgtctgatgggaaagagatcacattcttggaatactacaggtagcaagaagagactgggtttgggcctcagggtgggggttggatg

SEQ ID NO: 40125 - DNA, 2300 bp, Homo sapien
taggatttggctcagcaaatcaatctgagccccaagcaacaccatagtgctttggaatgcttgctgcaaagaattgcaaagaacgaggcagccaccaatgaactgatgcgttgggggctccgtctgcaaaaggatgtacataaggtaaaccaaaaaacgtgatggtgtatgcacatgtacagagacacgtgtgcaatatttatgtgactttccttttgttgtcagtatattttgaatgtttgtccatgtcatttaatatttttctaagttttttttttttttttgagacagagtcttattgggattacaggtatgaacctctgtgcgtggtcatatttttctaagtatttctaatggctgcctgatactttttattaacggttttctatccttttacattcaaattgaatttagtatttttctattataaataatgatgcagggcaggcgtggtggctcacgcctgtaatcccagcactttgggaggctgaggcaggtggatcaccttaggtcaggagttcgagaagagcctggccagcatggtaaaaccccatatctactaaaaacacaaaaattagctgagtgtcgaggcacgagcctgtaataccagctactcaggaggctgaggtaggagaatcacttgaacccgggaggtggaggttgcagtgagccaagatggggccactgcactctagcctgggagacagagggagaatccatctcaaaaaaaattaactaatttaaaaaaataacgatgcagtgtacatccttacaactgaatctttgtgtgtgttatttatttttttgagacggattccaagtgattctcctgtctcagcctcccgaatagttggaattacaggcgcacaccaccatgcctggctaatttttgtatttttagtagagacggagtttcaccatgttgccatggctggtctctcgagctcctgacctcaaatgatccgcctaccttagcctcccaaagtgttaggagtacaggtgtgagccaccacgctagcccttgtttattttcttttttctgtttttttaagatggggtttcattcttgttggccaggctggagtgtaatggcgcaatctcggctcactgcaacctccacctcccaggttcaagcgattctcctgcctcagcttcccaagtagctgggattacaagcacgtgccaccacgtccggctaatttttgtatttttagtagagacggggtttcaccatcttggccaggctggtcttgaactcctgacctcgtgatccacccgccttggcctcccaaagtgctgggattacaggtgttagccaccacacccggcccccttggatattaagtccaatttatgaaggtaaaataatttagggacatttatgtttttaatacttatattttatttatttatttaaaaaagtttttttgagacagagtcttgccctgtcacccaggctggagtgcagtggtgtgatctcagctcactgcagcctcctcccggattcaagtaaatctcctgcctctgcctcccaagtagctggggactacaggcatgcgccaccacacccagctaatttttgtatttttagtagagacagggtttcaccatgttggccaggctggtgtcaaactcctgacctcaagtgatctgccctcctcggcctcccaaagtgctgggattacaggcgtgagccacggtgcccggcccctttaaaatattttttgaagattgttttcctttattcagtcattctaaatagacaatgttttcaaatccctttcttgggatatcatgtggaagcttcaataatgaaagactagtacctataataattttacctatataaatgtaggtttttattgacagggactttcactgctagaagctttattattctgctagtctcaaaagttctaacagggacaagtgtctgtggtggagctgagcaggccttatagagcagtagcagtgtttttctaaatagcgtttgaaaaggctcatgtcatagatggtttattttctgtttagattgaaggacgtgttctgccaatggaaagaattaacttaaaaaatacttcgtttatcacatctcaggaactaaactgggttaaggaagtaaccagagacccttccatcttgactgtaagtgatttttgaagtgataaagagaggaccagtattccccaaagtgtgggaattaggaagcaggaatgatctagagtcttcttttttgagggaaagtaccaattgaatccccattctgaattacctactaaccagggatccttcaaacagag

SEQ ID NO: 40126 - DNA, 2300 bp, Homo sapien
tcattaatatttgaaattctgggccagaagtggtggctcattcctgtaacctcagcactttgggaggctgagggaggaggattacttgaggctgagagtttgaccagcctgggcaacatagtgagaccctgtctctaaaaaatgtttttaaataaaattaggctgggcgcagtggctaacgcttgtagtcccagtactttgggaggccaaggtaggcggatgacctgaggtcaggagtttgagaccagcctgccctacgtggcaaaaccccatctctactaagaatacaaaaattagccaggcatggtggtgcacacctgtagtcccagctagtcccagctacttgagaggctgaggaccaagaattgcatgagcctgggtggcagagatttcagtaagtcaagattgcatcactgcacttcagcctgggcaacagagcgagactctgtttcaaaaaaaaataattaattaattaactggcgtagtgacaagcacctgtagttccagctacttgacaggctgaggcaggaggatctcttgagcttgggagtttgaagctgcagtggctatgattacaccactgcagtctaacctgagcaacagagtgagacctcaattcttaaaaaaaaaaacaaattgaaactcaactttttaaagggattctaagtgcttatttttttaaagtattcttggaaatcacattttcatgtagagtaacctgtaaggaacagtgcatacatacatatatatatatatatatatatatatatatatatatatatataatttatatctaaacctaattcataatttaggtttttttggtgttttttttttgtttttttgttttttgttttgagacggagtctcactctgtcacccaggctggagtgcagtggtgcaatcttggctcactgcaacctccacctcccaggttcaagcaattctcctgcctcagcctcctgaatagctgggactacaggtgtgcaccaccacacctggctaatttttgtatttttagtagagacgagggtttcaccatgttggccagggtggtcttgaacttctgacctcaggtgatccacccacctcggcctctgagagtgctgggattacaggcgtgacccaccgtgtccagcccataatttaggtttttgagggtaagtatgaacacaaacttagaatgaaccacactccactagaatcaaaactgaattaaactaaagcacttttaaagggaacttccattttaagttgaagtgaacttaccctcttgaattttgttgcccaggctggagtgtagtggcacaatctcagcttgctgcaacctccaccccatgagttcaagtgattttcctgcctcagcctcccaggtagctgggattagaggcatgtgccaccatgcctgtgtaatttttgtatctttagtagaaacagggtttcagcatgttggccaggctggtcttgaactcctgacctcaggtgatccacccgccttggcctcccaacatgctgggatgacaggcgtgagccaccgtgcctggcccttcttgaattattgaagttgaacacaactagaacacaattatattccctaaatgggggaaaaattattcttcaaattgcttcaagcaagcatttaatttaatttggacccatagacaattcacatagctagctgtttgctaattacttagttacagtaaaaatgttttactgtatgtttactgtatgttttacaccataccagactgtagggtaatatttagtaaagggacgtttcacttgtcagcaacttgggatatttccagtaggtaaaaatctgatggcagcggatctgtggcatatgtggtcatatgttagaatttctctaacactttaccttattctttgccccgacagttattagtgttaaatccaagtagaaggaaaattgattcagcctgcagttttcccagcattcctttgaactttgtttgcattgtttgtggataagccgtatgcatgtgactcataacttgcatgttttgctttcatgttttataacacctttgctgcaccaggcgtgttttactaccccaaggaagtctagaaatgattagaagctttttttccctgccctctaggcacagtagctttggcactaactgcaaaaggatctgccatgattccaggctacacaatgcgagtgggcctctcactgactgtggtccgtagcctgagggctctgtgagtcaccacatcctcgctgtcatttcaggtgaaccactgtctaccagagaagattgtggtgtaccgtg

SEQ ID NO: 40127 - DNA, 2300 bp, Homo sapien
gcagatcatttgagcttggagttggagatcagcctggcctacatggtgaaaccttgtctctaataaaaatacaaatactagccaggcagggtggcgggctcctgtaatcccagctactcaggaggctgtggcaggagaaccacttgaacctgggagggggaggttacagtgaaccgagattgcaccactgcactccagcctgggctacagagactctgtctcaaaaaaaaaaaaaaaaaaaaaagtggagagcagagagaagtgggcctccaagcctggcaccaggaatgagaaactgagaactacccagcaacaaggaaggatttaagagatgcctaaagaattttgtgtgtgggtagatatggagagttaagaccttttgttaataattaattgtattccctaatggattactgatagcttatcagctctgcttgcctatgtggactttgacagctccacctttagtgtggttgaaaacaagtgagaacgccatgataggcccggtggtggggtgtctggtcctgccccctctctgccgagcaatctccttgaagggtgcctagttctcctgtggacagtattgacaacttgcctggaaaagccatgggattgctctccagctttggttttaagagatttaacactccattaggatatgtgtttacgggcttcatacccttcagagctctgtgtgttggaagcatacttatttcactttatctctgggtgggcttctcactccttttccagtgcttcaacaaaaggtgtggcggggactggcccctttctcacagcccactgcagtgggatgagagtcccaaacggatgacataatgtctggaaagcaccgagtttaaccaagagagaaatagggttattacaaagatgaaggggctctgagggaaattctgcaagagatatcattactttgaaatcacttggaaaataaatgagaggaatatcaccctgcccccatacccactgcagcactgtaattacggggtgaggataattgaattttagaaacgcccggggcccagctacactcttcaaaagtaatatgaagaatctgaccccctctggcctggcgaagagcaagctcctgagttcttgctaccggctccagcgactgtctgctttccttttctccttagcgccgccatcacgggggtcctccccgcaagacctgcagagagtgggatgttgcccccttccctgcgcaaatttagagacagctagtgccgtctggggaccagtcactgtgctaggatcagctcgagtactaagccgcgacagttgggctagaaagcccttcctccgagccccccaaggcccaggtggcagcgggttcagctcatagaggaaattgtcctgatgtcctgcagaacagaacaatgggagtggaaagggtggtttattttctcaagaaatcgactacatttcccaggcctgatatacatctcaatgggactgtcccacagaggaagagtctcctcggaacttcttcacccccaaattaacatttctcccaactttgggttagtagggttctttaggcgtctgatcattgtgggaagcggtgcggcatcaagtctgaaaagtgaatataatatggtttatttggaactcgaccaggaaattttggttcttttggctggtggaaatatgcagaagaaacaccatctaagggcgcgtccccttctgaagtacctttccgaactggggagggaagagaaaagctttttgggtgaaccagaagtggtaaaatcacattcaaatagagtgggtaggactctcctccagggggtgtggggtggaggctaggcggtgagagcttcccgcgcccagggagcaggtcttcacgggaggtttccggaggcaggaggagcctgcgggtcctcgggagtcacggccggatgaaggatgggagcgggcgccgaccacagccagggccgcgaggcgcaggagggcgcaggctggccaggtccccagcctgccggccccacgtggcagccccggggcgagcggggcgggccgggggcgggtccggccgctgacgcgccgggtatatagccgggcatgcgcgcggtgccggggcccggacgcagtgaggggggtcggcgcgcgtgtctacgcggacgcaccggctaagctgcttctgccgccgccggccgcctgggaccttgcggtgaggctgcgcggggccgaggccgcctccgagcgccaggtgagggcggggacgccaagggccgcgggatgggcagcggcggaggagccccgcaccccaggctggggca

SEQ ID NO: 40128 - DNA, 2300 bp, Homo sapien
caggtgctcaatcaggtttgtggttttggtgaatgtcatgctgatccctccctgtcacccttccagcatcatcatggacacagccattatgcctctgagtcgcttccctccaagaaggaccaggaggagggggtgatggagaagctgcagaacggggacctggaccacatgattcctcagcactgcagcagtgagctggacggcaaggcgcccatggtggacgagaaggtcattgtgggctcgctctctgtgcaggtcagtgggccaccagctgcttggtggagcctctaagaggttgactcaggcttaccttgagggcacatggtccagcctttgacgctgtgggccctgggggtgtgctttctcctaggacctgcaggcttcccagagtgcttgctactggctgaaaggtgtccgctactctgatatcggcactctggcctggatgatcactctgagcgacggcctccataatttcatcgatggcctggccatcggtgcttccttcactgtgtcagttttccaaggcatcagcacctcggtggccatcctctgtgaggagttcccacatgagctaggtaagcgtgcgtcccccgttccactggtgctcccttgggtggtggtgtaggcccccttcctgtggccggttccttgctcccatctccctgtcttcacagtgcttattgtaactgatttaacacactcctaaagcttcatggaccctaatcaccttttttttggagacggagtctcgcactgttgcccaggccggagtgcagtgatgtgatctcggctcactgcaacctccacctcctgggttcaagcgattctcctgcctcagtctcccaagtagctgggattacagacgcctgccaccacactcggctaaattttttttttttttttggatttttagtagagacagggtttcactacgttggccaggctggtcttgaactccttacctcgtgatccgcccgcctcagcctcccaaagtgctgggattacaggcttgagccaccgaacgtggcctaaccaccatttcttaacgattaaatagataatttaaaatgatggggtttttacaggggtgtttgtttccttttagccccatatgcagtggctcagttctcacctatacagtggggttaataagagcacctccttttagaataatagtgaggattaaaggaaaacaaagggtgagagggacttcccatgtgccaggtgctattctgagcactcagtaaaggctctcttttgtagcctgttaatcttccaaaggctcaggtgcctggcaggtgcatggcagctggatgaaccagggggtaggagggacttagtttgatcagagggagagtgtaaaaagctagtaattactccagaggctttagggacgacgtagggtcaagttctggctttgccatatattgacttgtgacttcgggcaaatcacttctcacagtctcgacacttaacttctcgcagttttgattttgtttccatggtagttgtgaggaagggggttccttctgtttcactatgaatccagagagaaatgaggaggccagtgccagctggtcatctatttttaaaatcctgagaaagattttcagcctttaggctgggtatacggccagtttggcaaatggagacgggtcctgaacaggaagttcaagggcctgtcttgtcacttctgtcttgagtctagggctgtcttgatttttttcacccacacttttagcagtctgatgtcatcggtgccctctgtctcccacgaccttgtatgactggctctcactttgtcgccaggctggattcaaactcctgagctcaaacagtcctcccagctgagcctcctgagtagctgggatgacaggtgtgcattcaccatgcccatcttactcttccttcctcgtccctccccttttcattctcgctgctgtaggagactttgtcatcctgctcaacgctgggatgagcatccaacaagctctcttcttcaacttcctttctgcctgctgctgctacctgggtctggcctttggcatcctggccggcagccacttctctgccaactggatttttgcgctagctggaggaatgttcttgtatatttctctggctgatatggtaagtgttccacagttcactggatgagagggcggctaaggggatggatgttaggtaggtagtttttttttatttttatttttttgagatggagtctcactctgtctcccaggctggagtgcagtggcatgatctcagctcactgcaacctccgcgtcccgggttca

SEQ ID NO: 40129 - DNA, 2300 bp, Homo sapien
tttttgccacgttggccaggctggtctcaaactcgtgacctcaggtgattcgcccacctcagccttccaaagtgctgggattacaggcattagccactgtgcccggcctgcaacgttttctttttctttttttctttttggagacagtctcgctctgtcacccaggctggagtgccggggcgtaatcttggctcactggaacctccgcctcccggattcaagcgattctcctccctcagcctctcgagtagctgggattacaggcatgtgccaccacgctaggctaatttttgtatttttagtagagacggggtttcaccacgttggccaggctgttttcaaacccctgacttcaggtgatccgcctgccttggcctcccaaagtgctgggattacaggcgtgagccaccttgcccggcccgcaatgttttttctttctttccttctttctttctttattttattttttttttgagacggagtctcgctctattgcccaggctggagtggtgcagtggcgcgatctcggctcactgcaagctccgcctcccgggttcacgccattctcctgccttagtcttccaagtagctaggactacaggcgcctgccaccacgcccggctaattttttgtatttttagtagagacggggttgcaccgtgttagccaggatggcctcgatctcctgacctcgtgatccacccacctcggcctcccaaagtgctgggattacaggcgtgagccaccccacccggtctttttttttttcttttttgccggcccgcaatgttttcttaaactttttatttttagctatcctgttgaggttcttccagatgaattttagcctctgacccaggggtatgatttgataggcgtggagttctggttacttcttaaatgaagagtttccccaggatatctgaacaattctcttgggtggaagactcaaggatcatgaaaacgaaaaccaaattctagtcggctcctaaagtccttttgcctcctgcggttaccatcaaagagctatggtcaaaattccaagggataattcagggtctgattccactatatatccccagaccgcctatacataaatccatattattggagatttacgcttaatcctataatcttttacctaacagctgtccagtagaattttctggatgtccaataaggtagccgcgtgtagctcttgaacacttgaaatgtggctagtcccctagaggaacgggattaatttaaatttacatagctacaactacttatcggtcactgcggtaattgttaagactggttttgcctgtaacttgcatatgttttattggacatcagtttcaatatttcatttgcattgctaaaagtcaaaatccttttgactttgccagttactcagtgagaggacagttggagccagtttctgttctaggcttacagttttaaggacagataaaggttagtttttaacctcgagatgaacagactgttaagtttctacggacttgcccatggggttccacagtgagcctgggccggggaggcaggtactgtgtcagggggaagaaaaaaggggcttctagctgggcaggtgacacacagggcataggaagaggtcagttcttgtggccgaggaggtccggcccgggggtcccaggagcagagatctcccttctcttcgatgtggaaagtgaggagggagcagagccttgctcagaaacggagctcccccaatcccccaccgccctagctactggactggaactaggatggacacgaatgtccttctcattgtactaactgcactcaacaagcgggaaagatgaagcgagggggtttaaatgtgtgcgtttgttgaatgacccacaaaaactgaaggagcgcggccggactgatcacactccttgagacaaagcgggtgggagacccagaggtgaggagggtggtcgcctgtgggcgaggactgggaggccaggggttctcggcgaggcggtcccaggaggcggcgcggagccgctgcgaggccgcagggccgggtcgcaagatggccgggccggcctcccgcgcgggtcgcgcgggccacgcgggcgggtttcagatgttccgggcccgggtaggggctggcaggagagaaggggccggctgcggggagggctggctgagaagaagcgaaaatgggcggttagcagcagggacccggagccggaggagccgagagcagcgcgtgcgccgagctctactgcctcgcgggaaggcggaagggtggggagggcggcgctcggggcgggaggcccggccgg

SEQ ID NO: 40130 - DNA, 2300 bp, Homo sapien
tctggcctccaaacaaagaagaaccttgtcttcccacctccttgaattctatgatgaaccttcgccttaatagcatcaacattaaaaagtctgcttcatttaccattaaattattcatctactgtatcaaaattacattttctttctaaagcctgaaagttgtgataaaaaaaaaaaaggcaagaccatgcaattacatgcagcaggcaacaaagtgaggaacagatctagatggagcaacaggttaatatgaatttgcattgaagtccttcatttccaggctattaaaaatctttccacaattccagaaatatgggcaaatcttacctaattttactgaaggtttagctaaggtgtagggacattgctacatcaggatgccactgggataacaaagaacccaatgctactcagcttattggaaattagaaacctgggcccgttttctggcctgtaaactgcactgtggcccttaatgtggttgtatttagtgtaaaagtcacctcacttggacctggcagtgctggatttagcttttctacctctactgccataacctgtagagtcccctcactgacacactttcctctccagggccctggctctttccctatccccaattccccacttgcccaggggagcttgtttttccttgtgaatccacagcacctcatgatatttctacttttcagaggcatgaaaaggctagtctgacacttcccgttcttggtaggccaactccacattcaaatcctctttggctgccttggcttctccaagatggaattcaccatgtctattattaggatcacatgcacagtcattaaattacaagagtacaaaactatttttatccttggtaaacaatgtatgttttctgggatgtctttcttccttttcttcaagtagtggcctctattggagaagctgcagagggggctgggacttgggtaagaaggaggccagggttggggagtggattctgagttgggagaaacagaaacacgttgtggccaaccatagctgctttaaaatgaaagggctggagagacgaaagagagaggtcctttttattgtgatgggattccctcccttgggaggggaattccttgttatcatcagagaccagaccagacatcaaaagccaggctttctcctggggtctggaattattaaatgagtaaaagccaaatataagtacctccaccaggaaatacaggaaataaagacacagggagccaataaagttatcatttaagggtgttttcttctttttttaaatcttaagattacctctaatttatagtacaaaagtcctaacaaattaatttcttgttcacaaaaaagacattagatgatttcggccaataagtaacatttccctcgccttctttaacataactgaaagcaagaaaaagtaggcaatctctaagcacaagcaaataatccatcattcagaaccttgaaaaaatatcacaccaccaactggtctgacgtcttgaccacctcaccatttaggaaggaatactggggccccttcttggaaaatgcctgctgacagaactattgggaaaaacagctatgggggtcaccatgcactgagaaaataaaagttagggatttacagtgtcatcctcaaaaagttctgtgacaaaaacacatctttattgccccaaatcaagatctatgacaggcctgctcctcattacatgcatttcatgttaagagtatttggagacatctacgtcaagggagtgaaggaatgtgggcaagaacttactggaaggcagtgtgcttggccctacttcagagctgctcagagggacagtccgcctccatgtcctcacttcttaatcttaagccacctagacttgccatgagggcatagaagaggagatgatgcataaccctgtctcagacaaaggtgttatttagcaggtcttgccaaggtggcaggggcgtgaggccaaggcctcccgggagggaatatactctccagtatcatctttacctttgtgactgcatagatgaaggcagctaacactgaccccattcactctcgctggctagatataggcaggtcaggtcccaaaccccaatgtaatataggctccctctttcacactctgtcaatggcacaaagccctattgttaatacagttctctactcacactcaagataagagtaaacaacactgtccttcgactacacaactttcttcctctacacacatctgctctgacagctttcctccaggcgtctcatcacagcaatactgaaagggactgtggcaagccag

SEQ ID NO: 40131 - DNA, 2300 bp, Homo sapien
agaggtgataaacccggcagagcccaggcctaagtagacaggcagaagtcaaagcggctcaggaagaaagctcaggtctcccgtagacctaccccgcctcctcctgcaaagctgtttactcaacgcccgattcccatagagatgaaactggtagccagtccccagctccttacccatggctgccacctccctttgtgagaaacaggaagtggggaactttgtcagctctgctgcaccctctacactaaatatttatcttggagtccaggtcagagccctagagaataagagaagcttgctgctggtgagggggtatggccaggattcctggagtcggaagagcttcagcttcaccatcttgggagaagaaggaagaaagtgaaagcgatgtggtccttcttagtcccaaggaccctgacaggtgggaaaaatgcgtgtctaagaaaatgggcacctattttatccctgagggagggaagaggctacctggcgtggataagaaggtttctaagcttcaggttggggggcagtgcactgctgcgtccctcaagaagtgtcccagggttcccccactgctcagctgtcctccacagcaatgcccctgccatccccatctctccgccttcctggagagtcagaggttcttggaaggagtcttcaaggtcatcttgttcagctccccgctcagtgcaacagttgcctttacatagatgccccacaactggcagactcagaacccctggaatcatgtaaaaatttgtcctgggaagccttggacctgcttccctatgacgtgtcccccagtggtcccactgctgctggtgcagctgtgtgtccacatggcagccccgcaggcgctagaggccagcaggcctatctgaagcttctcaacccaaacatctcctccagctttcacatgtgatgtttcaaggcaacggggagagcttctttaccagaacgagggagaagataagactaaagcagtaatggtggtagggactgaaaatcacttagtcttttctctactctctttctttccaaactttgagttgagtggtgagcttggaaaacactccaaaactcctcgtggcctctggcaccagtctgacacccagtaggaatgcaggagattacgttagttttcataatttagcattgatcactcccagctcgtagctaaagttgatcagtaactgttggttggttggctggtttggggcttggggatccctgagccaactcaagggccagaaaggattccagagtgtttccacggtccttcaatgttccttaagcattcccactttctgaagtgccatacagaggcttggggcagagacagggagaggggatgaccagaatggatggggagccggaagggccggggctctggggacccagctcagagcagcgagaacagcggaaaagcaggcagatcaaaacaaacacagtgtctgggaacaccaagaccctcctaatcccatccccgccaaagggaccccacccttatcctctttaggggcgcggcacgcccgggggggccgctcccttgggctgatttcctccctgtgcttgcacgtgtgtgagcgtccccacgtttgcagtgtacgcgcgcgtgtttgtttgcacacgaccggccgcgcgccgccgcaggcacaccctctcccccagcgcggaggggcggcggggccttcccctggtccgctccgccactctgcctgcggggcgccctcatctcgctcccggcctgtccgtctctcccggcttgcccagttcaccactcctgcccccttgtcctggctccgcccggttcatcgctcctgcccctgtcctggctccgctgcgaggccgctcgcttcccacactctggaaatgtcgctggaaactctgagtggcccgtgtcgggccgcccgacccctccccgacgccagccctgcggtaggggccgggatggcagctgggaaaccagagagggctccccggggaccctcggcggcccctcccggcgccgcctccccgccggccaggcctcctcggcagggggccaccagtgtccccgcgcgcgccccgacggacggagagcactcgcacgtccctcctctccggcccagccccggcccgcagtccagatccgagacccaaactccgcccgccccgccgcgcgactctcacggtccggcctccggcgcgcgccccttcggcctccctcttcctgcgccggcgcccggcccggcccggcccgtcctgacccggtcacgagggccgcgacggcccgcgcttctccttgcccttcctcctcg

SEQ ID NO: 40132 - DNA, 2300 bp, Homo sapien
cacacatacaggacactttagcaaaaaggcccacaggagagggtcgggccacacctggagcaaatatgtgtgtgaggccttctcccgggcacctcatatatgttctctcaccaaatcatttctatattacaggttctgagcctgaggctctgagggatcagtaacttgttcaaaggttacacatccactaaacagtagagctggaatttaagcttggagctcacacacttccacagtttaatcttgcttccagagtaacggcagggcagtcagaggcagagtagaccccacagcagggacaagggcagggtgagagggctgtgtgctggcttctgcctcagtctccctaaaaggaagctgaagagatgtccttccctttctttagaagaagctgggaccactctgaagagttacctagaagcaccttcaactacagacctggagcattctccactgtgctgcagccctcaaatcaggtagcccacccagcatagtccctggtcagccccagctgtatgccgtatggccaagaccctatgccacgatgtcctttcagcttgaatcccttggaggacaccgtgggcccaggggaagggcaggggcctgcaagcctgcattttgagcctggccagtgtcccagtagccctcttcacaagctgacacccacccacctccacgcaggtgctcagacgccgggaaaaagtagacaatgtctggacggaagagtcctggaaccagtttctgcaggaactagagactgggcagagggtgagtgctggctggctctcggggtgtgcacgcaccctcagctgatacattttggaaagtgagttcacctgctctgacacaccctttctacccttcagcccaagaaaccgctggtggacgaccctggtgagaagccctcccagcccattgaggtgagtgctgcagggtgctggggacagcagcctgataaaccagggagattagggttttggtggccccagtaaccatgggcataggccacgaactaagagctctctctccagtcccacatggtttatttctgtaatgccagcactcaggacagtggctggcatacaggaggcgctcagtaaacatgtgttaaataaatatgtgttggccaaagcaggagcagaaaagggagtggtcagtgcgcactgggattatcaggaaatattcttggaggtggagctggacccttgagaagctccgagggcctgattcggcgaagacccatagcagaggctggcaggaagcagcgtgggggtgggggctccggtccctggggtggcgggggaacctggatgggcacagtgaagccaggccttggagggcgggagaagatgggagaggaaatggggaaccccattggtgctgtaacagagacacaacttggcagaaactggcaggactgcggaatcgcgggatcaggaagcgcgtaggcactcccggggcgtgctgggcaggtgagaggccgtggcggggatgccctcttggcaccctgggccacacctcctggcaggagcccggcccgtgcgctgaggcctgcccttacgccggcccggtgcgctggccttgcttttcacagtcgatctttgaccgctgcctcccacccccacggtgcgctgcccctcactgcccagcctctccccgcccccaggtgctgctggagagagagctggccgagctgagcgccgagctggacaaggacctgcgggcaattgagacccgactgccgtcccccaaggtaccagcccccagggttcacccgcggggcacgccggcgaccgcagggtcggggcgagccgggagcctcggcggctgggctgggcggaggacgggcagccgaggtccggcctccagcggcgcgcaccggcctcgggccctcctgggcgctggcgggctcgctcctccataaataaaatacagggcgtcgactttcgcaagtgaccccgaggagcctttctaagcggactccacgtcagcccgacgaccgggcgcccgccccgtccggcccccgggccccagcctcggggacccccgccccttcccctagttcccgccccgctcccgggatcggccgcgcgggcgcctctaggaccccgcgtcccgcccgctctcctcccctcccgagccgcgaacttttccggaggcggcggcctcggctgccgctgggtcccggggtcgcgggccctgattgcgccgtttccccgcgcagagctcgccggcgccccgacgggccccggagcagcggcccccggccgggtgagtgggagacgcgggaggaggaaggg

SEQ ID NO: 40133 - DNA, 2300 bp, Homo sapien
gtgctgtaacagagacacaacttggcagaaactggcaggactgcggaatcgcgggatcaggaagcgcgtaggcactcccggggcgtgctgggcaggtgagaggccgtggcggggatgccctcttggcaccctgggccacacctcctggcaggagcccggcccgtgcgctgaggcctgcccttacgccggcccggtgcgctggccttgcttttcacagtcgatctttgaccgctgcctcccacccccacggtgcgctgcccctcactgcccagcctctccccgcccccaggtgctgctggagagagagctggccgagctgagcgccgagctggacaaggacctgcgggcaattgagacccgactgccgtcccccaaggtaccagcccccagggttcacccgcggggcacgccggcgaccgcagggtcggggcgagccgggagcctcggcggctgggctgggcggaggacgggcagccgaggtccggcctccagcggcgcgcaccggcctcgggccctcctgggcgctggcgggctcgctcctccataaataaaatacagggcgtcgactttcgcaagtgaccccgaggagcctttctaagcggactccacgtcagcccgacgaccgggcgcccgccccgtccggcccccgggccccagcctcggggacccccgccccttcccctagttcccgccccgctcccgggatcggccgcgcgggcgcctctaggaccccgcgtcccgcccgctctcctcccctcccgagccgcgaacttttccggaggcggcggcctcggctgccgctgggtcccggggtcgcgggccctgattgcgccgtttccccgcgcagagctcgccggcgccccgacgggccccggagcagcggcccccggccgggtgagtgggagacgcgggaggaggaagggggctgtcccaggccgggcgggagggaacgtggcgcggccgggcggggcggacgggggcgatcgcggggcccagccgggggaggaaggaaccgcagagccgtgtccgggagggaccgcagcgccactctctgcggggcgccgttcccgcgccaccgagggcagctaactcctagcagaggaccggggtcgcggccgccgggggcgcagcgcggttagggcggccccgccacggcccaggcactcccgctgggccctgccgggcctcacccttccccgcgcagcgactcgggaagtaggacatcctgtggagagcccaggacccgggagacgccctgggaggaggtggcagggatgggggcgatggggggtcagagcggtctaggggtgaccagggtggggtgcggagccccaggctggaggctcagtctctgtgccccgtgcagcccggcctcagcctggagctccagctacccacatgcaccttacctgggttccgcccggtccctgagtccccacaaaatggctgatggaggaagccccttcctaggtcggagggactttgtctacccttcctcaacccgaggtaaggacccagccctgctctctttctcacggagatgcccacccaccaggcatgttggtgccccaggggtggcaggtcacagagccccttgcttctgccagtgcctgccctaggtgggggtgcaaccccatcccccaggtatggcctccccaagctgaggttgtgcttctccacagaccctagtgcctctaacggagggggcagcccagccaggagggaagagaagaaggtaaggaggggaccaggtgtgggggacctggagtggtcccaaggctgccatcctggatctgccacccgcccaactgagagagcccactctgtcctctcccctgcctagagaaaggccgccaggctcaagtttgacttccaggcgcagtcccccaagtaagcgccctcctccccctccccttccacccaaggcaatctctgccatcccagagggggatggggagggggactgggctgcagtgggcatccccaaggggtgagagaactggggtgtgttgggcagggtctgaagggaaggaggcttgggaaggcttcagcttaccctgcggtcctcgtccccacctgcagggagctgactctgcagaagggtgacattgtctacatccacaaggaggtggacaagaactggctggagggagagcaccacggccgcctgggcatcttccctgctaattatgtggaggtgagcaggagagacaagagcaagtggggctgggctgggagggcgcaggggttgggagagacttagtgcaaaccttgggtttcctaaagcaaaaaactgtgag

SEQ ID NO: 40134 - DNA, 2300 bp, Homo sapien
accaaatgcccaggcagccctcgtccagggccctcgtccaggcccttggagaaggaaggtcatgtgtgaggtcagggacttctctagggcggcccaggttgggccgcttttatgttcttcctggcaatcctgtcttctaggcctgtcacctgagacaggtgtgaagaggtggtggctggagtgaaaggtggtggtgcccagttctgtcaggacagaggggaggggctcgtggttgacagggcagtggcctagccctggctggtttcttgaacctgggtgcggcctgacccagcaggggttcaacagcagctggaagaacgagtcctccatccacctccatcctcaccctggtttggttctaaatgggcaggtccagcccatcctggcctggaaacaaccattcctcagaacccactggcctggttgccattcccccatcccagctcttttttcatgaactccctgattccctcataaaacatatcagggctgaggcctcctctccctgggacagagaccaactccatgccctctctttgatggagcgctggcacttcccgcagctaacaaaccctccaaccctgggctgcctgcaccacggtcctgcctgaaagatgcttctgtgcctcgacttggcctgattggggaggtgaagggaggatcagaggctgctggagatggctcacccatgagagaggggagggcagtgatgtggcttacctagggccacagagaggctatgagcaggacatgtccccttctgtgccacagaggcgtgccctgcctgggttcgctgacttgtctttgtggtgggttttgtgaattcacaacccacccatcagaaagccctgccagatgaacctggggctatttgtagagtctgtccaaggcatgcaggaggggctctctgaggaaatgatgggcttgtgtttgattcactctccattcccagaggcaagcacggtgcctggcactcagtattcactgaatgaatgttattggaatgattgtgtggaagaattgaatggatgaacttcccttcctttgggtcccttcccagaagtccccaccccatttgaggcagggactctgtttgacacctctgtgccatccttggcttttgcttgtggccaagcaatttttacaacaagacggtaagcagcacattatccccattttccacatggggaaactgaggcccggaggagccgaggaggttgctgaaggtcacacagccggtgagacgcagctgtgcacttggggctaggtctgtgtgcccccggggctgtgctcaccctgcctgtagttgcctctcccctcaaggggcttccagtctagtcagggaggcagagcaggtacgtcaggccaggcggtcatgccgggaggccggagaccagcccgtgggagaggagtttacacacacccaggacggtctgtgggaggaggggggccagagtgtgaacgcaaggaggctgagacgcgggcacagacaggtgaggggcgtggggagggcactcttcacagagtgagcgtggagggaatgagtcacacctgaggcaggcgaggcacagctgcgcccacaggtgtgatcccctgaaaacacagcagcctggcagccagaggccaagtggagacccaacgagaggcggctctatggccttgaggtccccggagagagggttgccaggtacggcttctcctccccgagctggcaccggggtcccctccttggctgccctctcctcatccttatagcctgggcttcaggtgcttgaaagaggacaagggagggggcaggaagcggggtgaagacctgcagagaggatgaggtgagggcccacgggaacgggaaggtaccagcccaggggtgggggtgcccagtgaacccctagccaggaggctctctccatctcctagggcccctgcgggtccccctttgcgggcattccaggcagagaagttctgcgctgccgagaagccagcgttcaggaagggagttggcgggcaggagggtggccttggtttgggatttgtgggtgtcaaggccgcatctgcgccagcctcccagcctggagtgggtggaggagccaggcggaccgcagacacacccaggcagcccaccctgcccaggacctggggatgcggggcgggagagcgcggccggcgtgggagagctttatggggctgccccctcgatcgtctgcgaagtggggcgcggggcagtccctggaccggctctgctgtgctccgggcagtcgggggcttgcgggcgctccggggaggatgcgggcaccaccggc

SEQ ID NO: 40135 - DNA, 2300 bp, Homo sapien
aactccatgccctctctttgatggagcgctggcacttcccgcagctaacaaaccctccaaccctgggctgcctgcaccacggtcctgcctgaaagatgcttctgtgcctcgacttggcctgattggggaggtgaagggaggatcagaggctgctggagatggctcacccatgagagaggggagggcagtgatgtggcttacctagggccacagagaggctatgagcaggacatgtccccttctgtgccacagaggcgtgccctgcctgggttcgctgacttgtctttgtggtgggttttgtgaattcacaacccacccatcagaaagccctgccagatgaacctggggctatttgtagagtctgtccaaggcatgcaggaggggctctctgaggaaatgatgggcttgtgtttgattcactctccattcccagaggcaagcacggtgcctggcactcagtattcactgaatgaatgttattggaatgattgtgtggaagaattgaatggatgaacttcccttcctttgggtcccttcccagaagtccccaccccatttgaggcagggactctgtttgacacctctgtgccatccttggcttttgcttgtggccaagcaatttttacaacaagacggtaagcagcacattatccccattttccacatggggaaactgaggcccggaggagccgaggaggttgctgaaggtcacacagccggtgagacgcagctgtgcacttggggctaggtctgtgtgcccccggggctgtgctcaccctgcctgtagttgcctctcccctcaaggggcttccagtctagtcagggaggcagagcaggtacgtcaggccaggcggtcatgccgggaggccggagaccagcccgtgggagaggagtttacacacacccaggacggtctgtgggaggaggggggccagagtgtgaacgcaaggaggctgagacgcgggcacagacaggtgaggggcgtggggagggcactcttcacagagtgagcgtggagggaatgagtcacacctgaggcaggcgaggcacagctgcgcccacaggtgtgatcccctgaaaacacagcagcctggcagccagaggccaagtggagacccaacgagaggcggctctatggccttgaggtccccggagagagggttgccaggtacggcttctcctccccgagctggcaccggggtcccctccttggctgccctctcctcatccttatagcctgggcttcaggtgcttgaaagaggacaagggagggggcaggaagcggggtgaagacctgcagagaggatgaggtgagggcccacgggaacgggaaggtaccagcccaggggtgggggtgcccagtgaacccctagccaggaggctctctccatctcctagggcccctgcgggtccccctttgcgggcattccaggcagagaagttctgcgctgccgagaagccagcgttcaggaagggagttggcgggcaggagggtggccttggtttgggatttgtgggtgtcaaggccgcatctgcgccagcctcccagcctggagtgggtggaggagccaggcggaccgcagacacacccaggcagcccaccctgcccaggacctggggatgcggggcgggagagcgcggccggcgtgggagagctttatggggctgccccctcgatcgtctgcgaagtggggcgcggggcagtccctggaccggctctgctgtgctccgggcagtcgggggcttgcgggcgctccggggaggatgcgggcaccaccggctggacggtcgcagcctgcagggggccctggggacagcctgcctcatccccccggcgggctcgggccaggtggcagcgcctgggctcgccgcgcggaggcggcggcttctcgggctaggggcggcggcaggggcggccccgggatcacatgggcggaggcaggtccgggagccccgggcgggctctccccagagtcgggtagacggcagcgggagcggtggcgtctccccgccttccctccctcccgggcctgggcgcccagccggacaggtgagcggcagccaggtgagcgcgcccacctgcgcctctccgcgcggcccgccctccccggcgccgggctcctctccgcgcccctgtcggcgcggaaccctggcctcgtccgcggcccagctccctggagcctcgcatcagcgggggcgcccccgcgagctgcgctctccccggccggagcgctcctcctccagcccccagcccgcagggtactttgccctcggagcgaaggaggctccagaactggtag

SEQ ID NO: 40136 - DNA, 2300 bp, Homo sapien
ggctgccctctcctcatccttatagcctgggcttcaggtgcttgaaagaggacaagggagggggcaggaagcggggtgaagacctgcagagaggatgaggtgagggcccacgggaacgggaaggtaccagcccaggggtgggggtgcccagtgaacccctagccaggaggctctctccatctcctagggcccctgcgggtccccctttgcgggcattccaggcagagaagttctgcgctgccgagaagccagcgttcaggaagggagttggcgggcaggagggtggccttggtttgggatttgtgggtgtcaaggccgcatctgcgccagcctcccagcctggagtgggtggaggagccaggcggaccgcagacacacccaggcagcccaccctgcccaggacctggggatgcggggcgggagagcgcggccggcgtgggagagctttatggggctgccccctcgatcgtctgcgaagtggggcgcggggcagtccctggaccggctctgctgtgctccgggcagtcgggggcttgcgggcgctccggggaggatgcgggcaccaccggctggacggtcgcagcctgcagggggccctggggacagcctgcctcatccccccggcgggctcgggccaggtggcagcgcctgggctcgccgcgcggaggcggcggcttctcgggctaggggcggcggcaggggcggccccgggatcacatgggcggaggcaggtccgggagccccgggcgggctctccccagagtcgggtagacggcagcgggagcggtggcgtctccccgccttccctccctcccgggcctgggcgcccagccggacaggtgagcggcagccaggtgagcgcgcccacctgcgcctctccgcgcggcccgccctccccggcgccgggctcctctccgcgcccctgtcggcgcggaaccctggcctcgtccgcggcccagctccctggagcctcgcatcagcgggggcgcccccgcgagctgcgctctccccggccggagcgctcctcctccagcccccagcccgcagggtactttgccctcggagcgaaggaggctccagaactggtagagccgggccatcgggctgggcacctccccgcggcgcccgcagcgcggagtccactgaccggctcaaaggtctgggaatctcggggcggccgcgagccggcctcggggactggggtgggggcggtgctgggaacagaggctaggcctgggcccaaggggaaggcagccggggatggagcggacagaccgctggtgctcttgatagattctcgcagcacttgcgtccccagggcagccccaggatgggtgctgggcagggtggtgcccagcctggcaccgcggcttcctgcctggattggctcctggctccagagctagaggctcaggaaatcccacaggggtctgtctgcaagggcacttccttgcccagcggaggggctgtggatgggaggcctgtcaccccggctgtctgtcgggcagcatcaggaatctgggggtgggtgtgtccagcttgacagatgaaccctggcctccttgccctggcagccggcccctgggggaggtggggagcccggtcttgcccgtgtgatccactttgccaagaacgaggtgggcagctaggaggcccatgtgaagactcggcctcaccccaccagtccttcacctggccagtgacttacacagtctgtactggtgccagcctgttccttgacccgtcactcctgcttcctgagccctgctctccctaggccactcaccagccctcccccagagtggagaggaagtaccgtgtgctgtgggttttggggacaggaagcaagcgctagtgggactgagccctgatggtggaggaggggagactgagggggtgctggcatcccctccacttgccagcccctgccccccatgctccagcaagccccctgcctggcagcctgggcagccccctcctgggagtcgctccctgggctgaagactaaggaagggagaacccagaagcatggcttcccagggtggggggaagtgaaaccgggctgagggagggagttagccacttcctctacccaccccaaagcccctgagtagctgctccgggagctgtggtgccctctccttctccctttggctcctctcctgctgccttacagtgcccccagagccggctaggggcatggacttcacctcctggtcctctcttcctcaggtatggcgttgacggtggatgtggccgggccagcgccctggggcttccgtatcacagggggcagggat

SEQ ID NO: 40137 - DNA, 2300 bp, Homo sapien
gtgggttgccagtgccccgggactgcaggcggccaggcccacctgggcagccatggcctccttctcctggccacaggcatgctctgctcctgagccagggaggccatgcttctggtcgtgggccacctgtgctgtgcccaagacctgcccagcagtgcccagtagcccgtccatctcctgcacccctcccctcatccccctcccctcccatcctgctgacttcctccctgcccagtatgtttctcttgggctgtggctgaaatagtttcgctgctgttgttgggatgattccctttcgtctctggctgcatctctcgaacacattcctccccattccaagacccgggcctgcctgactcccacccacaccctcccttcctcctctgactcagcccagagatgccccagtgggactgcggttctgccttgagcgctcttggcttattctgtctcctcctccccctacccccgccagctcccctggactctctttcagccaggtcccagtggcccctggtgacagcctaacccccttcctgggtggtatttctcctcttcaacggtgggggatggtgagggagtgaggcagccaacagccctgggccgcagctgctggggacggcgtggggggcacgtccagcctttggggtgatggggatatggcccagctgctgagccctacctttgggttgattctgcattccagaaagcagagcctttgggggtggccagggagggcactagaacccagaggctctggaggaggaaggagcaggatctttctgggggccttccgaacagcggctgcctagtgacccgctgcgtgcccacccagaggccagcctggcactgtggccatagagatatattccatgggtccccttgttaaggaattgaagatgcagttgtagagataaggcaaacttgcaaaacaattttggagcaattaggcactaagcagtgtggtattaattacaaaagcaggaggcgttctgggaggggaggggaaggaaggctgtgtgaggagtattgctggacgttagaggtggtggtgagagggtttagggaaggatgagcaggaggcccgacatgctgggagatggagaaacactggtccgggcgacggctgatgtattggggctgggggattttttagggggaacctttgttctgagatgagccaggaatgagcttgtttcaagagggctggtcagtgtcagtcctggctctgttccgcgacacctctggtgggctgtggtctcagcaggacccacgtgctcaagggcaagccttcccgagcttccccatcgtgttgcccccagtccaggaaaatgaagggtgtgggaggtacagaggcatggctcccaaaccagcggcaacacctgagaacttgttggaaatgcaacttcccaggctccagcctacacccgctgaattgggcatggggcttgtgggtcacgagcccagagctgggtgtggggagactcacttgggtcggtcccacctctgcctgacgacttggaccagccccccttcctctccctgggcctcaggtcagactagacgctctgagttcccttctctgaccttgatgactctgctcattccttcggcaaatatttgtcgagcagctgcttcatgtcagacactcatctgggctctggggatgcaatcgtggaaaaacagagtgacacctctgaccctatggagctgacgttctagtctacaaatgaggctgtggtcccacgggtgcacaagtctcagggtcccacagctgccttttgagaatcactgtgtagctgggtgctgtgacatgtgcctggagccccagctactccggaggctggggcgggaggattgcttgagcccaggagtccagaccagtttgggcaacatagtgaaacccccatctctttaaaaaaaatcgcttatacttgagagtcttaaaggctctaagaggtcccatgagaaagaaacccacttaatttttctttatatcctaaacttgttgaacagcagaatttctcctgaatttctacccctgaccccctgccctgccctgccccacccccaggaacatccttgcgttccccagcacacatttcgagaggtgttggctacagacaagctcatgatgggcaggtgaagggggagcagctttcctggatttggagataaaaggtctcttctgtgaaggcaagggtcgctaacccctaaccgcctgggaggaaaggaaggagagaaagacattgtctctcccagtcggggagctggtctccttttctgggctgggcagtctg

SEQ ID NO: 40138 - DNA, 2300 bp, Homo sapien
gtgatggggatatggcccagctgctgagccctacctttgggttgattctgcattccagaaagcagagcctttgggggtggccagggagggcactagaacccagaggctctggaggaggaaggagcaggatctttctgggggccttccgaacagcggctgcctagtgacccgctgcgtgcccacccagaggccagcctggcactgtggccatagagatatattccatgggtccccttgttaaggaattgaagatgcagttgtagagataaggcaaacttgcaaaacaattttggagcaattaggcactaagcagtgtggtattaattacaaaagcaggaggcgttctgggaggggaggggaaggaaggctgtgtgaggagtattgctggacgttagaggtggtggtgagagggtttagggaaggatgagcaggaggcccgacatgctgggagatggagaaacactggtccgggcgacggctgatgtattggggctgggggattttttagggggaacctttgttctgagatgagccaggaatgagcttgtttcaagagggctggtcagtgtcagtcctggctctgttccgcgacacctctggtgggctgtggtctcagcaggacccacgtgctcaagggcaagccttcccgagcttccccatcgtgttgcccccagtccaggaaaatgaagggtgtgggaggtacagaggcatggctcccaaaccagcggcaacacctgagaacttgttggaaatgcaacttcccaggctccagcctacacccgctgaattgggcatggggcttgtgggtcacgagcccagagctgggtgtggggagactcacttgggtcggtcccacctctgcctgacgacttggaccagccccccttcctctccctgggcctcaggtcagactagacgctctgagttcccttctctgaccttgatgactctgctcattccttcggcaaatatttgtcgagcagctgcttcatgtcagacactcatctgggctctggggatgcaatcgtggaaaaacagagtgacacctctgaccctatggagctgacgttctagtctacaaatgaggctgtggtcccacgggtgcacaagtctcagggtcccacagctgccttttgagaatcactgtgtagctgggtgctgtgacatgtgcctggagccccagctactccggaggctggggcgggaggattgcttgagcccaggagtccagaccagtttgggcaacatagtgaaacccccatctctttaaaaaaaatcgcttatacttgagagtcttaaaggctctaagaggtcccatgagaaagaaacccacttaatttttctttatatcctaaacttgttgaacagcagaatttctcctgaatttctacccctgaccccctgccctgccctgccccacccccaggaacatccttgcgttccccagcacacatttcgagaggtgttggctacagacaagctcatgatgggcaggtgaagggggagcagctttcctggatttggagataaaaggtctcttctgtgaaggcaagggtcgctaacccctaaccgcctgggaggaaaggaaggagagaaagacattgtctctcccagtcggggagctggtctccttttctgggctgggcagtctggtgggagtgtgtgagaggaatgctgtgggctgcagaggcaggggtgctgtgtccttgtggcctcctgacatggccaaggctgcagagagctggaggctcaggatgcccttatagtgcctctggaaattacaggttccccctgctggtaggcacatgccttggtgagcagaggccaagtgaaaaaagcccctctccctctggttgggaatgaggacttgcctcatgaagggatcccgggccggtgccctaggcagggcccatggtggtctgtctggagatgtgatgtggctcgtgaattcctgcggaaactatctctaggtccttcaggtgaccgcacagccccgggcagttgccctggagcccaggtgtggagtcccagccctgcctctgatgctgcaggtggcttggaccagctactttgcccttctgacctgcagtctccttacctatagaacgttttactggagaaccctgagagcagagggatgcgaggccaactgctggtagcagcctggtggggtgagggtctagggttgttttcttaagatccagaagtttttgctttagcttaaggatgtgtgcaattttccatgtggcttcataattcatccatgactttgaattttaaaatggagagaagttggcttc

SEQ ID NO: 40139 - DNA, 2300 bp, Homo sapien
gagtcacacacaaagcattgtgctgagacactgcattcctgctggctgggcttcctgtttccagatgcattcctgtcccagagtcaccacagagactgtttggaatcccgccccacattctccaaattcagggcgcgatctggcaaaggctccctcccccaccctcttactttggagggagtctgggctccctcctacccagggagggctggcagggctctggcacggccggggtgtgattccacacatcttcttggtcttgcataaggcagttcctggagacccagcactctggttctctctctgcctgtgagaagcggaatgggtactgtctaggaggactgggcagggtgggggcaacccagaggacccatggctagcagggaagggcctgggcttgaatgtgactctgttgagacatggccagcaattctggcacttggctgtcattcggctggcctgcgcagagattggctgtgggcctcagtttccccattttataaagttttaaaatctgatagtttgtggctctctgataaaggctcctgcagtgggtgtttggggactggttccagaaaggagcaaagggaaggggatgcacagactgtcttacccctcccggtaaacagccacttccttccagtggctctggctccagcctctcccctcccctagaggtccaggtgctagtctgcacgtcctccagctcccttatctgcctccgggggatttgggtcctgctgggatttttccagccctgccccctccctctggaggaggtgccttctttagaggacaccagccccagtctggtcaccaggctctctctcatcttcagtagcttcttgggctccttttaggttggggactgaggggtggaatcccacgggccaaaggcagggtgaggtgggaacagggggacatttacactttggcccagtctccaggcggctccccgctggctcgcatctttccagaccttgagacctacccagtccccagctttagggagcccgggatgagaaagaggcaggggaccgggagggggttcagatctagctgaggacacacgcgcgttctgcagttgtaaaagatttcccggtgggcaggatcgtttcccctcccatcgcccaggtttccgagcggccaagagactggcccccaagccacactgctagggagcgccgggtgcccgcgtcctggtcagcgctcttcccaccgccagcacgtggggctcccatttccttcctggctcttgtccggtcctccagccagccccggctctaagtccgcggcaggaagacggacgctgcgtgtgaacccgcggggccgggcggaccggcgccccgagccagacggcgtccccaggcgggggccgggtcctcgcagaacagctgatcgggacccttattttggccacagccacagttgggggcgccacccagtccgtgccttcgacctcgttcttggcgacccggccacctgcgccccccacctggcacccttgccttccctcctctcgcccctcccctccctcctctcgcccctcccctctcctctcccctcccctccctctcctctcccctcccctccctctcctctcccctttccctctcccctctcctctcctcccctctcccctctcctttcctcccctctcccctctcccctccctctcctctgcccaccctctcctcgcccctcccctctcccctccctctcccctccccaccctctcctctcccctcccctcgccctcctcttcctcgcccctcccctccctctcctcgcccctcccctccctctcctttcccctccctcgcctcgttcctctcatccctcgtcttgccccgcccctttctcctcgcccccttctcctcgcccctcccccttcccctcgcccctcccctcctctcgccgctcccctaccttgcctcgcccctcccctccctcgtctcgcccctcccctctctcctcgcccctcccttcctcgtctcgctcttcctctctcctccccctaggccacgccccccaccgccccgccccccgcccccccagccccgctccccgcccccccagccccgctgggagtgtctgggggccgcgcccagctgggtcgggacgcgctccctgagctgcccgagctccgcggggactcgggccgggatcctcgggcggctgcattggccggggccggggccgggagcgggccatgatgggccggcggcgcgccttcgccgtggacggccggggtgagtcacccacccccaggctggccgggctcccccctgccccggagc

SEQ ID NO: 40140 - DNA, 2300 bp, Homo sapien
gacgctgcgtgtgaacccgcggggccgggcggaccggcgccccgagccagacggcgtccccaggcgggggccgggtcctcgcagaacagctgatcgggacccttattttggccacagccacagttgggggcgccacccagtccgtgccttcgacctcgttcttggcgacccggccacctgcgccccccacctggcacccttgccttccctcctctcgcccctcccctccctcctctcgcccctcccctctcctctcccctcccctccctctcctctcccctcccctccctctcctctcccctttccctctcccctctcctctcctcccctctcccctctcctttcctcccctctcccctctcccctccctctcctctgcccaccctctcctcgcccctcccctctcccctccctctcccctccccaccctctcctctcccctcccctcgccctcctcttcctcgcccctcccctccctctcctcgcccctcccctccctctcctttcccctccctcgcctcgttcctctcatccctcgtcttgccccgcccctttctcctcgcccccttctcctcgcccctcccccttcccctcgcccctcccctcctctcgccgctcccctaccttgcctcgcccctcccctccctcgtctcgcccctcccctctctcctcgcccctcccttcctcgtctcgctcttcctctctcctccccctaggccacgccccccaccgccccgccccccgcccccccagccccgctccccgcccccccagccccgctgggagtgtctgggggccgcgcccagctgggtcgggacgcgctccctgagctgcccgagctccgcggggactcgggccgggatcctcgggcggctgcattggccggggccggggccgggagcgggccatgatgggccggcggcgcgccttcgccgtggacggccggggtgagtcacccacccccaggctggccgggctcccccctgccccggagccgcttcccgcccccaagccgggcaccctctctcagtttcttgcccagccccgcgcaccccgcgggcggagcccgcgccgctgcgcctccctcgccgcctccctggaggggcggtcatcaggggacgccatgcaggctggaacccctttgggcccaggcgttaaaccagccaccgcctccgccccacttcctccggctccgcttccctcgccttcccgctccttctgaggatgtgggaatccgcccgcgccccagccccctccgtggctgcggacccctctcccacccagtgacctcctggcccacttccttgcccagaggggcctgggttggcattcggctcccgcgtgccccgcagctcgtccccgcccccctagcctgtttcccgtaccgttcattccgccaggacgccccgtcgccagagggcctggcggaggtgacagtgagggggtgctaatgctgccccttcgtccctttctttcacttcagttctttcattttaaacttttcataaaatcttcactattgctcacttacaacaaaagcccaaatcggttatagcggtgatttttatcactctcccggtgagctgcaggagagacttcacctggcatcctgatgccgcaggggcccccagagagcaggttggatcccaggctttcctctctgtaccctctcccctctccctgaagctggatacagtcctactcccgcttggggagcagcggaagagcctgtggctccctacttctgactcgggagatcgtgggctgatcctaggtgggaagcgcaggcgcaggccgtctaagggattgatggatgtggcctgccagggctttgcctaccacacagctcagagcacgggttccctgtcgctaacaaccgttgcgaagggaatcccatccacacatctcccagacagctggggccatatccgggctgcccgtggctgtccagtgaccgcccttcctcactgctccgggacacttctccctggggcagtgctgccagccttcaggaatgctgggggtgttgggggtggcctgcccagcctgacgctgactctccatgcagatggggctggcgagggcctggcacggggctgcatagtgcctggagtcaccagcacctacagacggatccccgacgctgcccacgggtgctcatcctgggagagaggtgacaagttcagaggtgtcggcagggaggcactctttctcaaactggcctcccgggactcaggagtggagatggcagttggggacagccccctggccgccttaccgggcctttctcaggactccct

SEQ ID NO: 40141 - DNA, 2300 bp, Homo sapien
gtgagccccgtgcccagcccaggttagggcacggagaggagactgataagccaggatgctgagattgtcatgccagttgtcattattgtccccgcaaaacttgagaggcagtctgggaggggctgctagaagaaacagtagttaaaacaccccatttacagataaggaggcagggttctgggtggggttgggggtagttgcttttccaaagccgcacggtgagtcagtgacagctaggaccagaatgtgggaaatctgcctaccctagctcagcaacccctcaccctcaatgctgacatttaggccaccttccaggttcgtggggagagcaaggtggagcacaaaggatttcacagtgggtgaaggccatcatgcttcggggcttgtattgaatcgttctccaggaggaagaaataccaagtcatttaacagccccgggctgcgcccacacccagctacccaccagcagataaaccacgttctctcaactctagggccattgttagttttatttcccccttctagcctaatgtcttcttttcattccacaggatcgagtccagggacctccctgaaaggcctcagtgccgcccccaccggaagacctttatgccatcattagtggttaagaagcaacgagcaaaaaacctttctgtaggctgagacctctcggtgcacctggtgaccctgggtggaggggacttgctgtgaagtcttcctcgccctctgccctcttgctgcttctccacattgccaggaaaagctgctgacgcctgccctcctctcttgagtcgagggctgaatctttctcctctaagcagtctggtcaggaaccttggtttcttgagaggcccccaagatgccgcagctccagggctcttcctcctcaccagaaatccctgggcttccacaatgtgaactcactcattgtcaggtgtccgtggagtgtttttggcatggtgacctgtctgggcccagcatgttgcagatgtgtatttatgcgcaatggtatgcatatctctgtgtgactgtcagtgttgcaagctggctggatccaaccatctcttctgaaataatgcatccaaagggttgatattctgggggaggtcactgcagaaggatggaactgacctttattccccagtgggcagttactgagctttcctcctcagagccatgctggcagccctgggacagagaacggtgtggctttggctgcctctgcatggaatcttgccccggactcctgaagactgcacaaggaatgaggaagatcagggacaacctgggaactgaataactttcaaagccagtgctcagcttctctgctccgtactagcgtttacaggtcttaattcaaaccagatgcctgtactagtttttagaccccaagtcaacctttctgagccacagcttcccgctgggaataatgatgcctgccctatctacctcacagacttgttatgaggataaagtgagattaaactgcctcaaagtgctttgtaaacctcaggtgaataggaaaggggaaagtaaggctggagtgatgatggggaggtcggaggataagggggggctgggattgctaatggggactaaaatggccagtctcctggcaagattttgagcaggtcatttcattgaggcctcttagatttcatatttgagaattagggcactgattcctgactggctaggcatggtggtcactggcttgagtcagaccaggaatgtctcttagaaatggtcactgataggcatccttctcctccagtcaggaggggctggtttccttatctgttgcagtctcgactgccagagggaggcgagcgtggtaggcagtcgggggtcccttgtgtttggggggcccagctcccgcttcctttgagcccggaaccaatgatccgaagccttctttcctgatgggattctttagcgaggacactaccgaggcgcgacttcctgacgcgcatccgatccgggaaggcgcacttccgctccccagttgccgcgggatggcaagccggcgtgggggaagggagaggtcggcggagacgagggagggaccatatccgggagagcggcagcttccgaccagtggtcgcgcttccggagaggcgcttccggtggcggcggcagcagcggctgtggtggttccgggtgtctttgtccccccggtgtcgctgccctggcccgcaggtgggttggggggccccctgccgcccctctgccccttcgcccctccgcccctccgctggccgaggggctgcgagggccgggcggcgaagatgcgtggggcg

SEQ ID NO: 40142 - DNA, 2300 bp, Homo sapien
gacatttaggccaccttccaggttcgtggggagagcaaggtggagcacaaaggatttcacagtgggtgaaggccatcatgcttcggggcttgtattgaatcgttctccaggaggaagaaataccaagtcatttaacagccccgggctgcgcccacacccagctacccaccagcagataaaccacgttctctcaactctagggccattgttagttttatttcccccttctagcctaatgtcttcttttcattccacaggatcgagtccagggacctccctgaaaggcctcagtgccgcccccaccggaagacctttatgccatcattagtggttaagaagcaacgagcaaaaaacctttctgtaggctgagacctctcggtgcacctggtgaccctgggtggaggggacttgctgtgaagtcttcctcgccctctgccctcttgctgcttctccacattgccaggaaaagctgctgacgcctgccctcctctcttgagtcgagggctgaatctttctcctctaagcagtctggtcaggaaccttggtttcttgagaggcccccaagatgccgcagctccagggctcttcctcctcaccagaaatccctgggcttccacaatgtgaactcactcattgtcaggtgtccgtggagtgtttttggcatggtgacctgtctgggcccagcatgttgcagatgtgtatttatgcgcaatggtatgcatatctctgtgtgactgtcagtgttgcaagctggctggatccaaccatctcttctgaaataatgcatccaaagggttgatattctgggggaggtcactgcagaaggatggaactgacctttattccccagtgggcagttactgagctttcctcctcagagccatgctggcagccctgggacagagaacggtgtggctttggctgcctctgcatggaatcttgccccggactcctgaagactgcacaaggaatgaggaagatcagggacaacctgggaactgaataactttcaaagccagtgctcagcttctctgctccgtactagcgtttacaggtcttaattcaaaccagatgcctgtactagtttttagaccccaagtcaacctttctgagccacagcttcccgctgggaataatgatgcctgccctatctacctcacagacttgttatgaggataaagtgagattaaactgcctcaaagtgctttgtaaacctcaggtgaataggaaaggggaaagtaaggctggagtgatgatggggaggtcggaggataagggggggctgggattgctaatggggactaaaatggccagtctcctggcaagattttgagcaggtcatttcattgaggcctcttagatttcatatttgagaattagggcactgattcctgactggctaggcatggtggtcactggcttgagtcagaccaggaatgtctcttagaaatggtcactgataggcatccttctcctccagtcaggaggggctggtttccttatctgttgcagtctcgactgccagagggaggcgagcgtggtaggcagtcgggggtcccttgtgtttggggggcccagctcccgcttcctttgagcccggaaccaatgatccgaagccttctttcctgatgggattctttagcgaggacactaccgaggcgcgacttcctgacgcgcatccgatccgggaaggcgcacttccgctccccagttgccgcgggatggcaagccggcgtgggggaagggagaggtcggcggagacgagggagggaccatatccgggagagcggcagcttccgaccagtggtcgcgcttccggagaggcgcttccggtggcggcggcagcagcggctgtggtggttccgggtgtctttgtccccccggtgtcgctgccctggcccgcaggtgggttggggggccccctgccgcccctctgccccttcgcccctccgcccctccgctggccgaggggctgcgagggccgggcggcgaagatgcgtggggcgcggaaggggccgagcccctctttggactgcaagtcccgtctccctggcaacggcctcggccttgggggcgggcgggaggaggagaaaccgcgcgcctcagtcctcccttggtggcctcgccgcggctctgctgggagacccggcgctggcggctgctgaggccggagcggagggcccgggagcgtgggagcaggagggtggcgcgcagccggtttcgcgtttggtcggccagggagctgccttcccaccagccggtcgaggaaacaacgggtcgggcttccggggagagggccc

SEQ ID NO: 40143 - DNA, 2300 bp, Homo sapien
aagtgctgggataacaggcgtgagccaccgcgcccagccttgtaaccgtctcttctaataaaatttactttttttttttgagacggagtcttgctctgtcaccaggctggagtgcagtggtgcaaccttggctcactgcaacttctaccttctgggttcaagcgattctcctgcctcaccctcccaagtagctgggactgcaggcacgcaccaccaggcccagctaatttttgtatttttagtagagacggggtttcaccatgttggccaggatggtctcgatctcttgacctcgtgatctgcccgccttggcctcccaaagtgctgggatcacaggcgtgagccaccgcgcccggccaaatttactttaaaggacgcatagcatggatccatatatgcgtctcttgtttttaaaagaaaaatcatttttttctcatttcaaaaaaatcacgttaactataattaatgaagtgcagaaaaatagaaaattattcgtaagctttccagaggcttccatcattaatattttatttcctttcagtcttctaaagttgtttttgcagtagctgaggcctactgtgtatacaatgttgcagagtgtgctttttgcttaacaggaatgtttattaaaacagtaaatatccattttaatatctttataacattctgtcatatggctgttagcatggattctttttccatttattgaatgtgagggatttcgattgtttccagttcttttagttcagtttgtattgaatacatataacaatgtggtttcttactgttggtgatgggtcaacctctagtgatgactatgactccaagaaacgcaaacagcgggctggtggagagccctggggtgctaagaagccaaggcatgacctgcctccttaccgggtccacctcactccttacactgtggacaggtgagtggcgaggctgaggtgggctgagtcttgctgctggtaatagtttcttatgtaaatgagatggcgtctatgcaagtgcacatgtatgttcttacagccttttcttacaaaacgaaaagcacatggaaacctgttgtacatactgtttggtggtttgccttttcactgaatgtactttagattttatttcgtatgaacatttattagatctagttctttttttttttttttttttttagcaactacacagtattcattgaatggatgaacatgatttatttacccagttctccatttgcactctatcctaaattttcttggaatgaacatccttctacctacacctgtgtgtttgttgcgatcaatttctagaaatggagcagctggctcaaaggctttgctttaagcttccatagctattgccagttctcctgaagaggctgtgccccttctgctctaaccagtggggtgtggagaccttatttccccgtgccgttgccaacactgttagccgactttttcatctttgtctgtctagttggtgacacatgataatgtggtttgcatttctttaattgtaagtgagattgagcatattttcctggcctctaattcttatgtatttctcttaagaacctattgatgtcaattttccgttttaggcttttgaactttttgttactgatttgtgagttcctttatattaaggcaatgacccatttctctgtcatgtgttataagtgttttcttttttccctttcccagtttgacttttgccatctagagtttgtaaattaagtggtcagatctgatctagcttccttgagaggtgccttacttcaaaagttctcagactgaaaaaaaattcgcccattttttcaaatctttgatggtttcatttcgaatgttttagtctttgctcagtctggattcccttgctgtcttcctgtagccccatctgtgacttcctagaactccagcgccgttaccgcagcctcctggtcccctcagattttctgtccgtgcatctgagttggctatcagccttccccctgagccagcccttttccctccatcatccaagccggatccaggtctcttctgaaaaggaggcagctccagacgctggtgctgagcccatcactgcagacagtgaccccgcttatagttcgaaggtaagctgacaggcgtctctcacttatctgatttctggaggctgaaggcagctctgagtgtctcctcctgcacaggtactgctgctctcttccccggggttggaggaattgtatcgttgttgcatgctctttgtggatgacatggctgagccaagggagacgccagagcatcctctgaagcagattaaggtaa

SEQ ID NO: 40144 - DNA, 2300 bp, Homo sapien
ttcttatgtatttctcttaagaacctattgatgtcaattttccgttttaggcttttgaactttttgttactgatttgtgagttcctttatattaaggcaatgacccatttctctgtcatgtgttataagtgttttcttttttccctttcccagtttgacttttgccatctagagtttgtaaattaagtggtcagatctgatctagcttccttgagaggtgccttacttcaaaagttctcagactgaaaaaaaattcgcccattttttcaaatctttgatggtttcatttcgaatgttttagtctttgctcagtctggattcccttgctgtcttcctgtagccccatctgtgacttcctagaactccagcgccgttaccgcagcctcctggtcccctcagattttctgtccgtgcatctgagttggctatcagccttccccctgagccagcccttttccctccatcatccaagccggatccaggtctcttctgaaaaggaggcagctccagacgctggtgctgagcccatcactgcagacagtgaccccgcttatagttcgaaggtaagctgacaggcgtctctcacttatctgatttctggaggctgaaggcagctctgagtgtctcctcctgcacaggtactgctgctctcttccccggggttggaggaattgtatcgttgttgcatgctctttgtggatgacatggctgagccaagggagacgccagagcatcctctgaagcagattaaggtaagagctggagagcaggaggagatgcattcacgggtaatgtgcacaacctgtcatgttttgagtgttcggctcctgttcctgaatgcataaaacgaggcatctcagagccgaacacccctcatttcacccaggaggaaggtgcagctcagagctgttacgactagtcagagagagcgaggtggctggttcatgtttgcagatagagacctcactgtgtggtggacttccccacttccggctgccttcatcctgatgggtggcagccttgccctgcagtgggagacccaggtaatgtagttttttgttttgtatccctgatctcttcttgcagtttttgctgggcaggaaagaagaggaggcagtgctggttgggggtgaatggtctccttccctggatggcctcgacccccaggctgacccgcaggtgctggtgcgtaccgccatccgctgtgcgcaggcccagactggcattgatttgagcggctgtaccaagtggtgagtgggcttcctgagcctcagctgcaccaacgcaccaggttggggaggttttgttgggaaggcccggtccctgcccctttctgctggttagctctctgccccctagtcccgttccttccccctctggtgcctcagggtagggtggggtgtatgccaaaatctggctgagccaccaggctgcacttgagactccctggagttgtccttgcaccttgtagggtgcttgtgtggttgcggcctccccactgactgatcatttcttgaggacttggtctgtagctttcctgttgtgtcttcaaagcttggttcgcagtgtgtgctcattgagtgctgactggaaactgaagcccttgcctgtgaacgtggtgtctgcgtggagttgtcactaaagaagttagtacctccttttgccatgtgcaggtggcgctttgccgagtttcagtacctgcagccgggacccccccggcggcttcagacagtggtggtgtacctgccggatgtctggaccatcatgcctactttggaggagtgggaggccctgtgccagcagaaagctgcagaggcagctcccccaacccaggaggcacaaggggtaaggctgtgccttagccagcagcgggggatataggtggcctaatcccgggacccagagggtctcatttcagctgttgtcacaggaaacggagcctactgaacaggcacctgatgccttggagcaagcagcagacacttctagacggaacgcagaaactccagaggccaccacacagcaggaaacggacactgatctcccagaggcccctccaccccccctagaacctgctgtcatcgcacgccctggctgtgtaaacctgtccctccatgggattgtggaggatcggaggccaaaggaaaggatctcttttgaggcaggtgtcaagagtcttggggaggctgtgggctgggatttgtgggcctgaagcagtctttcttcctgatgctcatggaccctcccacctccccatcaggtgatggtgctggccgagctgtttctggagatgctccaga

SEQ ID NO: 40145 - DNA, 2300 bp, Homo sapien
cgtggttgtaatttatcagcaatcacctccagtggcctgagcaggcagagcctcttggtggctaaggggtgctgtcatgggaaacggaggttttcatggtgaagacatgctcttcccactggggcaggcggcctgcagaggcaggtggtcttggttccagggggctggcaggagcccatgcagccaggtggccacctggagacaccaccacgccatcccccgaggagctctgtaacccggcctccctcacccccgctcggcactccgctgtagtcagcgctcctggtggctctgactctggcacaggaaataataagccccagccgacagctgtgggaagggggctatgagagtgcctcaggggatgttggggggtcaggctgctggagcaacgagcatagggctcctcccatcctgcaccgtggaagccaccttgcgcacacacggcttcacgctgtgatgccctccttcctgaggatgtgagctcagggtggtgggattggggccagggccagagagctctccacctgctgcctcctgcctgcctcatccttgccctgtcccagcgcctgcacctacccggcagctcccaggcacccacaaggcccaggcactgggaccatccaagcagcaggtggcttctaacacaaggatcagggcgaggaccagggtagctgccggtggtcccttggccatttggggctgagggagaggtggcctggtagcctctcaggcccagctgcacctgctgcctgaacacgtgcctctcagctgcccaggaagggggcagggctccccagcagctgcagctccaccacgcagccgccctgggcaaagcatcaagtctagctcctcccagcagtctcaccccagcccacgccatgggcgactatgcatcctggtggtgtctgcttcccaccctcagttccgtagtgctgaggggcccgcgttctctgtgcacagtcctgggaggcccatggcttctgcccggcaagtcggtcagatgctggtttgattactatgtctaagggcacgggtgagcattcagggtgctttggtggcttcacccacttagcaccttgttaagacagggagccccttatggacactgttgaggtagaggattcctgtcttggggataagccctttgtttcatcaaaatctactccctgggtctgacttagtttgggggcatttaatgctttggtaaagttaatatcctcttactccctggcaaaactgttcattactcttacctcaaatgtacacttgatttgctgaggctttttaaaaacaggccggccacggtggcttacgcctgtaatcccagcactttgggaggctgaggcgggtggattactcaaggtcaggagttcaagaccagcctggccaacatggtgaaaccccgtctccactaaaaatacgaaaattagctgggcgtagtggcacacgtctgtaatcctagctcttcgggaggctgaggcatgagaattgctggaacccaggaggtggaggctgcagtgagcagagatcataccactgtactccagcctgggtgagagagcaagactctgtctcaaaaccaaattcctggtcatgtcctttgagaggcacatctgggagtcctgctctgtgtggtagctgagctcctggaacctgacagtgagtctgccagcatcctctcaactctgagtgcctatgatcccagtctcagtaactgcttcctgccctcgtctttcctcctctctgggttcctcataaaaatgtccaggaggaaccaactcttctggtcctgggtcacctccgaatggccacagagtcatgagctccctgggctgcgcagcctgatcctggacactgcagggctctggcttgcctggtagacgccccctgccattgcaccgagggccagccctccagcagcagcagcgagagcctcaggagagcactgctcctggtcactagaggacacatgatccacaaagacgaggccggtgtggacctgcagcgttgcatcgtccactgctgctctctctgagggccactcctctgagtctcccacgcggtcccttctagtcacagtggaggtcctcagggcattttcctgaagcagctggttggaactttggcggttccaatggcagagccagaggatttctgctgctttcatgttgccaaggagcccttgaaggagaaggtgccctggggcaggggtgagtttagatttcagttctgccacctgccagtggcactgtgagggctggaaagggtgccagacagagaatgtggacacctgtgtt

SEQ ID NO: 40146 - DNA, 2300 bp, Homo sapien
aaggcgcccttgaaatctgatccctggcttctgaagcccaaatggagagaaaccccggccacttcccaccaccctggtggcccaccacctgccaggaaggtgggggcgtggcagagggggcgcacatctccgcagcggatccgctgacctctgcatgagccctcaggcctgcctggctggcttctccctgcatccccacagctgacatacgatctcccccaaccacataaaaccgcgcagcctacagcctcttcccattggcttcctcttgccagaagagaagctcccagggaccccagcaccggaaacaggaaactccagctttcctgtcctctgatgaagatcacggccacatggccaccccaccgcccccagcctccctgcaggggctcggcctctaatccccagtctctgggccgtattcacatgtcggatggggatgctttcaatttccctttcctggtgggtggaagctcccggctgcgtgggcacagaccaaggcatggcaggcattccccaccagtgctggctgcgcccagcccacctcccagccggcctcgctcaccttccctctccttctcctcttcgcccctcccatccccaggggagtgagtttgatattgagccttaggacagacaagaattgggcagtgatcatgggtaatgctttgatcactggcctgggcccagcccggcccccttctttgaggataaatgtaaaacagacttcaggagcttacagtctagtggaaagccacagcgtgttctcaggtcagcggccaggtgtggcagctgccagcgtggtgcaggaccatggagcggggcatgctcggtgggctgtctgacctgcccccacctggcctcggaggctgtttcctcacatgtggaaagagaaagccaaactgacttctcataatgggacagtcagcacctaggagtgggagaggaggttttggtgggctgaggtgggcagggagagaggaggggtgaagtgcgctggaacagcagagtggagcctgggtcctggcttcacgcctggggacaggctcccccagtgtggttgggtagagtcagcagggcctctgtggggtcccagggacatatctgggaggggctggcacaggcgcccagcctgtgcacgtctccacctcccctgccagcagcctgagccctgacctgagatcccacacagcaccgtggcacatccactgtccaccccggggctttggcaaagtctgttctgttgctaagaagtagaaaacggggagatggggcctcaaagggtcagtgagtgaccagggcagatgtgacagagtcctggtccactactcttcagccaccttggcacaagctgcgccctgccctgactgatgtgagttcccactgaatgtagaaaggtgtgacacttgtccctacccctagggaatcccaatcccaggacccaacctccccccaccgtggttgtaatttatcagcaatcacctccagtggcctgagcaggcagagcctcttggtggctaaggggtgctgtcatgggaaacggaggttttcatggtgaagacatgctcttcccactggggcaggcggcctgcagaggcaggtggtcttggttccagggggctggcaggagcccatgcagccaggtggccacctggagacaccaccacgccatcccccgaggagctctgtaacccggcctccctcacccccgctcggcactccgctgtagtcagcgctcctggtggctctgactctggcacaggaaataataagccccagccgacagctgtgggaagggggctatgagagtgcctcaggggatgttggggggtcaggctgctggagcaacgagcatagggctcctcccatcctgcaccgtggaagccaccttgcgcacacacggcttcacgctgtgatgccctccttcctgaggatgtgagctcagggtggtgggattggggccagggccagagagctctccacctgctgcctcctgcctgcctcatccttgccctgtcccagcgcctgcacctacccggcagctcccaggcacccacaaggcccaggcactgggaccatccaagcagcaggtggcttctaacacaaggatcagggcgaggaccagggtagctgccggtggtcccttggccatttggggctgagggagaggtggcctggtagcctctcaggcccagctgcacctgctgcctgaacacgtgcctctcagctgcccaggaagggggcagggctccccagcagctgcagctccaccacgcagccgccctgggcaaagcatcaag

SEQ ID NO: 40147 - DNA, 2300 bp, Homo sapien
tgctgtgttcacagtggcttgctacggaaccaaggagggcatcaggggtccgtgacgcaccgtccatggctgtggaaagcttagtttcccagcagagaaaccagagttgaatgggtaactgcagaagcctaacactactgtcctcagtcaggaatggatgtgggcagagacagtgcctctgaagagcggtggtggtggtcatggggccaaggcgagcctgacagccacatcagtctcatgtacggggcatcagtgttgtaggcgggcttgctgtgccgtgggccgctgggccccacctccagcctccaactaactcatgagctgggcgagacctgaaaatgtgtgtccctggagttcccaggtgatgctgaggcccacactgtgagctccactgatctggacagttgaggggaatggagggatgcttttcctgagcgtggaatctcctgcgctcccccagcaaggtggaaaatccccagttattctaaaaaagatgacctttctttcagaaactcatactactttcagagtgctctggtgaatctttgaatcttacattccagaggccgcatcaggactccagagacccgggtggggtccaagaccctcactttctctaaggttcaaagatcaccagcctcctggtgtgggccaggctgactgtgcccctctcccagtccctgcagggaacaatgaggggtatgggctggggcagggaccacaggtccagaggggcatggagacctgctgtttatttttgttgagggggaacagagtcacactgtgtcatccaggctggtctcgaactcctgggctcaagggatcctcctgcttcagcttcccaaagcacagggattacaggcatgagccactacgcccagccaagaccatggtgttcttggtgtcatctaccccagctctgctctgctcacatgaagcgggggcatcactgggcggggattccagacccagttctgcccagggccggccactgagcccactcagttccttgacttcctgacaatgcaagagctttaggaaagaaaggggaaaatgcagctgggctgggcgcagtggctcacacctgtaatcccagcactttggcaggcaaaggcaggtagatcacctgaggtcaggagttcgagaccagcctggccaacatggtgaaaccccgtctctactaaaaatacaaaaattaggtgggtgtgatggcaggcacctgtaatcccagctacttgagaggctgaggcaggagaatcacttgaagccaggaggcggaggatgcagtgagccgagatgatgccattgcactccatccagcctgggtgacaagagcgaaactccgtctgaaaaaaaaaaaaaaaaggaaagtggaaagaccgtgtcctcgctcctctggctttttgggttgttttcctcagatatttttttaagaaatagcagaagatgtttttcagaaacatttccagctttatccagaattttattatctttttattatgctgtatgtgatcatttcataatcaaatcaagttatacgtaacgtttgttcctaaatctacagagtcactccacagaatttaagaggtgtttttccctccgttgcttcaacatttctggaaagtttacatttccagccttctcccacagtttgcccttttgctggttgactgtagcactctcccagattccagaaaaaccccaggagggtgctccgggctggctagtccgctcagcgctgctttgctgactggtgaaggggcctggcggaggcagacccttccccggggagcgcagggtcagggttcaggttcatgccatggagtgctaggcaaggccacatctgtgattaactgggaggcagaccttatgtcatgggtcctaagacactttttccacagttaatgtctctgaaatcaaagtactgaaagtgtagcctggtttgattgacaacaattttttctcccttagtagttcatacaataagtgacttataatgaagagcatcttaaattcagtaacatgcatatggtaagaaatgcattcacaatgtgtcttctctcctgagacctgccccagatgcactctgacactggtacagacggcatcaggccagcatgacccttctccagggccgcttcctgcccctccagaattttgtttctagaatctagaaataatggaggcctgaaaacatgttcaggaccaagagctccaaagctgccagcaggtctccagcccgcctctgagccgcctgtgactcccaggcttcccatctgcccagcagggaatgtcaacac

SEQ ID NO: 40148 - DNA, 2300 bp, Homo sapien
agattgaatcccacccccctttaagcccacagtttttatccctagaaagtttttatctccagaatgggaaaggaagagaatcatagattcttaggaagttagagctggaagctcatagagaccatctagtccaacctcctgatttttcctgatgaagaaaatgaggcccgtggaaagttgcaatgacttcctcaagttataaaaaccccacactggcaaagctggagttagaactcaggcgtgagcccctggctgatactctttccattgcctcatgcttccctgggcagtgaagccctcccagtgttttggaatcccggtgcaaaatagccttttcaacctcctgacccacaaatctgagtgggtctcttggttttaacatgggagaccacaactgtagagcctctctgatgtgacagctacaggaagtccggtgctgtgctggcggcagaggccctcgtctgtcatcccagcccctgacggttctccttgtcttactagcttctcccctccttggcagagctctcaaaagtacaggaaagagattgcttcagtgtggtgagaagtttggcacacatctgaccaatggctccatctctagcaaatccagagtaaggtcacttgagaggaaacaggcccaagttaaaagcaccctcacagggtccagtggcttacgcctgtaatccaacactttggaaggccaacgtgggggcatcatttcaagcaagaagtttgagaccagcctgggcaacaaagagagaccccgactctaccaaaaaatatgcacgcctgtagtcccagctacttgggaggctaaagcaggaggactgcttgagcgcacgagttcgaggccacagtgagctctgattgcaccactgcactccaccctaggtgatagactgagaccctgtctgttaaaaaaaaaagttggggggtggggcctctctgcttcatgcagaggcagggtgctgaccaactcagcgctgacctctcatgcagaggctgaccatctgtggaggctctcagctgaagtccaaagaatctgggtgtgcatatgttggtctctagccggctgcaggaagtgggaaggtgtggctttgagtctccagagtttaatccatgacagatctgaaagggaagtggtttcaagagggttcttttattctgaatgctcactacaaacaaaaaccctcccagcaccccaacctttatcaaaatgaactttgttctccacagaaagtgtagacaaaccagctgctttgccagtgtgttggtggcaagatctctggctccgttgatctaaggagtggcaaggactcgcagtgcgggcagatgcacacagggcatccctcttcccttcctcgcatctgtctcgctggagatggaattgtggtcctctgattatggcatctgctctctgatagactgggggtcaggtaggggttaagaaactaggtttgggaggctggcagcctgggtccccatcctggccctgccacatgctgtctctgaccttgggcaagttccttaacctctggagccttcattttctcgtttataaaatcaggatgatgacagtacctgtgtcacagatgttactttgaggctcacacaagataatacactgaaggcacctaacacagtgtctggcacaaaataagtccccagttaactacatcacaggaagctggttgatttgaccttctttatgaaccatcagggactcagcctgtcccaggcagctagatttcccaacgcaacaaaagtcggctgggcctttgatctctcacaaggaatcacagctgagctacagctcggagtagttatttgcttccctggcctatacccctccactccccagaggcactgaagtagaagtagtaagaccctgcctcttcagtctcattccccacccaccaccccctcccggcccccaaaacaggcctgggctgtgcagttgtctcagcatctctggcagctgcccttgaacagcagtgacgcactctgttgttcttgcccaggcactttcagggaggggagcagctgtggctgcctgggttattggaagtcatggagcccctgtcatgggaagaaatgctcacgttatcttcagggagtttcaggaggtttttggctcaaggcacccaactgtcaggcacaaagaaagcattgtgtccctaccctcactgctctcctgtgcccaggttattaacacaaattccattattgtcaaggctttggctagaatggcttgttcctgctggggctgaccattagaactgagatggaggaacaaaagc

SEQ ID NO: 40149 - DNA, 2300 bp, Homo sapien
tcatttgcactgtctccagaatggtccttgagggcaattgctcactgtccaaaaaccatcctgtctgtcagctgtaatccctgagaatgggaaaagtaaccagggtgtggggaaggaacccatctccccgtgaaccttttctgtttaggtctgagaaaggaagcaacaatttcattttttctttccttttcatttccagaccttacctttcctccctggttattatgtagtcagaatttatttgtttacagaagatgcgaatcagccagcccccaaagggttaacactcccaaattatggggctgggttaacaataaacaggatgtcctccagaaattaaatttaaaccactgtgactcaggctggcccatcccctccactggatcactgtttggggtcattatcggtggttaattacacccttgggtttagcaacagtgtgttggtcagtttgggccaaaggaaagcaggctcagggagaagggggtgtggagggaagggtgggatgtgggcctggtggagcgggtctggtgcattgtggaaacgggaggtttgaatggaagagccaaaaggagagggatgagcatggctggctgagagccctctgccggagctgatcgcagggattcttgactcacttcctacctgggatcgggagtctaccctttccatagccattgggatgcactttctagcctggcctcttttcttcctggagttggagaatcatagaatgctcagtgcctcaaggaagctcctaaattacctagtttaatctactcgttttatgcagcaggaaatggagtcccagtgcagccgtcacctgccgaagggcagcctgctcagtggaagcggaggccaggctaatgctcaggttgagactcctagacccatgatcctccttccgctgtgccatgctgtaaagtagggaatctgaggtgcagctcttcatagcaagtccaaggcagacttgggctggatttcagattattttccaagttagcagctttttgattttgtgagttttcccagggaaataatccagcccggccaatcactaatgcctctgttatttattaactctccccagcctccaaagaagatttgcagatccaaagtttgcccctctatagagaagtagcaaagcacctaatatagaccataatgattcgtgatttcaaggatgatagctattacagtgagtctgtaatttctgagtttgcacctcctcaagacacaaggttttattgtcattcacagggtgtcttccctttcctgccatcctcgcgggtgtcttccctttcctgccatcctcgcctttcctctcttcccctttcctttcctttcctttcctttcctccccctccccttcccctttcttcccttctgttcccttcctttatctctttaaaagacagggtctccctctgttgcccaggctagggtgcagtggtatgatcataattcactgcagcctcaaactcctgggcttaagtgatcctcctgcttcagcctctcaagtgactgggactacaggcatgtgccaccacgcccggctaatttttggtggttgtttttttgtgtttttttttttgagataggatcttgctatattgcccagtctagtcttgaactcctggctcaagcagtcctccacctgggcctcccaaagtgctgggattgcaggtatgagctgccatacccagcggatttttttttttttttttggagatagggtcttgctctgtcgcttaggctagagaacagtggtgcaattataggtcactacagcctcaaactccttggcctcaccttttcattttctttaaatgacagactatcagtagcaaagatgttctggggcagagcaacctgcatctgacactgtaggtgggaggacctatctctctcttagaaccaagcccagatgccaatggttgtatgcccaccagggcacatggtccaagtagcaagccatggccacgcttcctcgccctcctgggggaaagtggcctgtactgtactgatactttgagctgcatccttccccacttctcacaatatctctctttgtctctttctcttataggattccttttaagattgggcagcccaagaaacagattgtgcccaaaacagtgagtaactcgattgttttgctgtgagattcagttctgtatcacatggcctttgcataagaatcaaagctttgaatcaacacatcttggggctgggaagacagcaacctgggccttcttcctgcttatgcggatctagaacctcacatagactgaggctta

SEQ ID NO: 40150 - DNA, 2300 bp, Homo sapien
agacctgcccacttctctgggcttgcccctctgttcacctgcctttcccattctcctatttccctagggcctctagagtcaacaagacagctgacttggaaccttgcaatgttggatactttgggatgtgatctacccactccatcttatagatgaggggactaaggccacaaaggggatgtgacttatctgaggtcagttatagtgtcaaaggttgaactggaaatagagccgcagactcctccagacttgtagtccagaacttatccattctagtcctctaggatgtgtctgctgccctccagccctgaaacagacttctactaggatatagcagttacctaggctaaaacgtttggaaatatttatccctgtggggcataactgagggaggcagaacatggggaagggaggaagcaggtgggaaaactattcacaggtgctaactgccaggaggctcctaaacccacaacagcccttccatccgtcacactctctgcaaagcagcaaggactctctctttccctttacccacactctctgcccaggctaccctttggtgacttctgctcttcctctttactcttcaaggctgctcttgtgctcattttggcctgtttcctgaggaacaacatggtaatgaagctgatctgcatgatgtgcttggggatccaacctccattggaaacgtcaattgagtcaaactatggactctcaagaatggaaacagaaaacacaaatgagagactgcatcctgtggcccaccctcctacctctcctgctcaagccctctactccaccctaggaggtcaaaacaaatcatacactacttctgctctaggtcattggtcatatttttcccgctaggtcattgattagcaaccccctaagcagtccctgaaacaatcccggtccatctgaggaaggagaattcctagagagaaggtcactgggggcccagcagcacctgcacgggcctcactgccttcttgtctctcttccaaggcagggaggtacttagcggtgaggaaaccaagtcggcccagaatcccaggcaacttgtgagccactaaggccctgaattctgactttgggagacccgaggcaagtcagctgcttgcttggtcctgtctgtgtcttagccatggtaagttccctctgcctggagcctcgtcacccctcatctcagattcacctggctagccccgattctgccttcagggcttggcttacacactggctcctcctggaagccttccccaaaaccccatgtgctacttcagggtccccttctaggctgccaccacacctcattctatcctatcctatagcatgattataattgcctgcttgtctctccctccaggaaagtagctctgggaaggaacaagagcagggcagatacttctctgagatagctgtatcctaaggttggctcggtacctgacactaatattagtgcaactagtattagttaaatgaaggaatagaacgaatggggcaatttacatcatttgagtcctgtagaggagaccaaagggaagggctgaaaggcagggaacaactcatactctgcgtcttattgtgttgaataactctaggaaacattccaacctgaaaagcacctatctattgatattcagagccctgtgccatcttggaagggaaacgtccgtttgtttgtaacaggtaatgcatgtgtggtgtacaaactgtaaaagataggaaagagcattcagagaatgtaagttttccactttctccatcccaaatggcttcttctcccacagacaattgctgccactgtctctggattagaaaccacttgacagaggggacagcccggctaagggccctgcatggtcaggtgaagagatctttaggagtcagtgttgaaggcagaaaacgcccccagaggttcccctcatcccccgttgcagcctgtgtgtctaagcgcttggccagagccagagagtcgccggcaagggaaactccgcggcgagcacgcagcagcagaagggttaacgcgccgggctccgcctcccaaccgcctcttccgggcagagaggcgggcttacgtcacttcctggagactggttgaatccggaagtgaccctagagaaacgagttgtggctgaggaccccggcggcagacgcaggttcgggaccatgagctggtgagtgaggcccaggcggcgggagctgctggacccgcggacccgcgaggcccctggccctgtgtcagtgccgcgtcccggctccctccggtcccgcgcgacccctccgccccagagcaaggc

SEQ ID NO: 40151 - DNA, 2300 bp, Homo sapien
tcaccggatccgctccttgtatggctcttcccggcttggcccgccgccctgcgaccctccccgcagccgcccgggcccctcccgcacctagcccggctcacaccgccgcccacgccccccgaccggccgcgcgccccccctaagggagggagccgggggcgggaggcgcagcctgccctgattctgaccggagcgcgggaccgctgcagcgctctccctccctgagccgcgctggcggaggacagcccggggggcgctgtggctccctagtataggagtggggagcctggcgggagaggcggcgggggtggagagagggggctcgcgggaggcgggaatccctcctttcctaagaactggagaagatggggggaggccgggccctccggtccccagccctccactgagtggaggggaggggaggggagcgaggttgtcatccacctccaccacaacgtgcagctcgggagttcctcccacacgtccccggcccgcgtggccctcccacggcgtgaggcccggggatcctctcttcttccttgtcaacactcccactccccccgagaaatgcacgttcccccaaccccgactccccaggaggggacgagggattcaccgcgcccacgcggccaccgaggagggaatcctcccccgccaagccgatgtgatttggggtcgcacccccatgctcccgccctctcctccccctcgcccgcgggccggctgcgcgcgcctcgggagcaggccccagggagcacagcagccgcccccgggatctgctgccgctccgggaggtgaaagcgctccgggtcggcacacaggccgcccttgactgcggagcgccggcaggcagcaatggggacagccctgtggaaggcgagggggagggcagagactaggggaggcccccagtggctcagagactgtgggttcggcgtcctccttctggaactctggcgggcccttcgcaggcagcagtagacagcgactgcgcccgggcctgctgggccctcctgccatcctgtggccacagaggctgcttggaaccgttagggaatttactggggattcagtgcacgtgtttatctatcccttcaacttcattctttcctcttcaccacgaaaaccgcacatcctcgaccccatatggatggggctcttgtctttggcgcaactgctggggtgctccgaatctcctcgccactgcgctcagcctagagtcagcgccgggtcaggggcccagggaggggcaggggcggcgaatcagagtgaagttggcacaaaagttcttgggatattggaccaaggaattctgacaagttgaaacacccccccaaccctgcgcgcacccctccttccccccacaaagggaagcactccctttctcttaatctcggataggatcccgaacgctggagccgctgaggtagcaggggcgcaacgcacgccttccgggttccccagcagttcccgggctgcaaagggatttcgccagatgttttcaactctctttctaactgctggggtgttggagaccacttgcaaacaaccccaccccaccgcccacctctccccaatgcgctctcctaacgcaaacctcaaataaacacacacaatgagttactggtgtttcgactccacgctacgcgctttgcgctttgcatgcagctgtatccttctttcctctctcttctcgcattcttcttgtttcttctccccttctctttttttcaagagccgcgagcggtgcgggcgccgcacgttggctgcggcccgcttcctgctttctaatgttccattgtgaggagcttccattgtgacgtcgcgccccttcggctgggctttgtctgtccatatatgggcagctacgtcacggagctttcccggggctcagataaataggctggtggagttccctggctgggagcttttgggcagcagtgagcttgctaggaagcggcggggctggtggtggtggtagcagcggcggcagcggcggcagaggcggcggcggcggcggcggcggcggcggcggtggcggtggcggtggcggtggcagatcggggggcgggggggcggcgggcgcgtgtctgtttgtgagatcaatactgaggccgcgtccgacccccttgagccgagatccccccccagcccagcccccaccccaccccccgcacacgccccaccccccccacgacccagcctcataccgcaccagctgaggcacccaagaggattaccccctggggccctctcccgccccccaaaaaagagaagatcccctctcctggcccatccct

SEQ ID NO: 40152 - DNA, 2300 bp, Homo sapien
tagcttcaagattctgctcagatgtcacctgttcttttttttctgaggcagactctcactctgtcgcccaggctgaagtgcagtagtgtgatcttggctcactgcaacctcagccttccaggttcaagtgattcttgcacttcagccactggagtaagctgggattacaggtatgcaccaccacacatgacttattttggtacttttagtagaaatggggtttcgccatgttgcccaggctggtctagaactccgggcctcaagtgatacaccagcctcagcctcccaaagtgctgggattacaggtgtgagccactgggcctggccgacagatgtcacctgttttgcaaccacttcttcccttattaccgcagctgctaacacgtaccatgcgtacaacggtggcgtgtctactggctctgccagcctcctctagggtggagatcagatctcagcactttctgcatcaccagtgcatacggcccatggtgaaattaacagcatccagtgtgtgttgaaggactgaaaggatgaaccacccagaagagacagtatccagcgtattcttccagtgctcaggattttctttttggcctcattccaggagagggttggcaggacaatacttgggagcacttgaaaagcaagaaactcaggagagaggtcaccatccagtgatgaaggcactaccagtgatgacatgttctgtctctacctcaacttgcagcccaggggcacctcacaaacgtgcttcatcgatgacagtgtatgtttatagcgcttgtgttgttgtgaaaataaacagcacttgaagtgtaaaattagaagtaaataaatgagttaggaattattttctccactgtttaaacaaagctacttctcaggtgggacattagcttccttggagcaaagccaaaatctggcttggttagccagaaaatgtaaacacatttctgttaatgttcagggtagaaaggagaacctctcccttaactgctgtgtgaggctggactagttattcaacctctctgggccttggacccttatctttaaaatgaggctaatagtgcctccttcattaagtctttgccaggactgaaatgtacatttcatagcatgatgcttggatcagaaaagcactccatatatattagctatttgaattatgatttgggtttcagggagtttattccacccttataaacatatcaagtggacaccatgttttggtcttttctttcctcctcaaaccaggctgtgctgaatgggaatcctcaaacagccctcagcctcagggataaggtgtcccagccatttctactgtaatggctaagagccctttttgtccagtctctccctgtcctcagttgtccaggtgaggacagctgactttggaatagaaagatgatggggctacgtgtccttattgtgaatcaaaacgtcaggtccatgttttgattctgaggtcagaatcaaaccaacctcctggttggttggcaggtccttgggacttttgtgccttcaaaatgtcaggttatttgccctgactccagtagcccagcacgacccaagtactacattcttgggcagagccagccagagccaggaggcactgactttgtctctccgtagccaaatggctgggaaactagctgggaggagaggaggtgaggccagcagcttgtgaacacacgggcgggctcactgttggcagcggggaggaggctcctgggctgggctgagcccagccaccctcaccccaggggcccaccaccccacctccccacctccccctcctgttatgaaacccacggggacaaccacacatgtgggcagccgggggctttcctcgaattgacaacagcttctcgctgtcgctcggcagaacatgagctgcttacataaacactgcctcagagacacctgcagtgtgggacgcagggagtcggaggagggtggagggagaggcagaaagctgcagggtgagagaacggctccccaccccaccatggaggggccgtctgtgcatccatacactgcacacgcgtgcgcagacacacacacacacacacagacacacacgaagttggttactttctcagctgtaaccaggaggcagggaagaaggcaatgcagtcctcattctttagagactcaacctgtgtccccagccctccccacctcctcccacacccccctccaaactcagcttggctgggaaaggaaactccccagtctgctgtgctcctgcaagctgagtgtttgcaggtgaatctactccaggtacaggagcagctcct

SEQ ID NO: 40153 - DNA, 2300 bp, Homo sapien
tgggctgggcgcggtggctcacgcctgtaatcccagcactttgggagcacacaggtggattacttgagcccaggagttcgagaccagcctgggcaacaatgcaagaccccgtctctacaaaaaatacaaaaattagccagagccgtggtgtgcctgtactcccagctacttgagaggctgtggcaggagaatcccttgaagcccagaaggcggaggttgcaggagccagcatcaccccattgcactccagcctgggcgatgagagtgagaccctgtctcaaaacaaagcatggactcaatggactcaacccagtttccacaggttcaaccagagcctggggttcaaattccaggtctgccacttcttggtgaccaagatcaggttttaactaatgtcactgtgctgtctcctcctccataagatggggtgataatagtgcctatttccaaggattggcatgaggattcggagataaaagtgcctggcacgtggagtaaggaagaaccgccactggaagtgggctcaacagcagcaacctgcactgtgggctctcccttcttccaggccgccatcactgtgctaaaggagttgacacccagaaaagttgagacttctctagtggatgccatttggaagatgagtttcttggtcttgggcagcccttctggcagcatctccttggctgtggctgtcctgtgagctgcatgctcaacctataccccagggcccaacatggggcaggcacgtgggaggtgcttaatgcctatgagtgaagtgggttgcaaaggaatgaatgaatggatggatccgtgagagaatacttagactattcataaattattgagcatttactatgtgccaggcaccttactgagggcttaacctggttgatttcattctcataatgatcttgtgaggaggctactattagactctgtccactaggggagatcttgggaatatgttttctggttggggcaagggggagtcctggttgtacttcagagaacctaatgattgagaaatgtgtttaatatgtagcccctaaggggggctttttgctacaggttgggatcctggaggcaggaattgagccagaaagcagactatgctgaaagtagtttctctaaaggtctagctgcgtgtactttacagcgatgatctcatattccttagcaaggcaccacggtgacaggaattattttacttgtttgtgaaaaggaaaagtggtgcattctagggagacacagtggcctcccagcatccagagagagctcagagcagaagccaggagtcctgagttgctggcacgtctctcccacccccgcctctgagaagcagagagcagagctattggaaagcctgttgcaagccgcctttattcttctccctgcccactcaggctcaaaccagagtcccacatgcacctggtggcaggactgttccccaagggaatgcaggcgacagtccccggctccccttcctcccagtgcactgctggggcaggccacccctttctgagccccaagcagctccccagacctccttctccagatacgattattttgggagagtgctgagtgcagcacagctgcaaggtgcacccagacgcacccttctgtcctcagctggcccttcggagctggcccttcggagctggcctcggtctggggtgcacctacccccaccccctgcagcagtccctcctacacaaggtcactgtgtccaaccacctccaccttggggaagctcacaggctgtggagacaggtggtggaagaatgggggccaggagagtcagagccggtctgaggggcacagcccaactcctagccctgagcctggggtcaccagcttcccagggcttgccttacagccaaggagcaggctggcctttggccagctgaccatccctgggccaacagcagggactggacaaggagctgcaccgaggagcttatataagcacttctactttgcagcctgctctctgccctggcagccaggacaagagtgacaacaaagctgtgtcctgccaggggaggggcctctgccaggaacgtacattgagtccaacttggaagaggcccagtcctcccaaagtacttgtgtccgggtggtggactggattagctgcggagccctggaagctgcctgtccttctccctgtgcttaaccagaggtctctatcctgccaagtgggcccctggggtcgggggcacaggtagtgggcaggaaggcccctgcaggggatccagccgctctaaagttctttctgttccaggtgcccatgggttgga

SEQ ID NO: 40154 - DNA, 2300 bp, Homo sapien
ggaggcactgcgtcacaggcgtaatctatagcaatagcggtttaaatgaatctcctttgtgctcaaacagcgtatctttaacttatcggagaggagctagtgggagtgtgcttaactaggaggctgcacgtctgtccacattccaatgcttcaaaggagtgtctttctccttgaacacagtgtttatagataagagagcaggtctcgctctgagcatgggaacatgatggcaattaggaggctttcctcctcagaggcctcttgtggctttccacaacttattgtcccatatttttatggccagtttatgcaggcgccccacaagcccttttcccaacagggaggaaggtgcgatggagggctggaagcatgcttttccggcattccctatagaacattcccagccagacctgcctgatgagaaggcagaggattgaccagacctcagggtgtgtcttcacaggcactccaatgcccctgacctggccagccgttcctctgcctggagtcactcttcgggctggagttacatgtaagggcattgtttctagaacccactcaggctctcccctggcctacccaccagtgcacccacaggagtcagcccagcaggcggcacaaagcccttctcaacagaggtgctagcaggcgcaggagcaaggctgggacccctcaagcctgggaagctggaagggggaagcaggtcaaggacagttaagtaagagatgggaaaagtagttgccttccagaggagtggagaaccagggggcctctgccagtgactgcagcgaacatcagagacccatgggagggaacactgcaaggacggtggacttctctctctctctctctctctctctctctttcgtatttaactgatgaggcacttggtaaggggttgccagggaatgggttgctggaaatgaatccaggtcttcgattcccagcccagtgcattgctttttttttttttttttttttttctgggagacagggtctcactcttttcgcccaggtgtgcagtgcctcactgcagctgcagcctcaacttcctgcgctcagatgattctcccacctcagcctcctggataactgggactacagtcatgggctaccatgcctggctaattttttgtagagacggggttttgctgtgttgcccaggctggtcttgaactactggactcaaagtatccacccacttcagcctcccaaagtgctgggattacaggcatgagccaccacgcctggcccccagtgcattgttatggcaattttctttctctcttcccttctccagaattctatccagggccaacccgtcaaaacatattgaaaatggagagaaaacagagctcaagtaatttggagtgacatggaggcatgatcacctcagtataaaggtccttagcatcccaaatcaggagctatcaaacctataggactcacaaaaaggtaaactaaggtccagaaatccactccaagaagcataatggccagtctagattttacactagatcagtcctgcttcacatgtctcccggctggccagccccggatgtccggccactgtgagccgatagcttttctgctgtttgttttctacctgtgtgcaggtgagcagaagtaggagcaaagcctcctcccatcaaccagcaaccacccctaccttgcttcttcgtggccttccctctccccaccttccatggcctctagctcaggtagccagaattaattactggtggggttgaagccataacttgttccctggctgtaggccaggctctcaagatgtgcgtcagaaaggccagtgagtgaaattccaaagcagtgtgagtcaccaggggctgagaagaacaggccaggacaataagagcaggatgtggaccaaaatagtgccctgagggccaggggctgggccaggcatcaagaatgctcacctggccaaagatggggaacagggcctccggtctaggtggtttatctctgtgctctgcacagccctggacggggaacaaagcctctggcccagggtttatctctgggctttgcacagccctggaggaggagggaactgaccagcaggccggccccctggtcacaggaatcatgtccttcacctgccttcccataagctggactttggatcccagcccttaaaacccttgtgttgtttcttcctgcagacctggtcgagaacactacttcaggacagggaatagtgacaggccagcagagccccagaggcgaggtggcaggtaagtctacaatccttgggcccttgctctgtgcccagggaa

SEQ ID NO: 40155 - DNA, 2300 bp, Homo sapien
catttgacacccacatttttgtccaagacccttccaccccaatcaacactacaccttggaattcacacagtccagcctggttgaggcttccaggctgagctggctttttctcccaaggcagaaagggcattggctctagcttacagtccgagcagccaccctctcctgcttcatgactttgggtggacgggagttctgtcttcctactccttgctccacaggggctatggtcctgccaggacaggtgaaaggtgatgtcaactggcatctggcattcagctggtctctggaggtgggtggagggaacagggtgtccgtgggagagaccctggcctgccgtgggaatcatgcagagatctcaagttatgattttctctggcgcaggggctctttggcacacagaagatggggtaagtctcttcaatgccaaacatgtggaggaagaacatgtgtgagcatggtttactttctctcctaaatatgtattcaaataagtactttctggtttatggagggtgagttctaaccagaaatgagaagtaagtagcactgtcagtcattgttaacctcttggctagctctgagtagattgagaaaggggtgggagaagcatcctccaacaaccgagcacttcctgtacattgaccaggtaggtaggcacgttgatcacaaacaccttgagggacagcttccaagtatatgcattcacagatgagaagcatgcttcagacaacacaaaattcatttttaacccggctttcttttggcagtaaatttctcttcctaatcatattttgcataaactaatattagagtggatttgcattttcagagcacaagatggaggagtggtggaggcggttcaggtgggtggcaggctggtctgggctttaaaaattgtccagaggtaactgaggagatgaatcaaaccagactgagctgactacttaacactagcagtcaagatcatcctggctgggcatggtggctcacgcctgtaatcctagtactttgggaggccaaggcaggcagatcacccgaggtcaggagttcgagaccagcctggccaaggtggtgaaaccccgtctctaccaaaaatacataaattagctgggaatagtggcgtgcacttgtagtcccagctactcgggaggctgaggcagaactgcttgaacccaagaggcggaggttgcagtgaaccaagattgcaccactgcactccagcctgggcaacagagggagactcaaaaaaaaaaaaaaaaaaaaaagattatcctgataaaaccagccttgaatatggaaagtgtcttctagggacccctcaggttatagatgttataccttagaatctctctattttacagaggggtaaattgaggcagaaaacccaaagaaggcttagggacgattttcgaggctactcacttcatggtgtttctttcagagattagcagctattactgaactccaggaggcaacaggagggggatgggatggaggtggggacccgctgaagaaggcctaggtgggagacaggtaacgtggtacaggtacccaccccacaactcattaagggccatggagggaggaaggctctcaagtgccacgaaaattcccaaagcagcagagggcttgtatggaaacgccggttattcgtccctacccggcccccgccccccgcccccccgactgcccctgccgtcgcctccccgtgggcaagtggtgggggcctgggcttacaaccacacgttctcctccaactagcatcccttccagggtgcactaggatgcctctcagaggttctcccccgcctcccgaaggaaaggggaaaaccccgtgggcgtccggagagcctttgcgcctcgccaggtggagggaccggcgccacccagacccgcgagccgagaccctccccgcggcgtcgctgcgggaggggcggaagagcgcgggcggtgggcgggagcggtgctgcgaggcgggatctgcggggcgtccaatccccttcttcccccgcccgccccctccccgccccccgaacgctttccaccaactgcgcgcggcagtgggcggggcccgtcacggctgtcgtcttgggtgcgatttttttctcctcctttttttaccctcccgtttttttcttttcttttttttttccctatcctttttttgtgaatgaaaaaaggaggtcgcgagcggtacctgggactgcagcgccaggcgtcttcgcggcagcgccttcgccgcgggcccgggcgcgtagcggcggcggcctcgcccctctcccggcgcccctgcgcgc

SEQ ID NO: 40156 - DNA, 2300 bp, Homo sapien
gtgcttgagaatggtgtgaaatggttgccatctcaggagtagatggcccggctcacttctggttatctgtcaccctgagcccatgagctgccttttagggtacagattgcctacttgaggaccttggccgctctgtaagcatctgactcatctcagaaatgtcaattcttaaacactgtggcaacaggacctagaatggctgacgcattaaggttttcttcttgtgtcctgttctattattgttttaagacctcagtaaccatttcagcctctttccagcaaacccttctccatagtatttcagtcatggaaggatcatttatgcaggtagtcattccaggagtttttggtcttttctgtctcaaggcattgtgtgttttgttccgggactggtttgggtgggacaaagttagaattgcctgaagatcacacattcagactgttgtgtctgtggagttttaggagtggggggtgacctttctggtctttgcacttccatcctctcccacttccatctggcatcccacgcgttgtcccctgcacttctggaaggcacagggtgctgctgcctcctggtctttgcctttgctgggccttctgtgcaggacgctcagcctcagggctcagaaggtgccagtccggtcccaggtcccttgtcccttccacagaggccttcctagaagatgcatctagagtgtcagccttatcagtgtttaagatttttcttttatttttaatttttttgagacagaatctcactctctcgcccaggctggagtgcaacggtacgatcttggctcagtgcaacctccgcctcctgggttcaagcgattctcgtgcctcagcctccggagtagctgggattgcaggcacccgccaccacgcctggctaatttttgtatttttagtagagacggggtttcaccatgttggtcaggctggtctcgaactcctgacctcaggtgatccaccttggcctccgaaagtgctgggattacaggcgtgagccaccagccaggccaagctattcttttaaagtaagcttcctgacgacatgaaataattgggggttttgttgtttagttacattaggctttgctatatccccaggccaaatagcatgtgacacaggacagccatagtatagtgtgtcactcgtggttggtgtcctttcatgcttctgccctgtcaaaggtccctatttgaaatgtgttataatacaaacaaggaagcacattgtgtacaaaatacttatgtatttatgaatccatgaccaaattaaatatgaaaccttatataaaaagaggtgtggtttttgtctcccgccccccaacctcccctcctcctgtgaatcagctctgagtgacaggaaaccagggctgtgctcctgctgggactccttccttcctccctcccctctgttttcaggcttggcctcctgggggtgtttcctgaatccgactccccagagtttaaagagctaggttcctggggactgggattcatacctccttcccctctctctcctgcctgctcctccctctggggacagggacaccaatgttggcctggctcacccacagcctcccaggagagttctctgggctgccgggttgcatctggttccgacagctctcggggaatgggcggtgggtccctgaagttggggggccggccctgtttctcagggaatcccgtggtcactctcctatggcttcctacagccctgggtcgaccttcactttctctgccccggccttccctgcatccccaccagggtacccaggttgctcagcgcttcaggcacctaggagacctatttcccgttccccttgccctggaggacccgctctccctttcgtccacagcttccgggaggcccaggtgtgcccccacgctgtccatcttccctagaagtggaggtgctccgggttcccccttcgtccccccagccctgcccatgggcttctgggcctcacttggagccctgggctgcgctgagctgcagggaggccgagcagcctgtagagggcagcatacgcgtggctttccagccagccgccctggaggccgtggaggggaggcagccacagtcctggaggggcctgggcctggacaacatggccgcccccagggttagagccgcttgtcctccagccgcctggtctctcttgatgaggatttaacctctggtcattaggtcctgcctgctacctttgtttcaggttagctcaatcccaggcctaaccagcgttttcctggagcccaccccagggccaggccctctcagctagaacatc

SEQ ID NO: 40157 - DNA, 2300 bp, Homo sapien
aaaaattagccaggtgtggttgcaagtgcctgtggtcccagctacttgggaggccgaggtgggaggatcacttgagcccaagaggttgaggctgcagtgaactctgactgtgccactgcactccagcctgggtgacagagtaagaccctgtctcaaaaaagaaaaacacaaagatgaccaggaaatagatggaagatattaaaaatgccaaaagagaacttctaaagttcaaaaaatatatatctgatatacagtagatgagattaacagcaggttagattctgcagaagcagatcaatgaacttgaagagccctcacagggaaatgtccaaagtgaaacatagaaaatgatgggggaaaaaaaagaacagatactaagttagctctgatacaaaatctaacattctaacgtaaatataataagatctcagtcaccagaagagacagagtatttgaagaaataatggctgaaaatcttccaagtagaacataaactcggctgggcgtggtggctcacccctgtaatcccagcattttgggaggctgaggcgggcagatcacgagccagaccatcctggctaacacggtgaaaccccgtctctactaaaaatacaaaaagttcgctgggcgtggtggtgcatgcctgtagtcccagctacacgggatgctgaggcaggagaatggcgtgaacccaggaggcagaggttgcagtgagctgagatcccaccactgcactccagcctaggcgacagaggcaagactccatctcaaaacaaacaaacaaacaaacaaaaacataaactctaaaaccccaaatccaagaaattcaacataactctgttgtggctttctttctttcttttttttgagttggagtcttgctcttgtctcccaggctggagtgcagtggcgccatctctgctcactgcaacttctgcctcccaggttcaagtgattctcctgcctcaacctcccaagtagctgggattgcaggtgcccaccaccacacccagctaattttgtatttttagtagagacggggtttcaccatgttggtcaggctggtctcgaatccctgacctcatgtgatctgcccgcctcggcctcccaaagtgctgggattacaggcatgagctaccagacccggctgttgtggctttctttacagaaaagtctccaaggagaacataaactctaaaaccccaaatccaagaaattcaacacaacccagttgtggctttctttacagaaaaatcttccaagtagaaagaacatgaaagtctaaagccaaaaatccaaaaaattctttatagagataaaaaaaaaaccccacaacagagcaaacaaaccaaatcactgcaaaccagtgctaagaaaaatctttaaaagcagccagagaccaaagatccaccacccaaagagaggcaagatgccctggggacctaggcccacagaaaccacagcaggagggggaggcagaggcccctgtacactctcctcactaggacagttaggtcctccctccactcagaggtgagaccaaggacatactgtggtgtggggcggaaacagtgaaaacatgaggtgtgtaacaatatcccatgaaactccaatgcttcacactgacattcttctaggtcaacaccagcattctcttgaccttcctttcactgttcctcctctcccttccagcccctctgtacagtcttgagttaggtctaggcccacacacttccccactctgagctgcggtctcttcctctgtaaaatgtgatgattcagaacctctcctggccccaagcgcagttccaggcgctgagcacaccatgctgttccctacaaagccgactctttgtcccttccccattatcacggatacttgccaagaggtggcaagaaaggctcttcccaggccaaaatgcagctgctattatcaagcaggtcaggccccaagtgccacaactcccttctcctaaatctcgttttcccaaggaaccccaaacaatggcattggcgatgagcggccccgcacgcgtaggggcgcagccgctaaggaggggaaggggcctctccagctgcgcccgcgacgactcccgcgcacggaacggaaccactgggccgcagcgaccacaggggagttcttcgccggccgcaggttcaaagcgatctgcaatgagcgcctttaggaattcattcgaaggcgcaaaagaaaaagaaattaaggcaggaactgagcgaggaaggaagggagggaaagaaaggaagaaagagaaaaagagaaagaaacagaaagtaaggaa

SEQ ID NO: 40158 - DNA, 2300 bp, Homo sapien
gggctcccactttggcggcacttgaggagcccttcagcccaccgctgcactgtgggagcccttttctgggctggccaaggctggagcccgctccctcagcttgcacggaggtgtggagggagaggcgcgagcgggaaccggggctgcgcgcgcggcacttgcgggccagctggagttccgggtgggcgtgggctcggcgggccctgcactcggagcagccggccggccctgccggccccgggcaatgaggggtttagcacccgggccagcggctgcggagggtgtactgggtcccccagcagtgccggcccactggcgctgcgcttgatttctcgccgggccttagctgccttcccgacgggcagggctcgggaccgccatgcctgagcctctcaccccctccgtgggctcctgtgcagccggagcctccccgacgagcacctccccctgctccagggcgcccagtcccatcgaccacccaagggctgaggagtgcgggcgcacggcgcgggagcacggcgcgggactggcaggcagctccacctgcaaccccggtgcgggatccactgggtgacgacacctgggctcctgagtctggtggggacgtggagaacctttatgtttagctaagggattgtaaatacaccaattggcactgtgtatctagctcaagttttgtaaacacaccaatcagcaccgtgtgtctagctcagggtttgtgaatgcaccaattgacactctgtatctagctagtctggtggggccttggagaacctttgtgtccacactctgtatctagctaatctggtggggaagtggagaacatttgtgtctagctcagggattgtaaaccaccaatcagcgccctgtcaaaacagaccactccgctctaccaatcagcagggtgtgggtggggccagataagagaataaaagcaggctgccagagccagcagtggtaacactgtggaagcttccttctttccctctgcaataaatcttgctactgctcactctttgggtccacactgcctttatgagctgtaacactcaccttgaaggtctgcagcttcactcttgaagccagcgagaccacgagcccaccaggaggaaagaacaactccagacccactgccttaagagctgtaacactcactgggaaggtctgcagcttcactcctgagccagtgagaccacgaacccaccagaaggaagaaactccgaacacatccgaacatcagaaggaacaaactccagacacgccgcctttaagaactgtaacactcaccgcgagggtccgaggcttcattcttgaaggcagtgagaccaagaacccaccaattccggacacagtaccatgaaggaatgaaaatacataacaatgtgatgtatcatgttttatttcctagactagtgacaaatgaaagctaagtgtagcaagggtgcagggacacaggcacatttgtggactaggtgtgagtgtaagctgggttcgatggtcttttggccaacatagtgaacccctgtgtctactaaaaatacaaaaattagccaggcgtggtggtgcaggcctgtagtcccagctacatgggaggctgaggtgggagtatcgcttgaacctgggagacggaagttgcagtgagccgggatcacaccaccgctcaccaatctgagccacagagagactgtctcaaaaaataaaccacaaggaagggaggtagggggagggggagggagggaggaaagagaaagagagaaaggaaggaaagagaaagcaggaaggacggaaagaagacgaaagaacgaaagaaaacgaaagaaaaaaggaaagaagagagaaggagagaacagaaggggcaggtgcccctgggaaggggagaagatcaagacgcgcctggaaagcggactctgaacctcaagaccctgttcacagccaagcgcgcgaccccgggaggcgtcaactccccaagtgcctccctcaactcatttcccccaagtttcggtgcctgtcctggcgcggacaggacccagaaacaaaccacagcccggggcgcagccgccagggcgaaggttagttccggtcccttcccctcccctccccacttggacgcgcttgcggaggattgcgttgacgagactcttatttattgtcaccaacctgtggtggaatttgcagttgcacattggatctgattcgccccgccccgaatgacgcctgcccggaggcagtgaaagtacagccgcgccgccccaagtcagcctggacacataaatcagcacgcggccggagaaccccgcaat

SEQ ID NO: 40159 - DNA, 2300 bp, Homo sapien
tggcaacttctcaaggggccggtctgtcttagttgatgattttagaggtatatagaggtatttatttacaaataaacaaatatttatttataagtagatgtttacatatgcccaggattttgaagagcctggtatctttgggaagccatgtgtctggtctgtcctgctgggacagtcatgggactgcatcttcgtccttgtccacagcagatgaggacagtgagaattaggttagatctgggactacaaatagcttctctttcaagtgccattacagctgaacattagtgaatcttgggccttctttgggctcagggcagagcaggtgtttatctgccccggcatctgctatggcatcaagagggaagagtggacggtgcctgggaatggtgtgaaatgattgctgactcaggagtggatgggcccctctcgcttctggtggtctgtgaccctgagcccctgagctgcattttacggtaaagattcctgagctgcagcatctgactcatctcagaaatatcaattcttaaacactgtgacaacaggacctagaatggctgacacattaaggctttgtccttgtgtcacgctctattattttatttaaaaacttcagtaatcattttagcctctttccagcaaactcttctccatagcagtccagtagtggtaggataaattatggatgtagtcgttcaagggattttggtcttttccatctcaagccatgtgttttgtcttgttccgggactggtttggctgggacaaagttagaattgcctgaagatttaggcacattcagtgttgtgtccatggagttttaggagggggtagcctttctggtctttgcacttccatcctctcccacttccatctggcgtcccatgcgttgtcccctgcacatctggaagacacaaggtgctgctgccacctggtctttgcttttgcagggccttctgtgcaggacacttggcctcaaagcccagagggagccagtccagccccagctcccttgtgccttccgtagaggccttccttgaagatgcatctagagtgtcagccttatcagtgtttgttaagcttattcttttaaagtaagcttcctgacaacatgaaattgttggggttttctggagttgtttggtttgtatgggatttgctttatccccaagccaaacagcacatgacacacgacagccacttaagacagtgtgtcactcgtggttagagtcctttgatgtttctgccctatggaccctatttgaagactatgttgtaatatcaaacaatacaaggaagcacgttatacagaaaatgctcatatgtttatgaattttgaccaaaataaatatgaaatcttatattaaaagaggtgtgtttttttttccccctgttccccctcctcctgtgaatcagctctgagtgacaggaggccaggctgtgttcctgctaggactccttcctgccttcctcccctccctgccttcaggcttggcctgctgggggtgtttcctgcatccgagtccccggagtttaaagtgctaggttcctggggactggaattcatacctccttcccccctctctcttctgcctgcccctccgtctggggacagggacaccagtgctggcctggcttacccacagcctctcaggagggttctctgggcagccgggttcctgcatccagctctgatagctgtcgggcaagagtcagtgggtccctgagaggtggccggccgtggtcgctgggggagtcccgtggacactttcctgcggcttcctccagccctgggccgaccttcactttctctgtcccggcctttcctgcatccccataagtgtacccaggttgctcagccctgcaggcacctgagagacccatatcccgctccccttgccctggagagcccgctctccctctcgcccaggcgtgcccccatgctatccaccttccccagagcggcggtgggggtgctctggggcttccccctgccctgcccatgggtttctgggcctcacttggagccctgggctgggctgggctgagcagcagggaggctgagcagcctgtagagggcagcacacgcgcggcttcccagccagccgccctggaggacgtggaggggaggcagccacagtcctggagaggcctgagcctgaacaacatggcttcccccagcgtgagactcgcttgtcctcccaccgcctgctctctcctgatgaccaggttccaggagttatcaaagaacagcctctgagctgcgtggagaaagccatggagacagccaggtgagttgg

SEQ ID NO: 40160 - DNA, 2300 bp, Homo sapien
atttttcttccccatggcctcttgactctgttttagttgggtgtgacaagaatgacccaatttgtgcaatcaactttcacattctgcttcccaactctatgaccaagacgttgaggactgttcatgagccagaaaacaactcaagtacaggggcttttgctgctgtcaaatcttccatcacgctaggaaaacagcatgcaatccaacccacctagccaatttgcctttgccttcttccatcagaggggtggccttccaaataggatgttgaccattcacctaggaatgactgtctacaaactaagtagctcttggttggtcagtaaagagctgcgtatagggcagtgtccaagtgaccacagaatccagcagctcctcactcagttccagactcagtctgtggggaacagaggctccctgctcatgagtgtctcctctttgccttcctcaggcaccaggatcccgtatcaaccatttccattttgtaatagaactcttcggggactgccctccccgttagagcttttccaagatctctgaagacatcatgagtttttcaggtttcaagattattttatgtccttcagtcacagggggagcttcagctagtgttccatcgtaagctagtaagtgcctctcaaatggaaactttatagtctaaaggcccagttccctggaggtgctcacagccttttgccattagccctaggcagtgctccacacagggcacagagaatgtgtgttacctgcagtctggtttctagtctacactgtgtagtccaccctccagggccaaggggcctggagtgctctaaagactttcctgcaggccctcgtggctctgtgttaatgctgtcagtcttcctgaagtcctgtcctctcacctcctgcctagatctgcccccagcacacattcctgactccacacatttctcagtgcctgcgacctggcacacatttctgatccgaactcagtgcctggggcctggcaggtgcccagggcactccattgctcaaatccaagcctgtggagaggatgacatatcattcccaggtttctgatgagcagaaaaaaaaatctttgtttctatagtgctatcctcttttatccaccatgtgagaggtcaggagccgactcaccccaagggtctaggagttgtgccattgaccttactgcctagggtcacaggctggcacccttcagtaccacacattggatctctccacacagcagcagtgtgcttaactcaatggggaggtgagtagcccaaggtcagatagttggacctggatagacacttgactgggggacaggctttggaagccactcccctgggcctcctctgtccatggggcctcaatactagagcccacaaggtcggccagagagtgtctgtgcctcgaccatgcaaagggtgccaggttgtggctagggatgcccccggggttcctctccctcctacctactcctcagcctctgcatgtgcccgtcatggcccctgtgtccttcattctgtccactcatgtgttcactgggcccctccttggtgccaggcacccgctactgagggataccaagcccctgccagagaagcttggagctgggtcacagcagcaaggaggctggagacatcagtggcatcagtgcactggtcagtgaggccgctgtgggaggagggagtgggagcagaagctaagagtggactgaagtccttaggccaggaggtagttcagggtttaagaagaggagagacaggcgtcccggggagggagcaggctcaggatgggcctccagtgcctcctctggagctcactacccagactacagcagcgcagtgggcagcgcctcagctccttccccttctgctgcctacagcctggacaggacccggaatcaaaccgcaggccctgggtcaccgctgccggaaagagccagttcctgtccgtccatgcacccaccaccaaaacccaggccttcctggaggtgctaggggaggccatgccccttttctgagtgcttggaagtgactgctgcaagtgacaagtgaccacgccttttcccccgcgggtataaattcagaggcgctgcgctccgattctggcagtgcagctgtgggaacctctccacgcgcacgaactcagccaacgatttctgatagatttttgggagtttgaccagagatgcaaggggtgaaggagcgcttcctaccgttagggaactctggggacagagcgccccggccgcctgatggccgaggcagggtgcgacccaggacccaggacggcgtcgggaaccatac

SEQ ID NO: 40161 - DNA, 2300 bp, Homo sapien
aacttgactctaaaggcccagttccttggaggtgctcacagccttttgccattagccctagtcagtgctccacacagggcacagagaatgcgttgttacctgcagtctggtttctggtctatactgtgtggtccaccctccagggccaagggagctaaggtgctctaaggactttcctgcaggccctggtggctctgtgttaatgctgtcagtcttcctgaagtccctgacctttcacctcctgcctggatctgcaccccgcacacattcctgaccccacacatttctcattgcctgggtcctggcacacatttctgaccctagctcagtgtctggggcctggcacacatttccgaccctagctcagtgcctggggcctgacacacatttctgaccctagctcagtgcctggggcctgacacacatttctgagtctagctcagtgcctggaacctggcacacatttctgaccctagctcagtgcctggaacctggcgcacatttctgaccctagctcagtgcctggggcctgacacacatttctgaccctagctcagtgcctggggcctgacacacatttctgagtctagctcagtgcctgaaacctggcgcacatttctgaccctagctcagtgcctgggacctggcacacatttttttttcttttttttttttttcacagagtctcgctctgtcacccagactggagtgcagtggcacgaatctcggctcactgcaacctccatttcctgggttcaagcaattctcctgcctcagcttcctgagtagctgggattacaagtgcccgccaccacgcccagctaatttttgtatttttagtagagatggggtttaactatgttggccaggctggtctcgaactcctgacctcttgattcgcccacctcagcctctcaaagtgctgggactacaagcgtgagcaaccgcgcccggccctggctcacatttctgaccctaggtcattgtctgggccctggaaggtgctcagggtgatccatcgctcaaatccaagcctgtggagaggatgacatttcattcccaggtttctcatgagccaaaaaaccttcatttctatagcgctatcctcttctatctaccatgtgaggggtcaggagccgactcatcccaagggtctaggagtcctgccattgaccttactgcttagggtcacaagctggcacccttcaaaaccacacattgggtctgccctcacagcggcagtgtgttcaactggatggggaggtaagtagcccaaggtcagacagttggacctgggtagacaatagacttggggacagactttggaaggcactcccctgattcccctgtctccatggggcctcaatactagagccctcaaggttggtcagggagtgtttgtgctttgaccatgcaaagggtgccaggttgtggctagggatgcccccggcgttcctctccctcctacctactcctcagcctctgcaggtgcctgtcatggcctctgtgtccttcattctgtccactcatgtgttcactgggcccctccttggtgccaggcacccgctactgagggataccaagcccctgccagagaagcttggagctgggtcacagcagcaaggaggctggagacatcagtggcatcagtgcactggtcagtgaggccgctgtgggaggagggagtgggagcagaagctaagagtggactgaagtcctgaggccaggaagtagttcagggtttaagaagaggagagacaggcggcccggggagggagcaggctcaggatgggcctccagtgcctcctctggagctcactacccagactacagcagcgcagcgggcagcgcctcagctccttccccttctgctgcctacagcctggacaggacccggaatcaaaccgcaggccctgggtcaccgctgccggaaagagccagttcctgtccgtccatgcacccacccacacaacctgggccctcctggaggtgctgggggagacccagcctgagtgcctggaagtgactgcgggaagggagtacaactgaccacgccttttttccggggtataaaagcggaggagcacgttctattctggcagtgtagctgcgagaacctttgcacgcgcacaaactacggggacgatttctgattgatttttggcgctttcgatccaccctcctcccttctcatgggactttggggacaaagcgtcccgaccgcctcgagcgctcgagcagggcgctatccaggagccaggacagcgtcgggaaccagaccatggctcctggaccccaag

SEQ ID NO: 40162 - DNA, 2300 bp, Homo sapien
agtggcgtggtctcggctcactggaagctccgcctcccaggttcacgccattctcccgcctcagcctcccgagtagctgggactacaggcggccaccaccacgcctggctaattttttgtatttttaatagagacggggtttcaccgtgttggccaggatcgtctcgatctcctgacctcgtgatccgcccgcctcggcctcccagagtgctgggattacaggcgtgagccaccgcgcctggcctcaagtattcttttatagccacaccaacggactgtgacatttccaaaaccaccaaattcagatgtttcaccttgtctatacaggtgagccctacatccacctggaatcgcactagcctgtcaaaaagaaagccatttaataagcgtattaaaaataagagtcaaacgtgggttccacctaacataaactgacgtttaaaacataaattctgtaattatttggagatttcaaaatgctattggattcctggattttgtttagtttgttaaacaaaaacacgtaaaatttcctgacacttgtaagactggtttatccttcaggtacttagctttcgttttgtttttccttaacatagaaggaatctggatgagaacaattggtagagccttaatgaacttgaaagagaactgaaggcattggcatttttccagactgagtgattgctttcacaggaaacgctgcctcctgaaggaagggcgtgccccgctcctggctgcctgcctcgtggtggtcaattcgctgccctgtacctgttgatgcgcaagaaagtggctggaaggaaactgctgccggtgtgctcagtggactcgaaacggaagacaacgagcagaggagagaaagttactttttcctgccgggctgcgtgtttaaccaatttgtctaagaaaagaaggatggagggccgggcgcggtggctcacgcctgtaatcccagcactttgggaggccgaggcgggcggatttggctaacacagtgaaaccccgtgactactaaaaatacaaaaaattagccgggcgtggtggcaggagcctgtactcccagctactcgggaggctgaggcaggagaatcgcttgaaccaggaaggcggagcttgcagtgagccgagatcgcgccactacactccagcctgggcgacagagagagactccgtttcaaaaaaaaaaaaaaaaaaaaaaagaagagaagaaaagaaggacgggggtggggagggaatcagggagtggggagaatggcgctccccttcacgcagctggtgtggctgggagttggcttggaagtttacacacttgagctctatcgattccgaaacttcccgatacatcgtgaggtgtgggcaggagggagacgcgccaggcagcagccaacggggtggagtccccgggcccagcctcctgcgggagggggctctgctgcctccaggcccgggtcgctcctgcctggccccggggaccccgttcttcctccgactccgacgacgggctcctcctgcccggacatgccccgccacaagtgacccgggccaggcacccccgccgcgtccccctctctctctgccccctcccggtgccaggcgcgcttttccccaggcaggaccgcggtggggactcacctgcagcaggaccccgacgacgacaaacttgaaggtcttgtggacccggagccgagggctggcttcccgcgccggcctgggtcctggggcgcgccctgcccgggcccgggcactgggtccgtgctgtcccatggaggtagggagcgctcctcggcccccgcctcgtggttcaatcctccccgcggaagagccccacactttgctgggtgtggccgcggctgcctctgtcccactcgctgcgctcccgggattcggagtcactgccaggaacgcacctagatgtactctagctggtggtggcgccatcctgccaggtcaatccaagaagcagcgtgcttggctatgacaagacagaacttcgcattcggagttcagggcacccctgaccccgcccccttttcggggcacctgcggctcctgttggctaaccctgaacttccttcctctgtgaccgcccttgccgctctcagcttctgttcctcaaccacggccgccgcgtggatgccgctgcattcggagtcgttttgccacttggtcccagcgccaggcttctcggtcgggagttgacctcagcctttctgtgacccagttcctggcacccagcaggcgctcggtggacggatgggtggcggaatgaaggacacagaggccactgcggggtctgg

SEQ ID NO: 40163 - DNA, 2300 bp, Homo sapien
cagggcaattcagcaacaaagatgaatagaaggtataaagattggaaaggaagaactgagacagtttttggttactgacaataggattgcttacatagaaaatcctaaataatctataaaataacaactagaaatatatcaatttagcagtaccatagcatacaaggccgatggacaaaaatcaactgtatttctgtatagttgcaacaaacaatttgaaaataagggaagctaaatcaattccattagcaatagtaacaaaaatagttagaaatatgtttacaaaagatatgaaagatttgtacatggaaagtttgcaaaatattgtcaagcttaagtaacaaatatctaaataaataaatttcatggattgaaagactcaaaattgttaaaatgtcaattattctcattcatctctacattcaatgcaatcccaattaaaattccagtaggcttttttaactgaaaaaaattattctatatttaatatatacggaaatgcaaaccatttgggaggtgggtagtagggggaggacttgaactgcctgatttcaagactgactatacagctcataattaggacaatgtggtaattagcatgagaatagccaaataaataaacggaacagaatagagtccggaaatggacacatacatatatatggtcaatttaatttcaacaaaagtgataaggctattggataaggaaaaaaagtcttttttttttttttttttgagacggagtttccctcttgtggcccaggctggagcgcaatggctccatctcggctccccgcagcctctgcctcccgggttcaagcgattctcctgcctcagtctcccgagtggctgggattacaggcatccgccaccacgccccgctaattttgtatttttagtagaggctgcgtttctccatgtcggtcaggctggtctcgaactcctgacctcaggtgatccgcccgcctcggcctcccaaagtgctgggattacaggcgtgagccaccgcgcccggtcgaaaagagtcttttcaacaaatggtaccggaacaccattaaaatatggagaaaaatgaacatcaatcagcgccccctttctcttacccactcctcagccccaaggtcgccctgggagttcttcgcaggcaggaccgtgactcgcgtggctttcgggaggctgattacccacgccccatgcccgtgcagcgctgggtgcagaggaaccgctggaaggacctgtcccccgtgggacccccaccaagtctcatcccgtgtcatgtgccagatagtctcccgtggtttaaggactttcaagactcttaacaggttaggaaaatccagaagaaaggcagaattgggtccctcgggcttgcctgacaccagggacggtggagttgaggtgacatttcactggcatggagacctgaaaccaaaagcaggatgagccgggcacggtggctcacgcttgtaatcccagcactttgtaaggccgaagcgggcggatcacgagatcaggagctcgagaccagcctggccaaaacagtgaaacccccgtctctactaaaaatagaaaaaaaattagccggacgtggtggcgggcacctgtaatcccagttactcaggaggctgaggcaggaaaatcgcttgaacctgggaggcggaggttgcagtgagccgagatcgtgccactgcactccagcctgggcgacagagcttgactccatctcaaaaaaaaaaaaaaaaaaaaaaggcaggctgaatcactcgcccggtagtgacggaggaggccgtaaaagcctcttagaggccagaccccgcagtggcctctgtgtccttcattccgccacccatccgtccaccgagcgcctgctgggtgccaggaactgggtcacagaaaggctgaggtcaactcccgaccgagaagcctggcgctgggaccaagtggcaaaacgactccgaatgcagcggcatccacgcggcggccgtggttgaggaacagaagctgagagcggcaagggcggtcacagaggaaggaagttcagggttagccaacaggagccgcaggtgccccgaaaagggggcggggtcaggggtgccctgaactccgaatgcgaagttctgtcttgtcatagccaagcacgctgcttcttggattgacctggcaggatggcgccaccaccagctagagtacatctaggtgcgttcctggcagtgactccgaatcccgggagcgcagcgagtgggacagaggcagccgcggccacacccagcaaagtgtggggctcttccgcggggaggatt

SEQ ID NO: 40164 - DNA, 2300 bp, Homo sapien
tttcttagtagagatggggtttctccatgttggtcaagctggtctcgaactcctgagctcaggtgatccaccagcgtcggcctcccaaagtgctgggattacaggtgtgagccaccgcgccggaccaatacttggtacttctgaaatagcagcaatttgtcctagctgaaatataataataaaattttgaattttttttttttgagacagagtcttgctctgtcgccaggctggagtgcagtggcacgatcttggctcactgcaaactctgcctcccgggttcaagcgattctcctgcctcagcctcctgagtagctgggactacaggcgcgtgccaccacactcggctaatttttgtatttttagtggagacggggtttcaccatgttagccaggatggtctccatctcctgacctcatgatccgcccgcctgggcctcccaaagtcctgggattacaggcatgagccactgcacccagcccaagattttttatttttaaagacactcaatagttaaaagtcaacttaattaaaagctaatatttaaaatgtatgtgtatgtgtatgtgtgcataagtgcatgttcatatttaaaaggccttcatggttttgtttttgtttttctctgctaggaccttgtctttttttgagcaaaaactttttttgttctcaattgactcaattctgtttccactcgatttttttttttttttttactaaaatagttattgcaacagaggctactcttgggtttttaagaaagagtatagtttagacacttagaaatgctttgtttacaaaaatgttttaagtgcactgtaaaagcatcatgtggtctagcctcataataattctccctttttggagacccaggattcagtgtgggctctgcccagagctcagagatccagttaaaaaagaattggtagtccctatctaaataacagtggtctccttatacaatccagtgataaatttctataattttatgttcaattggcaattaaatctgttttaatttccctctagctcacagaatttctcttcagaccttataatgtaaattttgctatctgactttcacctgagttgtttcctttaatatgcaaatttaagactatttagctgactactgcctagcactgtgaaacaggttatcaagaatctgaaagtctaagataaagaaaaaaggtttttatgaatctgtaagatgtacttcttctatcagcatgcctaatacatctatgtatttatatgttatgtatacaatgttgcactcctgaaaatatatcaaagagctctaattaattgtcttaaaaaataaaagcatttacatcaaatactttattagaaaaaggaaagactagtcaaatgctttttcaagttatgtgacttaagtaaaatctttaataaataagctatctttaaaattattggtaaagtaatattagaaatgtcttaggaattgccagcatacatttttatttgcgtttattaatcaagcaatttcatacttaaccctgccaaatactattaggtgtcaaaatttggcacaggctataaacccagcccaagacagaatgatctctgctcgtgtaaccattaataaataagacattgatactggtttaatgaaaatagctacatcttgatttagtaaaattaccataacttctaatcttgtggcagtctaggcagtctagtccacaggcagtaaggagttttgttttgggaaaggactgttatactttgtttcaaagttaaactataagtaaacttgcatgggaagagaatgtttaattttgtgaaaaacgaccaaactgtcttccaaagtagctcttagagacaacctgtccacagaagaacgcagcaagccccctcccctaaatgccctgcagcttatttcttctgagatgctgcccctacttcacgttaccagaacttaggtacagctgtatccacccccaggccaaaccacatcctggtactctaagccaggtggggcaagaagtgacaaacaactgcaggatgtagactaacctcagaaagcccctaggccctcaaagccctatataagtccctcaccttaaacaccctgggctgcctcctctgactgttatgcagcaggccggcaggtcaataaacttgcttgcctgactttgagtatactcgtcttttctcttggccaaccttacggtagctgtaccagtttgcatttccaccagcaatgaatgagagttcctgttgctctgcatcctcaccagcatttggtgtggtcagtattttggattttcaccat

SEQ ID NO: 40165 - DNA, 2300 bp, Homo sapien
aataccacactatcttgattactgttgatttatagtaattcttgaagttgggttgtatccgtcctctgacttatttgttcaatattgtgttggctcttctgggtcttttgcctttccacataaactttagaattagtttgttgatatccacaaaataactagccatgattttcactgggatttcactggatctacagatcaatttgggaagaattgatatcttgataatattgagttttcctgtccatgaatataaaatgcctctgtatttatttagtccttcatagatttctttcatcagaattttgtagttttccttatgtagaatttgtacataccgtgttagatttatacctaagttttataggggggtgctaatgtaaatggtattgcatttttaatttcatattccacttgatcattataggtatatgggaattgacttttatacattaactttgtatctgcaatcttgttctcattgcctcttagttccaggacatcgatttggcaattctttcataattttctgcatggataattatgtcttctataaagacagaccattttatttcttcctcttcagtctgtacaacttttatttctttttcttggctaactgtgttagctaggatttcccgtacagtgttgactaggaatggtgtgagcagacattcttgtgttattcctgattccactggaaaacgatctaggttttcaccattaattcttatgttggctgtaaggttcctgtttatgttctttatcaagtggaggatgtgtccctctattcctagagtgccgagactttttatcatgagctggtgttggattttgtcaaatgctttttctgcatctagcaatatgatcatatgatttttctttagtctgttggtggattatattaattgatttttgaacattgaactagccttgcctagctgtaataaattccgctttaacctggtgtacaattcttttgatacattgtgggtttcaatttgctaacattctattgatgatttttgcatctatattcacaagatatattgttttgtgttttttctttcttgtaatgtctttgtgtggttttggcgttagggtaatccttgcctcataggatcagttgggaagtattccttttgtttctatcttataaaagagatggcacagaactggtacaacttttttcttaaatatttggtagaacttatcaaatgaaaccatctgggcctaatgctttctgtgtggatgttgttaattattgattcaattaattagatataaacatattcaagtggtctgtttcctcttgtgtgttttggcagagtgtgctttcaagaaatgtgtccatttcgtctaggttatcaaatttgtggacatacagttattcatagtattcctttattatcattttcatgcccatgggatctgcagtaatgtcccttatttcatttctgatattgagtatttgttttttctctttgttagccaggctagaggttaatcaatttcattgaccttttcaaaaaatcagctttaggttttgttgataatcttttgagtttgttttcaatttcattgatttctgctctttttattattttttctcttctgtttaatttgatcttaatttgttcttcttttatagattcccaaggtggaatcttaggttattttagatctttcttcttttctggtttgtgcattcattgatataaatttccctctatacagagattcacggatccatccgggtggtccgggcaccactggcgcccctctgcggctattccccagttccattttctgaagccacaggtcagaagccgctgtacaacgctttgccgaactccagaatcttgaaggagacgtaaggtgcagccacctgccgcgcaggcgcaagcctttctttcggcacaaagaccgtgggaggaggggtcggcgcaagcgctcggtgtctctctgaaaagaacttcatcatactgcctcctggctgacggagcgcagcgcaacgcatgcgccttgaagacttatggaacttatttcacgctcagggcggcggtgacgtgtgaacgagaaggaggtggtcaaggaacggaagccgggagggaacgagggcggaagcggaccagggccaggcttgtgttcgcagccttgccggggctggggttccgatgtggtccccggagcgggaggccgaggccccagccgggggagacccggcgggccttctgccccccgagtgggaggaggacgaggagcgcatgtccttcctgttctccgctttcaagaggagt

SEQ ID NO: 40166 - DNA, 2300 bp, Homo sapien
tggaaatcaggctttgacttccttgagagtgtgaagcagttattaactggaaatttcttgttttctcaagagagtcttccaaaatattcttatcctgtatctgttccctgctctgctttcttgctttctctatctctttctctttctttcttttttctttgtttctttctttttctttctttctttctttctttttctctttctctctttctttctttttctttctttcagtagaaattctgcccatcctttgtgctgcttttgttgcatttactcacctttgatggggaccattctaccttatctgctgtttgccctcaaaggtgtgggtagatgtgctttgactcccttccctgtttatctaggaatctctagataacatccacccatgatggagacctggacactgataccttttttcctgtttaacctctgagttgcctaaagagggtttggtagaaactagattcctggacagccttcccccggtgcttgtccctactgagtctctctctgaatttgttgaacacctcaataccatgacccagctctaaagaggtggggacatggcttgcttcctgggttttgggtttgttcctccattttggggaggtgcagccactttgtcgaaaaagctgggcctctgttttcagagacagcatgtggtgctaagtggacttgcctctcagcctcacgctgcctagtccagggaccctgggcagacaaaacaatgccatggtgtggcctgctcccacttccattaagccagcatggagtgtgggtagggctggtggaaccagaatccaaacgggtgctctctgctcatcctttttccccaggagttgaatgccctccagtctagggactggggacctgtcagatctcccgaaactcctctcacaaccatgcccagaaaggaaattcatgactcagctccctgagttctctctgcattttggttttgtctttattctaggtcattttttattcttcttgctgggtatctggaaagataggttttgtaatataatataatgccactgtcatttttagaaatgcgttggaaaaaattgtgagacagcaaaatgcatctaattttttctccatttctccatccccaagccacttctcccagtcagctttttgagggacagccctccctcccccatcccgcctgtgctttatgtcagagcccactcagactgccccacccctgaccaaaacctaggtcttaagtgcccttaggtcagtgcttccggattcagagtgaccaagggactgcattttaattactttcagggagcagaacgatttcaaccctggtctcctagattataatcatccatcccacaggctgtctgatggcaagaattttaagccccatttaaggtggacgctagaattatttctggatggagcagagtagcacaagctgctgagctgcaaatcaccgtgatagtggctgcccaacccagtaacccacaaggctaccacgccttgtcagtgccactgtggtgtgaattagacctttttacaggttacatcaatgcgggagaaggaagggcaatgatgggcaacagtgctgaaatatctggtgctcagaaacttccttcctctttattcctctgttaggtccctggggaggggaacaatgaatgggaaaccctagcaccgccgttagctagcttacagtgctattaggttggtgcaaaagtaattgcggttttttacttattagcaaaaccacaattactttgcaccaacctaatagtagctgaacaaaagtgtttgttgaacttaattgatcttacaagactgtgccaacatggaagaaaaaaagaaaagagcccatcttggaatcagacctatctttgctcaaagtaagactctagaatgtaccatctgtgcaacttgaggcaagttatttcacctgtctgggtctcggttttgccatgaatatgaaagctagtcgtgtcactctaggagaagcggtttgtgttggtggcaggtgcgccccctcccaataggtgacaagaacacgcactctcccgttcctgcgttacctcccccaggccgcgcggtggcgctgcgtctctgcagcggcccgggtctctctagggcgctcgggcgcgctggcccctggggacgccgagggcggctgcgacgcgccgagaggccgcggtgagtgcagcagcactgggggggtggtcgtcccgacccccgggctcccgggtgggaaggagcagctgggctgcgcggagcaggcccccgtgagccccgggaaggagcgcagcgcaggg

SEQ ID NO: 40167 - DNA, 2300 bp, Homo sapien
ttgtggggccaccgctgctcaactggcacgatgtgccacgctctgacaggacaaagcatggggcacagatgcacaacaggctccacaggccaaggggcttggctctcccacctcgggggaatcccaggagaggagctaggagttggagaagcagggcgtgtgggctccagctcagatgacagtcctccgggtcagggatggcattgctgcaaagaggagagactccctttcactccaccctgcctaccacatgtgcggctcagcttcctgggaggatcaaagcccacagatgtgacgtggcccctgggagccaatctgaggccctcatcgcatctgtggggcttgctcctgccaaggggctgcctggcacagggggatgggggcgtggagctagcagaagggcctctgcctttctggcagctccttctgggatggaaacatccccactgttttctgaaacgaggacaggagtgttgcccccaccgtggcagagcacctccaggactgtccattctggatgccccgcggacacgtggctggggtgggaaaagatgtagagtgcaagcatctcctctgcaaagggcaccaaggctctgactgggagtttcattggggccaccaatgacctaggacagcaaagaacatacctgcttctcccatctttctctgaaccagctttatctgccatccgttttgcatccaacacctcctcccttgacgagtgccatgtcttaaaacactgagctctgggatggacgcagtggctcacacctgtaatcacagcactttgggagacggaggcgagtggatcacttgaggtcaggagttcaagaccagccttgccaacatggtgaaaccccatctttactaaaaatacaaaaatttgccaggcatggtggcgtgctctgtagtcccagctactcgggaggctgaggcaggagaattgcttgaacccgggagacagaggttgcagtgagccgagatcataccactgcactccagcctgggtgatggagtaagactccatctcaaaaaaaaaacaaaaacaaaaaagcattgagctctggagtctcacggtagaaggctgtgtcttcttttgtccagatcacagtgacctccgccaagtgtcaggctctctctccccttagcgttctggattttccttccaagtccatgcttccctaactctaccccagggatccagccccctcctagatgcccaagggtcacgacagctcagcctgcaagaggaggaataccttcctcgccaggactcaccatcccatcttcccagagtcctgctctctatttcctggggggaatgggtgggtagtgctggtgggcggggggtgtgggggggctctaggctctaatccaggcagctgggaaggagatgtggccctagggagggatgaccgcatacgcctaagaggcaaagcgagatgcccaggacagaagccagggaaaactgggaggccatgaaaccagctgctcccctgagtgtttgcaggggaaaaactgaagctgaggaagatttaaatcaagtctgcaggaagcccagcagtgggacggggtcatccttacaagagtctgtctgtgcgctccgtctgaattctgtttagacaacggagcatcaacctatttctcttcagtctttccagctggtaaacatggtcacataagcccctctctgagcgatgcagacattttttaggcagtgagtcagacctcatgtctcttcttgctccttcaagaagccaaaatagactttctcaaagtcgtcacttccacggccacaaaatgcctccttgtgaatgttctcagtggaacccgggcttagcgtcattttacccagaaacatgagtgaccgagggaagcccaacttagcaacttctgatattatttttagcacaggcaaatgcaggaggaagggaaaagagcctcgaatttcctcgcaggaaacctatcctgttcattgctgtcttccccgttccccgtgcccccactgcccgtacacagcagagggaacctgaggccaagggcagggggctggggaagtgaggagctcctgcctgccgttgtagcagcagtgttagtggatgtaataaaaatcctgccaccgtgactgctatgatgggagtgtcacgaggaaggggacaggtatgtcaagtgctgactaatgtgctaccacttcgcattagttatttgacgccgttcatcttattcaatcttgcggccccgagagcgggcaaagccaccctcccctctttgccgaagaggaagctcagatcctgcagcaa

SEQ ID NO: 40168 - DNA, 2300 bp, Homo sapien
agctctggggtgaaccctggaagtgaccaggtgctgctgctagtactgctgcagacattgccacttggcatttgcaatgtttagttccccctcgaacctcgggcctggccctggcccggcagcaggcccaagcccctgtgtgcagtgtgagctggaaaggccctgcctccttgcatgttaacatctgaggtgagttacctcacctctgccccaccacctccaaagacaggcgtgggaccggctagccacaaccttatcaaaacacggtgcagcctggctgtgctctgctggctggaggcgttctctttcctctattcatgttcagaaaaaaactgggctgccacacacttcgctcccttctttaaaaccctgtgctgctgccactgagaaccaaaggaacaggaaaagggaaatgcctgggctgttttaagagacttggaaagggcttgaccttccctggcatcctccttgggtgaggaggtggagagggtgaggacagaggctcctggctgaccatgaggtcccatacgctccattgtcactggtgaggtcagaccccgctcaccagaaagccacacggttaccaggatgctgacgctctacgtggggctctgggaatggcaagctgtgtcctttgctgagttagaactgcatgccagctacactgtgcgctccagtcttctctagaaaatgagaaaagccccccagtgcatgaagtgtccagattccttccagaacagtcaaacccttctctctgtcctagaggccatcccgggcctggtaagccttaacgccttggagccttggcaggtgcccttggtgaccatgtgttttcctggccccagaggcaacgaggcagccacattccgcagccagagcctctgagacttgccttggctttaggacctagagcaggaacactgctctggctcaggcaagagatgagggagggtagggaaggactggagggaagtggatgcattggagagagacgagagataaaacccacaggtgaagaccgacaggatgtgagataagagagtgggagatgtcaagaattgctcctctgtttctggcttgaataacagcagattcaggagccaagaaactatgatatgtggccaagcccacccttcctcctggttttttattcgtttgttttttgagacggtcttgctctgttgcccaagctggagtgcagtggtatgatcatagcccactgcaacctgaaacttctgggctcaagggatcctcccacctcccgagtagcggggactacaggtatgcaccaccatacctggctcattttttaaacttatttttttgtagagatggggtctcactatgttgcgcaggctggtctcaaaaccctgggcttaagtgatcctcccaccttggccccgcaaagtgctgggattacaggcatgagctaccatacccagcctcttttttaagataaagttgtatcggaacatggccacacccggtcatttagggtaaagagaaaagacagcaagttcagatttgtgatctctgagataccaagtggggttgtcaaacaggcagctggttaggtgggcctcagaccagcaggagagccatgggacaagatgccagtggctctggaacccgccaggtaggggatgtggcaaagagaaaagtgcccaggcaggagtcttgtgggattccaacatgtcaaggtcccgagggcaccatcctcccaaagagcagccccccactgataggctcatggggagcagggtcagcttctgctgtggggctcagtggagtcacagggcctccccagctgcttagggtgcctggggtggggacctcactataagaccatgctaggcacagcgctgccaccgggggctcccaagggtgctgctgaatctgagtgtgtcccgggcagcaccacctggcttaggactccaggacactggggctgatggcagcgtaggggggaagctcccttgtccctcttggtgaccgtggcctgcctttgtgtctgcagctgcgcctgaacggcggccgcaatccctacgagggccgagtggaggtgctggtggagagaaacgggtcccttgtgtgggggatggtgtgtggccaaaactggggcatcgtggaggccatggtggtctgccgccagctgggcctgggattcgccagcaacgccttccaggtgagaagccccggcctcagaccccgcattcaccccccatgcagtctgaccacactgtcttcagtcagcccccctctcccacgtaccctccctagccgtgcaggcaggacagagc

SEQ ID NO: 40169 - DNA, 2300 bp, Homo sapien
gtctcactctattcccccaggcagaagtgcagtggtgcaatcactgcaacctctgcctcccagattcaagcaattctgcagcctcagcctcctgagtagctgggactacaggtacctgccaccacgcccagctaatttttgtatttttagtagagacggggtttcgccatgttggccaggatggtctcaaactcctgatctcaaatgatctgcctgcctcggcctcccaaagtgctgggattataggcatgggccactgtgcccagcctgttgtcattctttagctttatttttctttgtcaatgagcagtacaagctgattgctaaactctcccaacgatatacaagattaaatttgtatttccaatgagaaacaatgaaaacagtcttaaattactccatctgctgaatcaaagtacaatctgcctagcaatagaaattataatggtaatgcaactactgcttcctgcacccaggaagatcagtgaggttgagcttgtctctgtaccatatcctaaggaagcccttagcctgtattgttaacatgtgcaaagtgttcctttgtatgtttttttttaaaggcagaatatagatgcaggtaattcagtttttttttttctaaaacagtaaccaactgataagtaatagattggctaccaaaaaggatactgtacctcagtttctcatgtccaaaatcagaagtagtatctgcttcactagattattgtgacagtttatttatttgttgttgtttttttttttttgagatggagtctcactctgttgcccaggctggagtgctttggcgcgatcttaactcactgcaacctccacctcccaggttcaaggaattctcctgcttcagcctcccgtgtagctgggattacaggtacctgccaccacatccggctaattttgtatttttagtagagacagtgtttcaccgtgttgccaggctgctctcgaactcctgacctcaggtaatctgcctccctcggcctcccaaagcgttgggattacagggatgagctatcacgccagaccataaatctgtatttggaggtagtatccaaatttatgccaagtcatatcattgtaaggaggccgtggcaggagaccccctcaccccatctgggttcccatgactctggccctttaagaagaggctagaactctggagaagttgaggtctcctgggaccagggtggtctcgaagtcctgacctctggtgatctggccacctctgcctcccaaagtgctgggattataggcatgcgtcagtgcctggcctgttgtgacagtttaaatgagttaatacttgtcacttaaaacagtgcccagagataggaagagctacataagagtttgtgaaataaataagtaaataaataaaactgtatttgttaaagaaaaaaaaagaagagtgacaggagggagggattccatggttggagtgatgggagactttacggaagagaagcctttaaattgggccctgaatgatggtgggatctgaaacaaaggaggtccaggaaggccctgctacctgctcatgtcgacccagcttttcagggcccgtgtgcttgtccctgcacggcaggacccagtaagatgccagaaggagccagcagagggtactcgctgggcaggctgaccccaagacagggcagaggcgaggtcccatccctgctggtccagcagccctggaagtacctcctttgtctcagagtgaatggggtgtgaagacagaggaagggcaaatcctacagacacagttatcatctctccttaacccaaatctgagacttgttacaattctagtgtgcttgtgaacacaatgacacggaatcttgctgaggactatcctggcaaattcagggtgcgtgctcaccacagcggcagcccagggcagagaactgctcaggagggctattaataattccaggaaccactgccctccagacacacttcctgcaaggcccctgcacttggaagcttacagcatgttccatgacgcccacacaggggcgggagaagatactcgggggaacaccagctgctcgaggattggtcagacctcaccgcctgccttggctcaggaaaacccctctgcttccagccgtcagtgagcgccaccctctccaggaacagatgtcctgcgttctaaatgaagagtgcagagcccacagcaaacaactgtccccagcagcccggatccctctgacatcagcccccaggaatgtgctgcagaccctctagcacgttcaggcctcccaggggataccctcccctcccctcct

SEQ ID NO: 40170 - DNA, 2300 bp, Homo sapien
tacaatttggttgaacaaatattctgaaggaaagactccaaacagtaggtgtttatgggtgataagacaccagagtgacaatttcttccttacattttacatattttctgaatatttcacaagaagtttgcttttctttataacagacaaaagattatttacaaagttggtctcctttcattttctaccttattagtgaatgctttagcaagagagggtaggactagaagtggaaggatgggagatggggaaaggggagagctcagtttcaccagcatttattgagcatctggtacgtccaggcactgtgtagggtgtgacagctgagtgaaagctcaataaccaggcattactgtgcagagaagccaagggaatgtcacgttcaaaggtcctggggtgtgaaatagaaggcttataggagcacagaaagtaaggcccagggggagaggtgagatgtggttggcagttgggcaggctggaaatgccccagaggccctgtcagcttaatcaagggattcagattacatttttctttttctgagacggagtctcgctctgtccccgaggctggagtgcagtggcgggatctcggctcactgcaagctccgcctcccgggttcaccccattctcctgcctcagcttcccgagtagctgggactacaggcgcccgccaccacgcccggctaattttttgtatttttagtagagacggggtttcaccatgttagccaggatggtctcgatctcctgaccttgtgatccgcctgcctcggcctcccaaagtgctgggattacaggcatgagccaccgcacccagccaggattcagattacattttgaggaccttggagccacggaggatttttttaaatttttaattgaaattttattgggtgtattacgttctatacaattttatcacctgtgtggttttctgtatctcaagacactgaatagttccaccaccacaaagatccctcctcctgcctttgataactacacccccttcctctgacccttgccctctactgcccaccagagtcagggactgatcagtggggagggtaaggaggaggcaacggagaagaccccatatctgcctgggagagctcacaggagtcaaggtggaccgtgagttgcagtgccaagtttggggcttgccaggttagctacggccatgggaatgtccaggtgaaagtctttcggggccaatggatttaaatatccatggcttaggagagaagcctgggctggaggtgagatttgggaggggtttgtctcctcagggagtggagtaagagaggactgaggaaggagccgcctttcaggtgacagtctacttctgcacaggggtcccttgttttgcagctcgctgcctccttgggactggcaaagccctgctcttgcttaaggagccctctctgtgcagagggctctcccagcatgcccatcccccacccggagcctcagagccaggcacaggaggtccttctgcacaatggccacgcattagctgtgtcctgttcagtccccaagcacagggcttgttaatcccagccctaccattccaggaaggaccccagaggtcacggaatccaaagcgttgaatttacaaagaagaaaactagtcctcggagaagaggcttggccaaggccatagacgtgatctgctggccgaaagggggctgtttatttactggttcaggatcggttttccccctacaggaaaagggaggtgaaacccaggcgagatgggtgcaagtttctgaacactttcattcggcagctttaattgagcgtgtattatgtgccaaggagggccagggttttcgggataggaggtggacaaggcacgggccctaaggctggtggataaggacatcgaagggttaaattctgggacggctgcagggaggaaagggtagaggaatctcccgaggaaaggcccccttcccggcatctcaggctccggaaacccgggcgcgaggagcctgggaagggctgccccgcaggccttggcctcccccgcggagctccctctggccctgggagtggccgctctcgaattacaacaaaagaggccggaggccgggcctgctgcggcggccgccttcggggaagggggtgggtccggggaggggtttgccatcctcctctagttaaaagtaagggggaaaagagtaaacgcgcgactccagcgcgcggctacctacgcttggtgcttgctttctccagccatcggagaccagagccgccccctctgctcgagaaaggggctcagcggcggcggaagcggagg

SEQ ID NO: 40171 - DNA, 2300 bp, Homo sapien
ggtgagccttgaatctaatatggctggtgtctttatgagaagaaagaaacttggagacagagacacagacacacagagataataccatgtgacaacaggggcagagaccaaagtgatgcatctacaagctgaggaaggccaaggatggccagtagccaccagaagctaggaagaggcaaagaaggatcctcctctagatctttagagagagcacagccctgctgacaccttcatttcaggcttctaccatctagaactggaagacaataaattatcttgctttaagccacccagtttagggcaatttgtcactgcagctctagaatgtaatatgccaagttacacgtttccatactttcctatatttttctttcctagctcttatcagacaattattacatataaattatcaggaaatatggatggtgtgataatacttactagtctggcttttcttctctctctctctgagatggagtctcactctgttgctcaggctggagtccattggcgtgatctcggctcactgcaacctccacctcccgggttcaagcaattctcctgtctcagcctcctgagtagctgggattacaggcacaaaaaagccactatgtccagctagtgtttgtatttttaatagagatggggtttcaccatgttggtcaggctggtcttgaactcctaatttcaggcaatccacctgccttggactcccaaagtgctgggattacaggcatgagccaccatgcccggcctagtctggcattttagtagagccctccttaaggaagactaacataaccccaaccagtgtctccaatggcaaagattttgaaaggcagataatttcgaaggagactgtccttaaaatcacagtatgtcagtggccagctttagcttctcaatgctagccttgggtcacagggttttctagtgtgaaaattatccaaacgagtaatttcttatagcaacagattgtcaaaaaaaagacactgatgcgcaagtcatgtgggagtctgaaacattggttctgctctcctctgcctccagggggtcttggccaagtcactcaacctctctgggttccaggctcttaactgtaaaagaaggtgattggggctacacagtagagtccctttggctctaaccttctgaggcttcatggtttcttccgttaacagtagctgaatccaggaagaggaggtgacccaggcgggtgctggaccaagaaggattctgtgttaagatgtagaactgccagttctgtctatgcttgttttacttgataaatggaatggagtagacgtttctagggctcttgtttttaaaaatcttttaaagtggctggattgctggtcacttcctatctctgggccacagtgcattcacctgtatacaaggtggaagaaaggatggaacccgggattcccaaggtctcttccggctctcaagtgcaaagttctgtgtcttcaaagcagtttattgctaagccagagagctaagagagcttagccttgtactaagtgtaggtcatggggtcaatctcaggaacacccttcgctttatttcttctcataaccattgcgtgtgttggggagggctggggcagtctgcctcccccaacataggcactaacatatgccatcgacgggcaagaatgaaatcctggctctacctctcacgaatcaggtggatctcaagagagactgaataagtgtgagcctccgtttccccatctgtgaaacagggagagttaccggcaaaggtgtaaatgtcaagagttgagcaacaatgcctagtccttaccaggttttcaagcgctattttccataaccgttaggagcgctaaggaaagataaactgcggtgtcctaagtacgctgaggctcgctgacgaccagacgagcaccacgccacagtactgggtgcctccgtgctcccacgtccacatttcccgtgcacagcacactggcgtggccgcgcgggtccacggaacagcccagcgctcggacgccaatcatcccgcatcaggctccgccccccagcgctcaacgcgcccctcggcgtgcgcgctcccgccgccagcgggcgcgctccgggcgcaggcggtgacgtgttgccggcgggggccgggcgggggtgcggctccaggaaaggagcgcggcctccaggaagccggctggccgtgatgctgcccactggtggtcccccgctcccggggtccccggccggccaagcaggtgaggttgccttccgagcgtgggtgaggggagggcgggcggccgaaggggccggcgagtg

SEQ ID NO: 40172 - DNA, 2300 bp, Homo sapien
aaaacatacataaaatataaaatttatatatataaaatgtacatatttatacataaaatgtatatatattttatatatacacatggatatgaatgctgagaggctaagtaaaaaaatacatttatatatacacatatatctatatatatttatatacacaaatcaacatattttatatatgtacatatgtgtatattctatatcctatctatatatcttatacatatgcacatatctatattctatacatatatacttctatatatagatgtgtgtatgtatgtgtaaatatggtatatatttcctaaaaagaatggttttttatttttaaattacagaaataataaaagtattatttaaagtctgaaaaataaagtcaaagcagttgcctataagcctccatcactagcacagtaaccatgcgattcttttcctgagcacatttacatctttgtgaatgcaatggttatagaatttcgttttgtttttttcacctaacattacattataatcatcgtccatgtcgtgtaatgtaaattccacttgtaaaggctgcataatatttcactaatattatgcacacatcataatttccttagccattcccttctggttgaccatttaggttgtttccaatgatttactgctctaaggaatgctttgaagaagagcttcctgtgtatttgggtttttgttacattcccagaagtggggcagtgggttcttacagacttaatgcttaaagggcatccacttaaaaataaggatcaacagcttctgatcagtatttcttaaaaacgacctttgacaaaagtagagttttctctagccattacagagatggctaagtaaaaacacagagcctgtttttacttatcacatccttagcactcagcttgccagctactatctgcagctaccaaaactaggcaaacagtgctcttggtcctgacgcctctattgacctctacccatgctcacattactgtatctcaaatccctaagagctgcttgggatgctgatcacggtgagggcagagagtaggctcagcctcttcagggtcttccccaccctttcatatctcaggatccagctttcctgacgagaagccttgtctagataaggcagggaggccctggtgcctacaagttgatcagcccaagtcatcttaagccctggaacacgcaatttagacggacacttccagaggcagacaggtccctcccctactttctgatttctccctttttccccagactggagcaaaacaatattaaaacagcctgggttacactttattgaagaggccagcttaggacgactttaagaactaggtgaccacagtcttaagacaggcaggggcaaggctgtaagattttactctcagccagttcacactcctaactgtgagatcaggcctctacagaccttatgggcctatcaaacccaaagaaaatttcctggaggtgcctactcagaggggctccctcctggtcactccttatagccttgctcggtccagggcagggtgggttcggtctctcggtgagaacaagaggaacacatttagctctgcattatgtatttaggttgagagaaacaatttcgaatgaatgggggtctctccaacaaagcagtctagaacgggcccctgaggtttgaattcaggccttaggaatgccaaagctcactgagcgattctgtttgcaaacccacccgccacggggacggattttccccgagacactgtcacccatgcctccagctctgggcataccccactgcggcccctccccaatgacctcccctgcccctcgcggaccagcccatcctcaagatagtacaactttccgggccaccccacgtctcctctcgcccccgtccggttgcttggaaatgtgcacgggacggtgacgtcacacagggaggcgggtccccactgtcccgcacaccaatggcgcggcggccgccggcctcttggttcccggcgattggtgtctctggccgctgcgctccaccccagcccgccatggcgtcaggcgccgcggccccggggaggtggctcccactttaagaagtgaagttttgcgcccctccccctccctgcccacctcctgcagcctcctgcgccccgccgagctggcggatggagctgcgcagcgggagcgtgggcagccaggcggtggcgcggaggatggatggggacagccgagatggcggcggcggcaaggacgccaccgggtcggaggactacgagaacctgccgactagcgcctccgtgtccacccacatgacagca

SEQ ID NO: 40173 - DNA, 2300 bp, Homo sapien
gccacgtggtctgtgatggctgtcactggtgaaagagagaccctggctgatatttagccaacagtgtttattccctggcatgaccagaaagggtgcatttgagacactgctgtgggtgggggacccggaggagtgtttgtgtgtcagacttatgctggtgttgaggccctagaaaggtcaccaaactggggcggggtgtgggccccgtgaatttaagtcctggtcctgccattaaccagcttggaaaccttgggctaatcatttctctgggctagttttctccttgtgaatctagactagtgtcatctactttacctttttgacagggctgttgggaagcttaggtgagatagatttgtgaatggctcttgcaaaccttaacatgcaaagctaatgacagattgtatcagaggcaatgtgcttgattattagagctgtttaggttaacagcacaacctctgcagccagactgcctggagtggcacctggtcaagttcctgaaacctctctttgccttatttttctcatctataaaatggggctaataactttacccatttcagtgttgctgtgagaattaattgagatgatacacctagaatgttaaggcacatggcaaatgccccattaatatcagctcctcttgttatttctaaaagtattacttcaatgcctgggtatgtttatatattgctggtgcaattgttaattttatattatttttgtattgttagcttttatttggtcatttgatcctcttagctctcctttgaaggtgagaaaaggcaggtgttgtttctcatttcatatttgagaaaactgaacttcagaaaaattacatgccctagaactcgggcctttttctgctccagagctgaaagcgagagaagagaggaagggaattaggctggagcaagccagtaggatgttggatgcagactcagatgttaatggcagcagagcccttgagctggattctagaatatgagaaagggctgagattgatgatggggcccagctgcattgttgggatggaggaaccagagttgagtcgagggagtaactccaggaaatcatggcacccagaaagtgtggcacagaatgcagggctctaacgtatagttaggagttctttgggcaagtactccagcaagcaaggaagaaggatgatgacatatggttattgccacaggatatttttggctgcgtctggcttctctctctgaaacaaattgcagttgctgtgacaccttctcatttcagcagtgagtcgaagttgcactcaatatagtgttttgaattcggactagtcgtgaagattcctttccagatcatagtatatgtatataagtcacttactgggaagagcactacatcatagttccgtggtccactaaggctgcagttttcttatctgaaataaggaggggtaacggtgcccatcctgcctcccctggcaggtccgcttacgcatgtagtgagaaaatacaggcaggcttgcagggaacaccgctttaaaagtataaagctctctgtgcaggtgctaggtcatggtatttattatcacactgggatcctgtgggaggggtaaggttagctcattggaatggaaaatccaggctctcattccagcactaggactcagtgcagctgcctggccttgggcacttaacctctctccttacagtgtctcccatctgttgagccaagacagggtggctgtctgctgccgcccatttggctggctaatgaggaagagccagtgctgctcacagcatgctcatttcgtggtaatgtagacaggggatagtagtggctgcgtgtagcagaaaccagcagggtaggaccggatgagcccaccttcagggaggtgtacccagggctgttagtttgaggacgtctgtgggattttatatccttactcttattttccaagaaagtctgtccctttgagcaccaggcagatgagtctggggacgctgtgaggaggggtcccccaggagcaggaaggtgactaatgatcccggaagaatgactgtgtgtgtttgcagacgcctgggctcttccccagtttggcctttcccgtcactgttttcctcacttgcttaagaggagaaggaggtaacgcacacaagtgcctttgtctcagggtccccacggtgcccatcttgagggttttgcgggcgccttgcattgcctaaggcctggctttagaagcagaacatggagagagaggtttgcagcctgcaggaagctggccagccagacctgccgggcagcgggacccgcgggcagtgcct

SEQ ID NO: 40174 - DNA, 2300 bp, Homo sapien
agtcagtaaacaggtagttaacttcgtgtaaccaagcaagggttttgtttatcttttttaaagtagaaaaaagtgaggctcaaactctctctttctccttgtcataactattggtttacagtctttatttgtttaaaagtaaagcacattgtatgtatttatttggcaatacatgaggccattaaaaccctgagcctaaggtaccacagttagtctcatttgcctcttgtcctgtgaactccacttagaatgtcattgaacttgggcagacataattctagtgtctgttccaaacgcactgtgtcacagaagctagaattaccattagaggcacaaacccctgagaatacacaagggggcacgcttccagtagatgtgttggggaaggaggagggcagaggggacaggggacaggattcagctttgtggtgggtcctgagggttcctaccaggggtagccaggatctgggaaacagatcagcgactctagtctgaagtggctgcctggttcgggggctgccttcagcaagattcaggcaggagagacggaaatagccaccttccaggcgtgagtcctggagataaaaatggattttaacctaggactgccgggagctggccctccgcggctgctcagactagggctgtgtgtgctggctctcgcctgtttccggtgtctaactggcttgtttctctttatggcttggcttcattccgacctggggtggggccacatccaacccactgcccactggctgtccgtctggcctgccccgcggttccaaccacagtggtgaagcagcgcttgcagatgtacaactcgcagcaccggtcagcaatcagctgcatccggacggtgtggaggaccgaggggttgggggccttctaccggagctacaccacgcagctgaccatgaacatccccttccagtccatccacttcatcacctatgagttcctgcaggagcaggtcaacccccaccggacctacaacccgcagtcccacatcatctcaggcgggctggccggggccctcgccgcggccgccacgacccccctggacgtctgtaagacccttctgaacactcaggagaacgtggccctctcgctggccaacatcagcggccggctgtcgggtatggccaatgccttccggacggtgtaccagctcaacggcctggccggctacttcaaaggcatccaggcgcgtgtcatctaccagatgccctccaccgccatttcttggtctgtctatgagttcttcaagtactttctcaccaagcgccagctggaaaatcgagctccatactaaaggaagggatcatagaatcttttcttaaagtcattctctgcctgcatccagccccttgccctctcctcacacgtagatcattttttttttgcagggtgctgcctatgggccctctgctccccaatgccttagagagaggaggggacggcacggccgctcaccggaaggctgtgtgcggggacatccgaggtggtggtggacaggaaggacttgggaaggggagcgagaaattgctttttctcttcctccctgggcagaatgtagcttttctgcttcactgtggcagcctcctccctggatccttagatcccagaggagggaagaaaatttgcagtgactgaaaacagtaaaaaaaaaaaaaaaaaaaaaaaaaaaaaaaaaaaaaaaaaaaaatttatgtatataaaagttgcattacacagtacaaaatagatggataatgtttatcctttatttttctatgtagaagtttttgaatttgtgtgtgtgcttgtgcgtgtctacacctagtattacggctgggactctccagctgtttttgttgttgttatgtttttaagagggttgaattcttccatcaggtgaacgaaaaaggcaacaaagtaataaatcagtgaatgtggccggcagctgtgtttagcccctccagatggaagtttcacttgaatgtaaaataataaagtttatattttgaatttctcttttcatgggggaaaaaaggtacgttaaaaaaatcaaaataatgatatgtcacttgcagctacctttttttttcttttaaattcaatcagccaccttcatgtgcctttttcctttgtctttccccaaaattccaggaccagagatctggccctggcctattttctcttgctgtgtacacacacgcacacatgctgggtggcaggatctcgcccgctggagggtggtggagcccagtagaattggggtgactgggcataaacctgctgagactgcttccttccctggt

SEQ ID NO: 40175 - DNA, 2300 bp, Homo sapien
caaagaggaaatatggatggcaaacaagcacatgacaaggtattcaacatctctaggcatttgtgaaatgcaaattaaaaatttaaaccacaataaggcccagcacagtggctcacacctgtagtctcagcactttgggtggtggaggcggaaggattgtttgagcccagggctttgagaccagcctgggcaacagggtgaaaccttatctttacaaaaactacaaaaattaactgggcagggtggcacacacctgtagtcccagctattcaggaggctgaggtgggagaatctcctgagcccaggaggttgaagttgcagtgagccatgatctctccactgcactccagcctgggcaacagagcaagaccctatctctaaataaataaataaatgacgtctgtagtctagttaactgtaatgtcccaacgtaaatttcctgttttctacattgtcctacagttgtatagatgtctttggaggacactggaggtattatttttgcaacttcctgtgaatctacaatgattcaaaagaaaacattaaagaatgttctaatataaagagactttgaaaagatgagagaagaaaaccagctttgccaaagtctttcccgttgcacaggtagttttctttggcggtcgctttatcagcaataacctattaactttccttcctccagagacacatgacataccatccttttgaaaagttgccagttgaatagaagccgtcttagaccaggacagacaaaaaagttgcattaaaaaaatggttctaaaaaacatcagcctaccctttttccagattaccaactgttaccatttaacccatcggctttatggcgtgggatctatcaatctgcatccttgtttcagaaccatttgatgtaagtttcataaatcttgtgcctttgctcctacttacttcagtgtttatttcctaaaaatattctcttgtacactgacagtacaatgtgcaatttcagtaaatttaacattaattcaatacttccatcatcgacctgacactgagactcatgcctgtagtcctggcactttgagaggccaaggcaggaggatcacttgaatccaggaaatcgaggctgcagtgagttatgatggcatcactgcactccagcctgggcggcagagggagaccctgtccgtaaaaaaaagaagagaaaagacaaggaaagaaaatacttccatcatctctgttccactttcgtctgttgtcacggtaccgtccagtccagtcacagtaccggttggaccaatctggctaacccattgtttagccaatgggttacatgttaacagttggtaatctgcaaaaagagtatgctgatgttcttttgaactacttttttaaatgcagtttttgcatttgtcctggcctaaaacgccttccatccgtctggaaacttttcaaaaggatggtatgtcatgtgtctggggaggaaggaaagttaacaggttattgcggataaaggaaccaccaaagaaaaccacttctgcaacgggaaaaggctttggcaaaggtgttttccttctttcagcctggggtctggctgcacctacttgtcatgcctctttgaggtcgtagatattgcagatctgagtttgcaccatctctcccagagagagagagcacccagaactctcacggtaccgcgcggctgcagtgactgcgtgctcatcccctgtaattggctctgacggtcctgaagagctaactggactgtttgtcttgatcgtcccatccccaggagcttctctctgttgcgggtgggttggggcagaggagccccgctttggggtgcgctcctggcctgggaaaacggctcagggcggagggaggagagctggagaaggagaggaaattggggaaggagagggaattggggaaggagagggaactggggaaggaatcccctagggaggagcggagcggggcagtgctcagggctcgcagatcggcggggtcacctggggctcagggcggccaatccgcggcgcggcccgtcccgcggccaatgggagggcggcgcggcccgctcccctgggctataagcgagccgggaggcggaaagtgaaagcggtgcgggccgggcgggtgcattcaggccaaggcggggccgccgggatgctcagggttccggagccgcggcccggggaggcgaaagcggagggggccgcgccgccgaccccgtccaagccgctcacgtccttcctcatccaggacatcctgcgggacggcgcgcagcggcaaggcggccgcacgagcagccagagaca

SEQ ID NO: 40176 - DNA, 2300 bp, Homo sapien
actgagaaattctattgccttgcctggcatctactacttctaactaaagcaatacaaataaccttgaagctttccacaatacaagctttgttttttaaaaatgaaatagcatagcttttcctaaattcttaaaaagcaacaacagcagtttacatctttccccactgatctttccctcaagagctttccccccatctccagccagtgctgcctgagcctgtgtcttactatatgaggtcctgacatcccgaacctttaggaagtatgactgtggctggtcatcttcccaactcacctgtaagtaccttcaggacaagaataatgaacttaccttcttctctatgtcttctcatttatcctcccacattgtcccctagcactcagcccagaaggttctaaagaaataccaatactgcctgttaatataaattaaaatgtattcttgttatataatgtaaatctgaaaattcccttcctttcttttagatatttcctgtatcctttattccttctattcctttttctagcaaactttcatacttaccaaacaaccctattttgtgagggataggctatcatcacccagaaccgtccgccgcccccccccccccgccccccaccaccctatcaccccacaacatacacagagctgacacttggtttagtttgtggttaacaggggtggcactctttcttcaacttttgtttgaaggttttaggatgcaaagtaaagccactggccccatttctctgcaagattatcctgcccaaatctgtatgaatcaccagtggccatttctcatctacttccccaaaattattaaaggttttattgtataataccttcaccaccttcctaccctaagaagtcctcttctggctcattaacctccttcacatgttggggacaaacctcagcattgcctacaactcacttataagaaaatataagtttctataccaggcatgatttgtgattgcagtgcaattttcctattaagtctagagcttatcattcttctctcctacacattctggtctttctctaccccttctttccattctgcccccttttttcctacccctctccccaagaaatgaactggtttccattcagcaggtttagtcttgctttggccagcttattgtttcaaagtggttataaagttgctgggcttgaacacagattattaattttcaggcattcatgatgtctccctgttgagtgtggtatgtgcaggtgtgcacatgtgtacctggggtaactaacactcctggactatgcaattttgctggtgactgaaaagatgaagtcaaagttgatttgattattgaagaatcacattattttagaggtatacagaatgtcagagtccaactttggcgttttacagatgggaaaacgaggtggggcaaggtaaaaagacttagccagagtcataggttgatcagtagggggactaaggcttcagctctgagctgtcatatctcagtcccccaaggcttttccactcacataaattccccctcaagggctcaaatgtgtgagtgagaacccaggatgtccacatacaaacaaaaatgcatcatagacatgtgaacatgtacacacagagaagatagggagttattgcatttgtagcctacaaaacagaaccgagaatgtgctgttaaaattagagtaaaactgctgtaagcaggttaagttctcatctaaagagatcacatttccccaccatacccctgctatccatttcccccaagtggctcattagaaaaaaagatggctagatttcaaaaagcaacttggagagatttctataggatttttctttagttcaatcaatacagagttatctcttacttccacgaaaatagctttttcacacatctctgcacacacagtcacacacacatataaaacattggcagcaggtacttttaatttgctggaaaatatttctaagaagtcaaaaagctccagctgaattgcatgccctcttattggctcaccagaccagttgagggacctgattggtccttgatcctgaggaccgataagaacggctataaaatccctgggtgcagctcttgggcccccagtttgcaaaagccagaggtgcaagaagcagcgactgcagcagcagcagcagcagcggcggtggcagcagcagcagcagcggcggcagcagcagcagcagcggaggcaccggtggcagcagcagcatcaccagcaacaacaacaaaaaaaaatcctcatcaaatcctcacctaagctttcagtgtatccagatccacat

SEQ ID NO: 40177 - DNA, 2300 bp, Homo sapien
tgcaatctcagctcgctgcagcctctgcctcctgggttcaagcaatcaagcagttctcctacctcagcctcctgagtaactgggattacaggtgaccaccaccacacccagctaattttttttttttagtagagatggggtttcaccatgttgggcaggctggtctcaaattctgatctcaggtagtctgtctgcctcagcctcccaaagtgctgggattacagacatgagccaccactcccggccatgattgtgttttttcaactgcaatctcagtgtctgacacataatagctgtaagtaaaattacgttgaattaatggagaaaaaatatgtaataattaaaagttgaagtatcctttctgttccctggaaaagacaaagcaatggaacttgggttgaaaaggcaagaaatctgtgaatcgcaatcctgatggttaaaatgctcagtaactagactcaaaaattcctttgtggttttagttgatgactgtataatcatttggagacatcaataatcactgtaatccctctagtatgagaatgtgtttcagaatctgtaaaatgatgcatgattttagtggactaggactaggttttgtggtaataactggtcctcagcgtaatttctattccttaggaatttcataattatttctattctcccagaatcttttcaatagaaatgatactgggagtacaagtcagctaagccaagggaaagcattagagtatatgactaagagcccagacaacacatagttcagattccacttctaccacttactggataggtgactttatctgcttaatcttcttaatctatacaatgaggggacaactgattcttaatcttttgaattttgcctttaaaaccccaaattttcacctgcaaaatgattgtaaatgcataatacatgagtatcataaagactaataaaataacaagtacagtagatttaggagagtacctgtattagtccattttcatactatcacgaagaaatatctgagactgggtaaattaaaaagaggtttcatggcctcacagtttcacatggctggggaggcctcactctcatggtagaaggtgaaggaggagcaaagacacatcttacatggaggcaggcaaagagagcctgagcaggggaactgccctttataaaatcattagatcttatgagacttattcactataatgagaacagcatgggaaaagcccgccccttgattcaattatctcccactgggtccctcccacaacacatggggattatgggagctacaattcaagatgagattcaggtagggacacaaccaaaccctatcagtacctaaaacttaataagcagctcagttgatattagttattttattggttataagtatgatttttagacatgcccagtttagccttactaccaccagtgacagatcctaaaattgtatcctttgggtcttgaatccttcttccacactcctcattgccagttatgacacaaatacccccaaggatctaaaaattattgtgcttatattgtcagacattcttatttcaggatagttcaaacttcctgagagtacacttgtgtgaggaatagaacataaaataatggaaaagagaatgctatatagtaattaggttgaattagaaattgctttacataaccacattatgtatgtgggggaaaaataacattcttaataacttttttcctacaactgtatatatataaaaatatatttaaacatatatttatatatcatatccgtaatgtaaataaatgtctagcatgtttttcaagactcattaatgcagttgcctctttccttgtagcttatctggctatagtaatatgttggaaatgtactactttggagtggggagtatggcaaaggagagcaaaacaatagttcagatcaagtaatcttagagccaggaggcagccaggacttccgcctgctgggccattgttgcaggaccacagcttcgaggttgcgcaacacctttagtaaacacttcctgaatcagagacaagaatgaaccagggagtttcattctgtctcactggagaggaggcagggacagacccagcagcacccacctgagcgagaagagcagacaccgtgctcctggaatcacccagcatgttgcaaggtctcctgccagtcagtctcctcctctctgttgcaggtacatatttagctctttttcaggttctattgaatgcattagcgaacttttcatagtctcctaatagttttattgtataaactattttgacttttttctttttcttt

SEQ ID NO: 40178 - DNA, 2300 bp, Homo sapien
tatataccacacacacatatatgatgtataccatacatacatgcatatataccatatatatgcaccacatatacaccatgtatttgatggaatactactcattcatgaaaaggaatgaattaatgtcatttgcaacaacctggatgggattggagactattattctaagtgaggtaactcaggaacagaaaactaaacactgtatgttctcacttataagtgggagctaagctatgaggatgtgaagacataagaatgatacaatggactttggggactcagggggaaaggatgggaagccagtgaggaataaaagactactaattgggttcagtgtatactgctcaggtgacgggtacaccaaaatctcacaaatcaccactaaagaacttactcatgtaaccaaataccacctgttccccaaaaacctatagaaataataaaaaagaatatgtttaatgaagaattaaaaaaaaaataactgatgctaaaaggacctgcgagcaaagaaggtggtacacatgaataatttcaaacatctgtagaaaacacacacaaaaataatgagtaacatgggggtcaaaatcatgataaactaaaatacttgacaacaacatgtaatgtgctaaagggtagggcactgataagagttcaccattccaggattcttttattatttgatgatagagacataattagcattatactttgttaaaatattaatggcgggtcataaaggatataagaaggatgcctatctctggaccagaaaaagaaatgcaaaattatagagaaaatgttactattttaaaggaaggtagaacagcaacaaagtgaagaatagacatagagaggggatttttaaagttccaattagatgttaggaaactcccagatgtatcagtgaaaagttaagttcagcagttagaaggtatgggtttttagattgggaaaactatacataatgatttaatttggccctaactttctgaaaagcactgagtcaatgtttatcaataatctcaagttgatttaccctttttagctaaataatagcacttctagacatttatcctgaagtcaccagaaattcaattaaagaaatatacacaaccaaacattacatggacactcaacacacacatatgtagaaaatatgatattctaaaatcactaaaattatgtcttaatattcaatgtcatgagaatgcttatgtcatagtgccatggaaaaaaaaataagtttcttaaaccctttgcccaataaggttagctttccttttctgcataagaagatgaaaataaattgtaaaaacgttaacagaagttatttcttgatgtcggatcattggcagtcaacttttttctcataataaacttgtgatattataatcatgaaaatctaccatatttgtcagagaaacattgttattgtataaggtagaactcagaaagtacacctcgaacatacttcatatgttgtatagttcggttaaggccagcactgtcaaggttatttaaatttcttgtacatttcttatacatgcacatttctttacaattttacatgcatgtgcatatgtgtgtgtgcaaatgcatatgaattttataagaatcttgaggcagttaaaattatcagcatcccctgttgactcattaggagactgaatgttagagagattttcagtatcttggtttgtaggactttacctggtgctttttagattctgtgttcactgtgacagtatctcaaaatatgtacagaatactgatatatgtcctaaatatgtggatttatttctataaggatactgaacaacaatcgtaatggtccagtttggtgagtatgtagatatgcacgcgaccacctcagtctcagttcacacattcccactgcttataggagcaccaggggcaaacagtgtccagatgtgagtcctcaatgagctataaccacagccataaatatctctcaaagatgaggaacattctcatgatgttgacactgcaattttttgacaatttcccaacactcttaagaaacattccccaatctcacacgaaaagtgggggttttaattttcttgttcaacttctaaagagaaattggagaagataaaactggacactggggagaccacaacttcatgctgcgtgggatctcccagctacctgcagtggccaccatgtcttgggtcctgctgcctgtactttggctcattgttcaaactcaaggtacgtaccatcacaccagcattttacataaaagtcaaattatttgatgaatgtttaaagtgcct

SEQ ID NO: 40179 - DNA, 2300 bp, Homo sapien
gagtcttttgtctaacaccagtgaaaaactattgaagcatttttttttaacaggcacatgacatggccaggtttacctattaaaaatattacacttgtggtcatgcacagtgactcacacctgtaatcccagcattttgggaggctgaggcaggtggatcacttgaggttaggagtttgagaccagcctggccaacatggtgaaaccctatctttactaaaaatacaaaaattagctcagcatggtggcacacacttgtagtctcagctactcagaaagctgagacaggagaattgcttaaacccaggaggcagaggttgcagtgagccaagattgcaccactgcactccaccctaggtgacagagcgacactgcatctcagaaataaaaaataaataaataatcacacttgttgcaatgtaaccaaagaatgtcttggactataatggaggcaaaaaaaaaaaacttagtggtggactgattataagggatgtcattgatgatactgactttcagaattgcaatgctaaagggatgaggcactgctggccaagacagaggacaaactggggggaaatgtattttaagtcttgtacatattgattttacaaggactttgatccttcccaatgaagacattaagtagaaactttgctgtaaagatctgttgcccaaatggctagaaatataaaatgtgaggcatagcatagcaataattaaaccataactgaagatgagatggctttggaacaagcataatcggaggaaaagagggtgtttaataaatacctcaaggaactcaaaaatttaaatgctacatagaaaaggatatacctacaagttgccactgaaccaggaagaagttaagaaggctattgtggcaagggagctaaatagtatatttcaaggggaaggatgtggtcaacagtgctaaaaattgttaaaagggcaaatgagatgaggaaacaaaatatctcttggatatagaaatggtaaaatcactggagatattggccatttcagtagaataataaaggcagatgctagaactgggatgtggtaggataagtttgaggtaagaaaattgcaagaagtccaggtaatactgtgttagaaatttagctgtaaaggaaatgggagaaaaagtgatagtaagagtatatgagatatagaatagagagaatttttcaaaaaggagagacttttgacttgacttaaaatggtacccccgttttaagccaagggactccgatttctctgcctcctttccaagtttgcttatgttttcccaatttgtaaatatcagtgtcaatttccccacctgcaaagtggggattatattttataatgctgctatacatggctgctaactgggagcaagtgaactgtatgaggacaattctgtttttcaaccacaatggatgaatattaatgtcagatggatttttcctcttatgtttccttgtagaaaaagtcgtccttggagcagagggtctaaatatcaaaaggaagcttccaattgacatagattcgttcagtttgtggaaatattagagacatatagatgcgggtgagaaatagaatcccaaatgaagataaaaggattctattggccatgggataactctactaacataacaagagaacacagacatacagatggaattgtcgaggccctttgcacatctgtccattggtattcttttttgtattgctttgaaagggctctatattatatggacacttactcccaccttttatttatttattacatacatttctgtagtttggatattttaattttaatatgtgatttatgccatataaattttcaatatttctcatttaacaaatgttccttttagtttttatatggcatactctgcatagaaagaatttaaccatcttcaaccaaagcatatataaatatttttcaacatttttttcctaagacattcttgatttttttccacttttgaagttttcagatatctggaatcaaatttatattagacatgacgtaggaatctatgtccagccaaccttcaccaccaccacctcggtagttgtctttaattagaacatgatgttcaacctccaggttttagcctcaagcacctagcaagttgtgtaactccctcaaggaacacttccttgttgtggatcaaaactgcccacctatctgtgaggtgcttcatccctgcagtggaagtgaggaggaagaaaggtgaactccttttctcaagcacttctgctctcctctaccagaatcactcagaatgcttcccgggtgtatattc

SEQ ID NO: 40180 - DNA, 2300 bp, Homo sapien
ctccggtaatgtgaatattgctttgctttgacatgaatagatttttaaaaagtgataatttcaaatatctcaaatttatatatatagtatatatttgtgtatgtatacacatacatataattcaacactcattcataataaaactcttaggatataaaaagtggaagaaaataaagtatatttaccaaactcctattcagtataaacattaaacttattaataaaatgttggcagttttcctccaaaattgggaataaggtacatttgttcattgtcaccagatttctttcaacatttttactgaaattcccagccaatgtaataaaaaaggtaagacccatcttaattgaaaagatgtaacagtttttacacattaaagatagaagaaactataattaacctatgaacaaaattttaaatcaaaattagtaagttctaagcactaaacagataggcttacactggcatgttgctgagaaattttataaagaatgctgagacactttgctcttaataataatatatgtgttattaaagaccaagaataggttattaaaatttttactcatatactaggtgaagggttgcttggtgtgattttagttgcattaaactgggctttagtgtatagctcttgctcatgctgctttaatagtatcttaaaatatttaaggttttctttatttagagaagttcctaaggtaaatcatccattttcattagacaaatagttaatgagcattcaatatgctaggttctgagtattaatgatatatatgatagccaaataaaaaaagcagcagaggtcaggtgcagtggctcacacctgtaaacccagcactttgagaagccgaggtgggaggactgcttgagaccaggagtttgagaccagcctgggcaacacagcaagacctcatcatgacaaaaagaaaagaaaaaaaatagctgggtgtggtggtgtacacctgcaatcccaactacatgggaggctgagacaagaggatcacttgagcccaggaggtcgaggctgcaatgagccatgttcacgccactgcactccagcctgggtgacagagcaagaccttgtctcaaggaacaacaacaacaaaaagagcaagaaagcaagagaaggatagaaaatttgagcattgcagtcagataaaataaggaaaccaaaggcagtctttggaaacctgttgagaagtttatatatctccacaataatgaggaattctcagcaggaaagtgaagtgaggatatggatgaaacactgacagctagcaagttgaaaaagaagagcagaacacaaatgtctgaatcctgggaaacacccatcattaaataaagatttggcaataaaagtgcaaagctcatacctaaccattcctcctccctcccctctgattgaaactcactgattgataaagcatctaatctttgtgatccctaaaatagcttcagaatattctccacagtgaattttaggcagtgaattttgggtaatttttatcaatcaatcaatggaaatcctgttgtgaaacacatttgtcatccagcatttaagggataatgggaatgcacaataaaatagtaggagtgtccggggtaatagaaaccaagaagaaatttcttgaaacagaaaatagtcaacattaaatgtggagaagatgaccagaaaggaaaatatgttcacaatgtatttgataattaagagaatatttgtgggttattaagaatagtttcaatggaatagtggcagttataatcagagtgtagtaggttgaatacgtggaagatgaagattgaagagattctaatgctatatcttagcagtattttgatctttaaggtaacaggacagcaatggcatggtaacaagcagatacttgcgggattcaggaaaggcaggttaatttcttatttttattatgaaagaagtttgaccatttgcatttatccctacaggacaccttatgttattattaagtacatttgatcaggtctaaattgataattgatacaagatcccgatagtacaaaaagggaatgcagttataaggagacaacaaaagtcagagtagactggacatgaaaagtctggtttgccctcgtagctatttcctggagggaaggggtagctacagtttcctgtccctcttcagcacttctccagctccagtgggtttttaaattacatattccttattttgtgaacaccaaggacacagaaggactaataaagttgctgttcttcgccatatagattgctttgtagctttaataggtttgtttcatcaat

SEQ ID NO: 40181 - DNA, 2300 bp, Homo sapien
cctaaggtctctcagcaaactagaacatccttctcctacatggcctgcgatactgcagtttcatattaataaaccaaaagtaactcccaaaattagcacctcctgtttaaaacattatttctattttaatacagatgggccaagggagctgataaaaataaaaaataaaacctctagaaacccacccctttcctgattacttactgatgaatatgatcctgtcttttaataaaacagggacttaaggaaacatgctgtgaaaagaagctatttcggtctggagtccctactttttataagcagtagtttcttctcacccatagcaagcgttgcacattcagtcacttgtacctgtggccccagcgctgttgttagttctgcaatctcttcttcactttatcttgtagtattctgaacttttttaacctgaattacccccaaagcactacccaaaataaagggacattttaacaggagtacaccagacagcaagaagtctgtgtagagttcttgtttgcataaacatgtttaatgatatagaaaatctattccaaatcaatcattaaaatctaaagcgaaaaatatattacattttaaatgaagggaaaacatctgattttattcaaggttgtggtgactctgttccgcaacttttaaatcaatttaaagttaattcagatgccttttcaatcattgcagttacacatagggaatactgaaccgaaagatgacaaggcaattgtctgtgtccaaacttaagaaaaactatatttccctggacttttcatcccaacagatttcaaattctcctttccaaggagtatttgaccttcacatttcaggccctgtatctcttcatttcctataccaccatatgttagaaaactcaaactgggctacaagtatatatttctgttaactgactttaatgaattttggttgttttcaaaatctgcgatctgtccattgtgccaaccctgcattgcagggaagtcttagcctgtgattccagcttcgctcctgcaaagatagtcactacaggcaggtttaaattgtatttactcggagagaagagggggaagggaaccccctgccccctgccaacctgacaggccaggctgggtgacaagccccccgggtggctgcacctcccactcgccgacctgggcgctgtccttggtgctgccggcgccatagcgagcacaagcgccttaccttctgcccctgcggaagctgcggacgtcccccaaacgttaaaaacgccatatcccactttttatacaaataactaccccggcctgttctctttgtccccttcccgaagccttcaggcagaccgttccgcaaagtctttttttttgttttgttttgtcttctagacccagctcctcggcgctcatctccagctgctttaagacaaggggtgggggaaggggagggaggcaagaaaagatgagggtgggggaggggaaaagagggaatgcaaggggaaggagggaggagacggggagaaggaaagattggaagaaaaggatctccgaggaaggggctgagagaagggcagggtgaactggactaaaggccagagtaggaaggagaagaggggccaaaaaagaaggggatgaaattaagcacagaagatgggtaaagaaaaaagtatcagggaaagggcaaaataagagaaagccttgaggataagagggtagaaggctaaagaacaaggggaccactgggtcggggaagcgctgcctgaacggcgggacagtgacaaagaaagggcgctggcgatattcgcaccaagggtgcgaaacgcaatcgggaggtgagaaatggaaagaaggcgaatgcccggctacaagtagcctgggactgaaaggggacctgggggaggggctgggcccagggcagaaaagtccaggttcccatgcggcctgggcccacgtggagcgggcgctgaatcaccgttcagccgcccccctcccctcctccccgaccggtgcccgcagtccccgcctcctcggccgccgcctccacggggcggggccctggcccgggaccagcgccgcggctataaatgggctgcggcgaggccggcagaacgctgtgacagccacacgccccaaggcctccaagatgagctacacgttggactcgctgggcaacccgtccgcctaccggcgggtaaccgagacccgctcgagcttcagccgcgtcagcggctccccgtccagtggcttccgctcgcagtcgtggtcccgcggctcgcccagcaccgtgtcctcctcctataagcgcagcat

SEQ ID NO: 40182 - DNA, 2300 bp, Homo sapien
agactcacacacactgagtgtggaacaatgaggtttgcagggagcaggttaacaaaataatccattctgccatgcttcatctacatatgggtaattgggaggagacaactctatggcttatctgggtccttgttccaccctccgcctccagagaagcctattccacccttgaatttcatgagtgaaaagaccaaggatagctaggctatgaaaagtcaacagagtaagtaccctaccaaacctgccagggacaaacaatattcaggacagcctcatgaccttaggcttgaaatctagaatatttgggcatggatggtcctctgagatcacttagtcttgatagatttaaactactaatttcaatatttgtgaatttgcattatttgcgacaacagacattgtttagaaacccgaggaaagttatctgctgcagtctatcatgaggacggtgggctatcacaatcacaggtattttttttggggggggggatgagaaagggcctctgaggataagcctcaccccatcctttcctcgggagaggagtgaaatgtctccagaagcaactgcaccactgcaaatacttcaccctccaagtatcacaggggaagccattccggcttctctatttgaaaacagttaccatattccccctcagtttgcctcttaaaaaaaacataagttgcacatcaaatgctgcgatatacaaataaaacaaaaactaaatgcttgctcagataaatcttaggtgtttcgtgtaaatctctgcaatccctccatgaaacctgggggactcctaacatcatgcgtgtgaaaatgccctgcaaaccgtagggttgtatccacgtgcgctaccgcgtgcgccagtttcaagcatctgggtgcttcctgaaggaaatccatgcattcctgactgcatctgttttcgggttattacattgtatcgggggaagagtcacgcggctatggctattttctatccgttcctgaagaagcctgggtgccgagttctcctccccagagaccacacccagcgctcagggctggccgcagcggcttccctgaaaatcagccaactgcaaggcttatcgaaatcatcaggtcgtgtgctacacatgtgtaaaaagaggaaagcggactttaaatgtgctgcggttggtggtagcaagcaggaatttagcttggtgaggatccaggcagcttgaagctcccggctgcggagcgcgcggctgcctcagcaagtcagtctctgtgtttccaactctttctctgccctccaccacccacacactgcaacacgttaaagccatctgcggcttcattctcagttaagaaatgtgaaaatctagaaacactaacaggcggattaactgctgtaaaggtttaaaaatgctaaaccaatacctgcagtagtgccgcagtttcacgagtgtgtgtgtgtgtgtgtgtgtgtgtgcgcgcgcgcgcgcgcactcgcgcgcacattccctatgtgttaagcagctcattaaagaaaaagaaaaataatcaggagaaaggaagatgaattgcagaaagtgccagaaagctagaaagaaattaaaactcttctccatacatactgcatacacataacctagcctatttatttgtatctaaaattccctagccgcaccatcaccgtaaacaccaagggaaaaaattaaggaggttcctggtgggaaaagggcgagttggggggacagggtgtctgcgaggtgacgggatacagaaaactagggtgtcaaaagggagcaagaacctgttttgggggcaacttaaggatccaagtgtcacggggtctgggcaatgcaggacgggaggggctgcgtgagtgagtacagaagggaaatgagtgagggggcatgggatctcagagaaaatcagggccctctgagcaaagtggaaaggacgaccgccgcagctcctcgggccgtagctcgaccccgccttcccttttgcgcagaatcctcgccttggctgcagcagcgcgctgcccccactggccggcgtgccgtgatcgatcgcaggctgcgtcaggagcctcccggcgtataaataggggtggcagaacggcgccgagccgcacacagccatccatcctcccccttccctctctcccctgtcctctctctccgggctcccaccgccgccgcgggccggggagccaccggccgccaccatgagttccttcagctacgagccgtactactcgacctcctacaagcggcgctacgtggagacgccccgggtgcacatctccagcgtgcgcagcggctacagc

SEQ ID NO: 40183 - DNA, 2300 bp, Homo sapien
aacctcagcttagcagagctgcattcccagaccactccataaaaacagcagcaccctacacgccctatcctccctgctttggatttttctctaatgtttactctcgtttggtgtacatttctttactgtcttactctccccgtctagactagaagctctgtgaagggacacattctactgtattcaccgctgcaccctcattcttagagtgatgcctggcacttaacgtgtaggcatttaatatgtgtgtgaagaaggaagaagaaattacctaacctgggaaattagaatcatgatatactaatggaggaagataaattattttagggaagatggtggaattctttctggatgtcaagtctaaagtgacagaggaatttcttaaattattgttaaacattgtgaataaatacctattggttgatggagaaaaaaaaagccagctctagtagttacccaccgtgaataggacttaaaaaaaatttcagacctcgtttggtaaaaaaccaccaaagttaaaatgcactaattctccaatgaaactttactatcttgttaccttgtttgcctatctatctttactgtcttttttttttttttttttttttagacggagttttgccctgttgcccaggctggagtgcagtggcgcgatctcggctcacttatagcctctgcctcccgggttccagcgattctcctgcctcagcctcctgggtagctgggattacatgagcacaccagcacgtctggctaacttttgtattttagtagagaaggggtttcaccatgttggccaggctggtctggaactcgtgacctcaggtgatccacccgcctcggcctcccaaagtgctgagattacaggcatgagccaccacgcctggccaactacctgtctttactatctttactacatgtttgtcttcctttcttttatattcctaaaacgcatgaaaaccttcacaggctgcaaggaggatataatttctctctagaggaatcttcttcgaaggtgaacgtaattaagctggtcatttactctacttgcaatgttacttctcggtacaaggtagggagaaacccctggatcttcattctccaagtctctccaggaagaaatgaattccaagaggggagctccagagagggcgccacctggagcccaaggcggttcaaatgcgcagcccctttgggatcttcgtcaagaaaaggcagtcgttgacggagaaaagacggggatgcgccttggccctttctccacgggaatgctctctgggctgctggctggttgggaaagggaggtctgggcatgagggtctaagtttcttcagcttaaggttggggggtccccggagtttggggatacaggacttccaaattagggctttctaaacaatttccctgcagaggatcccctagcaaacggtctgatacttctgaggagcccacctcccttgcaccagctctccggtgataaaagttctgctttccaggctctaagcggtggccccgggagattcagtctgccctgagtccggcttctcccgctcgcggcgcgggttcaagctccagggggtgaaggcagaagtcaactgctcattcattcaacaaatatttattgcgcgcccgcttagtgccaggcaccggaggtgccccgagcaagaagccgctctcgctgatccgtttccgctccccaagtgtccggcgcgcgccgtgggagcgcagcccgcatccctcgcccaccggccgcccggcctgggcgtgcccggctcctccagcgcagccctctgtcgggagccggacccccgggacccagcctccggggtatcagccgggtggggagggcgggagaaaggcaaagtgccgccagcgtcaaagtcccgccggcccaggaagccgctccagggaagcgcgcgaggcggagccgcagtcggcccccgcccggcagagcgcagagagcggcgcgggcgggagaggccgggcgcccgcggctcggaggcggccccggcgggcggagggtgcggccggcgggagggactggggcggcgccaggaggggcgcgcactgctgcgctgcagcccggcccagcaggtgaccgcgggcggcgcgggcacgggcacgggcgcgggcggcgcggcgaggaggcggcccgcggagtccagcgaagtttggcggaacatggcggaagcgtctggggcacgcaggagcgcggggcggcggcggccggagcccgaggagctgtagcagccttagtcgccgccgccgcggggcgaggtcgccgccatggcccgctggat

SEQ ID NO: 40184 - DNA, 2300 bp, Homo sapien
cagttcctaaaagagcaaaatcatgtgttccttaatctttaattagaacaatctgcaagtggttcattaattagagaattttgtctttaaaacaggaacctcaggaagtaacaagcaagtaggaaaagatgacccttttaaaagaaattattcttctttagtctatacttattgcatgaccttaaaaaccaggggacagggaaacagcaatgtgttggatcccacaggagagctggttacatgcatcccttctcaaccccacgttcagtgatatcacattagtagctggaaattgaccatggtggaagtctttacaccagggtaactggcaaacatgataaagcaagcgtttttttgttttgttttgttttgagatggagtctcactctttcgcccaggctggaatgcagcagcatgaacttggctcactgcaacctccacctcccaggttcaagcaattctcctgcctcagcctcccaagtagctgggattacaggtgtgcaccaccatgcccagctaattttttttgtaatcttagtaaagccagggtttcaccatgttggccagcttgtctcaagctcctgacctcaggtgatccacccaccttggcctcccagagtgctgggattataggcatgagccactgcacctggccaagctgttttctttagggggtaggctggcagaagccagattactagtattctgctgggagaggagtggggcatggaggggaaaaactcttacactgataaaatacttttcattttgtaagtagagtctagcaaatagccaccaagtgtttctgtcccaaagctgatataaacaggaggtccagcacctgggccttcccaataaactcaagacttgctagagtgaggcagccacggagacttcttctggggctaactacctggtcaggggctcccagagtgtaacctcattttatgtatgtatattgcctggagatctgaagaccagcaggactcctcaacgttaaacaagttgagtggattgttggtgggagagccttcctggctttgcccctggctagttatgtaactggacaaatgagtggccttctctaagtctcagcctccagttctgtggaaggaaggacttgagctagatcgtatcagtagcctccttgggctctgatattttctgaccctatgaatttgcactttgaaattgcaaatgttcctaagacacaattggaggtagaggtaatgcctgcaaaaggttagtgaatgctcataagtagaaaacatttattactaaagcaaattattactaaacattttaatatgctttgatcactttttaaggatacagaaaaggtaattgagatagtaaagataaggtgtttgagcagaagagcaagcatgcactggatagttctacttagagtgtgatcacggttaacagtcatttctgtagcattcagagtacctgaactcattataaaatgtgttacaatagcaaagatctcagaagacataataggtcataccttactttctgaaatccacacgcctgcacagacatgagcagaatgtcattgacatgtactagggaagctcagtatttataggaactttatttataggaacttctttcagtaaattttctccattaggtgaaaaaatttttgaaaaaaaaaatgtataacttgcttggttttatttgtttcatatgaccctcaatttcgtgcattaggttggcgttttgaaaagctagagaaattgttaaataatttaaacattttgctaagttcccaccttcacctgtgagaagggtcattttttttttttttaattcattcatctgcgcattgaacaagggtaaagttccgtgcctaaaaccaggtgttcctgggtggcctggaggggctgcatccctgcagggctgattgcagagcttagagctactggtactggtcgaggaagagttgcaggaaggagacaggcagttcaggaggtggcactgctgtgtgtgagctgtctgtgttttccttctcagagtgcagagaagtgctgctgccactgctgacagaccagctcagcggccagttagatgacaactccaacaagcctgaccacgaggcaagctcgcagcttctgagcaacatcctggaggtgctggacaggaaggatgtggtgagttgagtcatcactgatgctgcacagagttcacactgtcccctttgcaccagacaggagtgactccgtggccttcctattctcaggtagtttccagctccggtattagggcaggctgtgcccattttagagataatt

SEQ ID NO: 40185 - DNA, 2300 bp, Homo sapien
tttaaccaaattcttcttacgaacatttagattgtttccattttctattatattaaataacactgtgatggacttccttcctttaaatatttaaaaatattcgtgcttggctgggcacggtggctcacgcctatagtctcagcactttgggaggccaaggcgggcagatcacctgaggtcaggagtttaagaccagcctggccaacatggcgaaactccatctctactaaaaatgcaaaaactagctaggcctggtagtgggtgcctgtaatcccagatactcgtcaggataaggcaggacgcttgaacctgggaggcggaggttgcagtgagccgagattgtaccactgtactccagcctgggcaacagagtgagactctggatcaaacaacaacaacaaaattcatggttatttcatcaggataaagtcctaaaagtgtttactaattcaaaagtttggcaaacttttaggacttttgaaacatagtgccaaagtacatactataaatagatacacttcttggcagcagttttcctttatcccaggagtaaagaaaaatataatagcttaaatttttttaaaaagcttaacattaagtctcaaaacttttaggattgaataatcaaaacctaagaagaatgtagattgtattttgttctttcattaatctcttgttaatgactttttaccatgtgacattgttttattatggcccttattaatgttatttttcatttccctttacccacacaattaattttgaacagctctggaacaattacttccatttggcagttgcatttctcacccatgagtcccttcagcttgaaaccttctcacaagccaagcgcaacaaaattgttaaaaagtaagtgtccttttaaagttaagatcgggaaggggcttcttccatttgtttacattgagagcaatattttaggtatcacagaaattactatttagtggctacccatgttgttagtgaggtaagtcttcaactaattacttaataggcctcacattcacccaggttcagctctcttttcttaaggcccaaccatcttcccatcagtcatcccatgctttttatcaaatctgtacctggagacggaccttggctgtcagcttgcccatccccaagaacagctgcgcctctgctggcagcttccccaaattgcaggcatagtacctcctcattcatagcgcttcacaaagcacactccttcagcacagttgctccacctccctgccatttcagcagagaaagccaggtctcagacattgcattaaaatgccctccagattcctggtttggaattcaaaatggaattatgtgcagaagtgataagagatttagggaagcatttcatttcattgagagactggaatccaaagaccatgtcgttaaaaaataacttgaggaatgtattatttgaagactttgaaattttagttgtgttccccttgttgggatatctgcgatatgtaggaaaattatttagtgtccctctacttctggttcctccctcaaaaactgcctacatatacaaaaacagcaaagtattttttgctcccaaggaccaatatttatccctttgtggacagtatcactcccattgagagtgcatggtgtagagccttccaatgtgaatattttgaaaaacacgctagaatggatgtatattaccccaatatcagtctataaagtatataagtatttagtcacctgttaggcattagtcacagtactgtatgatcatacttcattcaccttccttttcatcagtgtttgccgtgttttgtttggctttgtctgtgcctcactcttctccctgaagtgagtttgttaatctcatcttctcagctatttttcagcgtttccatttggctttattgcggcacaaggtcccccggcctctgtgcgcctcattccttttgggggctcgtttaggtatgaacctcatctcttaaggttgggccttaagagtgaccaagagagacacagactgtttttactttccttcttattgtgtttatgcaattcatttctactgaaaatcctccttctagtttatgatcttcttcctagatatggggacatgagaaaggaaatcggctttagaatccgggacatgtggtataacctgggtgagtgtctagccttgaacaggcctgatcacaacctctgagtgataagcatcccacgataaagtcttttttttattttaatccagataaccctgagatgtatttgtctgtgtgtctggaagtgaaagttgatttgtgggtttcattgac

SEQ ID NO: 40186 - DNA, 2300 bp, Homo sapien
tgttgcccaggctggagtgcagtggtgcaatgatagctcactaaagccttgaactcctgggctcaagcagtcctcccgcctcagactcccaagtactaggactacaggcatatgtcgccattcccagctgtttcttatttttacttgtgtagaaatggggtcttgccgtgttgccaaggctggtctcgaaattttgctttaagtgatcctcccacttcagcctccctagtagctaggactgtaggcgtgcaccaccatgcccagctggttttcatttttatttttgtagagacagggtcttgctatgttgcccaggctggtctgaaactcttggcctcaggcaatcctccagcctcggcttcctaatgggctgggatttacaggcatgagccaccacgtctggcctagtattattattattattatttacaggcctacccttcattcaggttgtaactactctagaccattgctttctcatgttccctgaacttttctagtgttgaccaactgcatctccagctgggtgcttgcctcagtcacttagttgttcacctgttcgcctgttgtgtgtgagttttgtggatgagagtctgtgtttgaggacagtgctcccaactgtattcttttttgaagattctctaaggaaccagcactctgaataccgagaaatggaattgaattgtattttcagtagagatggggtttcacgatgttggccagggtggtctccatctcttgacctcgtgatccacctgcctcggcctcccaaagtgagccaagtgagccaccgtgatggatgcctgtagtcccagctacttgggaggctgaagcaggagaatcacttgaacctgggaggcggagattgcagtgaactgagattgcaccactgcactccagcctggctacagagcaagactccgtctcaaaaaaataaaaataaaaaaaataattgaattgatgaatagtctgtattttaaaggactagaagcctttcttgttttgtttttaatagtgacaagaccttttattggtcttttttatcctgtttccattaagtctctccatttgagcttcaaacctcccagtttatatcttttgcaattctgatcttatatggaattaaatgaagttatgcacatatacacacaatatttatacatgatatgctacttttttaaatcctacagctgatttgttttacataaggatcttactttgttttcttcattcttcctagatcactaacttagaaaaaatacggatacataggtctccagtgcccaagaataaccctaaatctggattaatgtgttggacccatttctttctctttccctctccctcttttcccaggttttcttttaattatctaataagccccagaacttggctctgtgtgggtccaaagggacaggatttagactgaaagtttagcctcagtttgcttctttataactctgcatttttttctgaagctaacacttttatctaaagagccgcattgcaggagatgtactaggttcccaggttcctctaggctgggcatccatacgaggcattccagaatgttcagaggatgccctgagtgccaggccttagggagaataaagacataggaaaaatggtctcatacaactaattagagtcctcacagagcacacacgaaccttttgagcaagggtttgttgactgaataaaacacaaacaaaaacagacattgaaagaaggacattgtgtgctcagattctaagtgatgttgggacttgagctgagtcctaaagaaaactggaactcgagtccacaaagaagcgcagcataagtgaaggtcacaggataggaaggtgttgcatgaggtgtgtgtgtgtcggcttaactgtgtcacttaatatctaacattgacgttctgtgtcatcaaatcctgccccagccactgctgagaccctggtcagtgctggtcagtgctgctggaatgatagcatggaacctgggcttttgtctctccctccgcccctccaggctcctagaacattgccggaaacacaaatacctctccagctctggggaggtcttcgccctcctggtcagcagcctcttagagaacctgctggactatagaaccatcatcatgcaagatgagagcaaggagaaccgtatgagctgcactgtgaacgtgctggtatgtgacatgcctccggtgtgatgggagggtactgtcaggccgcccctgcaccctacagctcagctctaggtagatcccacaaacacagaggcgccctgaggcacctttgtggagccgg

SEQ ID NO: 40187 - DNA, 2300 bp, Homo sapien
tctctgcctgaaacacactcttgcaatttctgcacctaactaactcccatcaaggttcagtttaggcaccagcttctcaatgaatccatctctggaacacccaagttgggtgacctgccctttgtctgtcccctgtggcatcctgggcgtgtttctaacctaccatgtttacatgtcctgagaccccgctaacaccatcagctcctccaagccatgaaatacatacatcttaatcacttttgtatctgtggtgcatagcatggcacttagcctaaagtaggtgttcaagaaatgtttcttgaccaaagctgaactgaagtttgatgtgttataagtcatggctaggtacagtggctcatgcctgtaatccctgaactttgagaagccaaggtgggaggatcacttgagctcaggagttcaagaccaccctgggcaacatagcaagacccccacctctacaaaaagaatagcagtatgtggtggcatgtgcctgtcatcctagctacttgggaggctgaggcaagaagatggcttgagcccaggagttggaggttacagtgagctgtgaataattgcactactgcagtccagcctggtcaactgagtgacaccctgtctctaaaagaaaaaaaaattagacattattcctcagttatggatatgaattttggatggagacttttggaatcaagtctggaataggaggtcatgttgactgataatgggtaaaatgaagaaggagatactttttttttttttgaaacctgattttgtagacatttccataggaagaactctctgaatctgtactgtgtctcattttcttttcattcaaaattcagcctgtatattcgaatacatcctattatttctgacttctgatacacatagaattcatactaagattatgtatggtctgaatgcatggcctccaagatcacttacctcttttcatggaggaagcatcaaacgttttgccagtggacattcttggtggttcagaagtgactcagatctgatatcctgctgttctcttgtcgttgatcttctcaaaagtctccaaggaagtgttgcctaggaaatgattcttactacaggtccagttcttttcttctcaaattttctgtagacattttgtccaaggaataatcattaccatagctccaatgtttaagtcatcattctactttgtaaggagattttaaatagcttattttgtatcttaccactattccaaaaaattgtggtgtccttataagctagcagtccccaatctttttgacacagggactgctttcctggaagacaatttttccatggacctggggtgggaaggtggggggtgttgggggataggggatggttttggaatgattcaagcacattacatttactgtgcactatatttctatcattattatattgtaacacatattgaaataattatcatgtggaatcagtaggagccctagcttgttttcctgcaactagaaggtcccttctagaggtaatgggagacagtgacagatcatcaggcattagattctcataaggcatgcacaacctagatccctcgcatgtgcagttcacgatagagtttgcactcctatgaaaatctgataccaccactgatctgacagcaggcagagctcaggttgtaatgcgagcgatggagagtggctataaatacagatgaagcttccctcacttacctgtcgctcacctctggctgtgtggcctgtttcctaataggccacggactgatactggcctggcattttgggacccctgctataagtctaaccttgattagcaaatcttcccttttctatagcttgtgggcattttatacctcttcaagggaagagttaaacttttttcagtctttacttggagctgacaagtgtcctctttctcccatgtgctctgtcactcaggaagagatcagtcctctggagaatgccatcgaaaccatggagctgaccaacgagaggatcagcaactgtgttcagcagcatgcctgggaccggtccctctctgtgcaccctctctccatgctgctcagtggcatcgtggacccggccgtcatggggggcttctccaactatgaaaaggttcgcttggtcccagaatcccctagggattcacagacctgggtgtctgtgtgcctccctctgtgccatttgccactgacaaattcatttcctacagctgctctaagaaatgttcactttcccttctggcaagtgaagtgaatgaaacgattgtccctgacttcttagagactatcagcaacccag

SEQ ID NO: 40188 - DNA, 2300 bp, Homo sapien
aaaaacttcatatgatattatgtgtcagtcacagatattggcatatataaatctgtgattaggggtattctgtaaaaattaatacttggaaaaaatacatgaagattagtatcaaacaatatatatgaaaaagtacacactgaaagtattacagtatttaaaaagtagtgtatattagatcctatttttatattgactgccattgtaacactggatattattatggcacctaacatggagaaactagaatttgtctctggtgttgagtctttcccagctgctgagtataataaggctacagaaggctgaaagcctgagaaaaaggacagaaagaagacgatcatagtggcagccacagagcatagatgtcaccacccatgaagaacattccaattacaccgtctgctccaagtaggcaggaagaaaaccaacactggtgaagcctcgactctatgtcaagcactgtctgatgttccttctacacaggatgtctcccttaatcttccaaaccatcctgtgatctatcttgtgagtcaggcatttttcttctttttttttttttagacggagtgttgttctgtcacccaggctggagttcagtggtacaatcttggctcactgcagcctccacctcccgggttcaagcaattctaatgcctcagcctctccagtacctgagattacaggcacccgccatcacgcccagctgatttttttatgtttttattagagacagggtttcgccaagttcgccaggctggtctctatctcttggcctcaggtgatctcccgcctcggcttcccaaagtgctgggattacaggcatgagtcaccgtgcctggccaagtcaggcattcttctcactttgcagatatatggagctcagagaggtgaagcatgttgcccagagcacacagtggccaattggaagccagaactgggtcctgggagcaactgagtgcaaagctcctgctcttcccgggacacacacacacacacacacacacacacacacacacggacacaagagtgccacccaattaatgctgctcacccttcccctctggctcctttaatttctacccactctccaggcggctccacaggggcgtccttgacaaatgttgatttatatccaaaaagtttatattcaaaaaatatttaaccactgtaaacataccacagcaatgaaaaattctgcctccattaattatacctaacatacactgaatgcatgatgtgtattttaaatgctgttacatcctaaccctatcccatggattaaattgtgccaagtactgctttcatgtctcaactaagaatacttagttgaactaatttaattgtagagtcagggccatcagttgtccatacaacctctggcacaccaagtcaggcaggggtcctagaagctaattccgccacccaagctggagtgcagtggcccaatctcggcttactgaaacctttgcctctggggttaaaagtgattctcgtgcctcagcctcctgagtagctcggactacaggcatgcaccatcatgcctggccaatttttgtatttttagtagagacgcggtttcaccatgttggccaagatggtctcgcgctcctgacctcaagtgatccacctgccttggcctccctaaatcctgggattacaggtgtgaaccactacacctggcccctagaagctaattctaaagagagtgtggctctgccatccccagagatgctgcttcatttccagtgcgcctgggttctggggtccaccaatcagtttgtataaccctcaggggagacagaataacaggtgctttgaccagaggcatgttggttttttttctgtgacgctttactaggtaagttctataccagctgggttgctgatagtctctaagaagtcagggacaatcgtttcattcacttcacttgccagaagggaaagtgaacatttcttagagcagctgtaggaaatgaatttgtcagtggcaaatggcacagagggaggcacacagacacccaggtctgtgaatccctaggggattctgggaccaagcgaaccttttcatagttggagaagccccccatgacggccgggtccacgatgccactgagcagcatggagagagggtgcacagagagggaccggtcccaggcatgctgctgaacacagttgctgatcctctcgttggtcagctccatggtttcgatggcattctccagaggactgatctcttcctgagtgacagagcacatgggagaaagaggacacttgtcagctccaagtaaagactgaaa

SEQ ID NO: 40189 - DNA, 2300 bp, Homo sapien
ctatctggctccagagttgtgctcttacccactacataaaactgtctattgaatctcttactttaaagattctgtctttgcctgtacattgaattaagcccttcacttcctgggataagatactccctaatattttcgtccagtcgtctgatggtcttgtttctgtacattaacaccttgagatgtttgttcagttgtaattgaaaatttagatttagaatctgagagtgaagtcataggtcaagagtaggttgaggaggccgggcatggtggctcacgcctctagccttagcactttgggagggctgaggtaggagcatcacttgagcccaggagtttgagacagcctgggcaacagtttgagaccagcctgggcaacatggtgaaaccccatccctactaaaacaatacaaactttagctgggcatggtggtacacacctgtagtcccagccactcagaagtcaaggttatagtgagatgtgatcgcaccactgcactccagcctgaatgatgggagaaagaccctgtctcaaaaaaaaaaaaaaaaaaaaaatagcctaaagagtcataactgctggtactttcatagtgaattttgattgcaaggtgatcagtatttgtgatgtttgtccttgttcctggccaatagctcaatcttggagccacttttggagcgcagggcctcgtcaggtgccagagttgaagatctgtcccttagagaggagaacagcgagaaccggatcagcaagtttaagagaaaagactggagtctgagcaagtcccaggtcattgcagagaaagcaccagaacccgatttgatggtaaaaaacagaaaagaaaaaaagaaatctctggaggcttgcccccctctcccctgtacccaggcatatcaccatcccctcccagattgaagctgggctatggcttgtttcaggactcagcagcctgggttagtgtcaggtcgcagattgtggtaaggaaagcacatacctcatgagaagttcgagtctataaatcaacattggtgaagatcttgtacccacaatgtaaacatgtgggttgatgcttagagctgtcgttcttgccactctgtcccctgagtcaatccaaacattgtcatttctcttctttaatttttttaaaaggtacttttccttccatatcaagttgttaaatgtggcaagaccaccttttcctgagaatcagggtggcttatttccaacataaatgacacagcccaactgtgatcagaagaatcaagtctgtggccattcagaaaataatctgtggttcagtggttctagtcagtgcctgttcggtgttgcccatcatatgacaatgcttaaaaatcgctccttcagttaagtccttttccaagtgtcttctcagaagacaaggctgttgagagcattgttgagctcagccttcctcaccgtgaaaatgttttgctttttctctctggtcctagagcccaaccagaaaagcacaaaggccaaagagtctccagttgatggataatcggctatcaccatttcacggttcttcacctcctcagtcaacacccttgagcccacctccactcactcccaaagccaccaggaccctaagtaagttttcctgtattccttatagtctttttactagggaatggagtatgtttatgcatctgggcagtttgtaactaaaccagccagaatgtatgtaagaccattgtaaaactggttcaatttcgtgttcgtgtattatacagttagactggagtttggcaaggaggccactaggactcattaaacttttctggatagtgatccaaagggcattagtgtcagttttataattgtgaaggtataaatgaggcagatctgcactaggactagacagataacaagtaacttacaagctaaccattagttaggtagacctgaacagggacaagaaatagacccattccatctactgcttatagtctggcttggggaaccagcagtgcacaacacttgagaagaattgcaaagtacccatagtccagaggcatggtagagggataaatctatcgagccagatgggagacaattgtcaaccaagagttagagataatcagttacagtttcctggaggaagtggatattttcctaagcacttgggctatatcagagaacagaataataccatacattccagaaaatgttgtcatcttcagcttaatactaaaaccctgaacaaaaaaagttttggccaggcacggtagctcacgcctgtaatcccagcactttgggaggccgaggcaggtgaatcacg

SEQ ID NO: 40190 - DNA, 2300 bp, Homo sapien
gtgccagagttgaagatctgtcccttagagaggagaacagcgagaaccggatcagcaagtttaagagaaaagactggagtctgagcaagtcccaggtcattgcagagaaagcaccagaacccgatttgatggtaaaaaacagaaaagaaaaaaagaaatctctggaggcttgcccccctctcccctgtacccaggcatatcaccatcccctcccagattgaagctgggctatggcttgtttcaggactcagcagcctgggttagtgtcaggtcgcagattgtggtaaggaaagcacatacctcatgagaagttcgagtctataaatcaacattggtgaagatcttgtacccacaatgtaaacatgtgggttgatgcttagagctgtcgttcttgccactctgtcccctgagtcaatccaaacattgtcatttctcttctttaatttttttaaaaggtacttttccttccatatcaagttgttaaatgtggcaagaccaccttttcctgagaatcagggtggcttatttccaacataaatgacacagcccaactgtgatcagaagaatcaagtctgtggccattcagaaaataatctgtggttcagtggttctagtcagtgcctgttcggtgttgcccatcatatgacaatgcttaaaaatcgctccttcagttaagtccttttccaagtgtcttctcagaagacaaggctgttgagagcattgttgagctcagccttcctcaccgtgaaaatgttttgctttttctctctggtcctagagcccaaccagaaaagcacaaaggccaaagagtctccagttgatggataatcggctatcaccatttcacggttcttcacctcctcagtcaacacccttgagcccacctccactcactcccaaagccaccaggaccctaagtaagttttcctgtattccttatagtctttttactagggaatggagtatgtttatgcatctgggcagtttgtaactaaaccagccagaatgtatgtaagaccattgtaaaactggttcaatttcgtgttcgtgtattatacagttagactggagtttggcaaggaggccactaggactcattaaacttttctggatagtgatccaaagggcattagtgtcagttttataattgtgaaggtataaatgaggcagatctgcactaggactagacagataacaagtaacttacaagctaaccattagttaggtagacctgaacagggacaagaaatagacccattccatctactgcttatagtctggcttggggaaccagcagtgcacaacacttgagaagaattgcaaagtacccatagtccagaggcatggtagagggataaatctatcgagccagatgggagacaattgtcaaccaagagttagagataatcagttacagtttcctggaggaagtggatattttcctaagcacttgggctatatcagagaacagaataataccatacattccagaaaatgttgtcatcttcagcttaatactaaaaccctgaacaaaaaaagttttggccaggcacggtagctcacgcctgtaatcccagcactttgggaggccgaggcaggtgaatcacgaggtcaggagatcgagatcatcctggctacagtgaaaccccatctgtactaaaaaatacaaaaaattagctgggcgtgatggtgggtgcctgtagtcccagctacctgggaggctgaggcaggagaatggcgtgaacccgggaggcggagcttgcagtgagctgagatcgcgccactgcactccagcctgggcaacagagcgagactccatctcaaaaaaacaaaaataaaaaaaataaagtttttgcttcagaacaccttgtggagctcttgaaacttctggcgagggcgtcacctgtgtgatgtggggtaagaagtcttcttcgttctatccgcagaaaccatagaatgtggctttcatcagttggttgaccaggttggcttaggtgttacagtgccagcaacatttccatgagcttccttgctcagtgcctctctctgccgcctgcactttctgtcatttctaggctccccatcgttgcagacagatggaatcgcggccactcctgtcccacctccacctccccccaaaagcaagccctatgaaggcagccagaggaactccactgaggtagggaaatcacagctggcaactgtggccagggagcgccactcctgggaaggcagcatcaggttttccaggctctttagtgggcaggtttgctcatagacctgtcactgcagtcgattct

SEQ ID NO: 40191 - DNA, 2300 bp, Homo sapien
catattgatggtggagcaacccctgtaatctactccttggaaggattttttgctttgcttatgaaaagctgtgcttgagacttaggtacttttctcacgtggacacactgatcccatcccatattgcatcttggaagagatggatatcaagtacactttggtagctgaaataatcatatctttctgatgtctattgtatctcctttgaggaaaagaacacacatttttaatggagattggctgctttcaggtatgtgtgtctatcattgaaagagcatggactcaaacatcagccctgagttcttgagtccacccaactcccatcttcttgtggcacaggaaagctgccctctccctctcccaccacactcctgactaatggccttcactgcgtcgcagtcactccttccctacggacttctttgaagctcttccttttgcacatacggctttttttttttttttttttttttgtcctattacctcctctgagcgcaaatcactggctacaagggacttaccagtctggattcagcagtttcttttctaaaacccatttgggtgactcagcagccgcatctgctacctgattttatcctggagaatacagtgcaatatttctctttgattatttattcctcttgattgtggaattaatttgattgcttgctaatggtactagtagtactcctttcagaagaaaaaatggagcgatttaggtgaccaaatattacatacataaatagccacatgaagttttagacgtttggacttgaagcctcaaagatcaaccaaccagtccccttatttagtaaataaggaaattgaggctacacacagaaaattgtgctacagattattactaataacccagcttgctaaattaggctatacctaggtaatctctagaagacaactctgacagactctttaatatttacccctggttggaacaatatttgaaatgtcccagatatttctatgctacttagatatttgtggcaaagcagaaagctttttgactgtgaaggcagaggtcagcactgggggaaacttgctggtggtctctcccacaaccttgcccagagtcctttccactaaggaggtgaagagaacagagaaagagatttccatttctgctgccagagctggtatttgcctgcctgattctctgtgtttcctgtttcaccgccaccctttcaggagagaactacaccagttcatcatgagggtcagggaagcaaaagctctcagatgtgtccagggcgttacttaagaaatgagtatgcagattctggaaggggtgtggaaaaggtgatcctttacccccacccaggaaaacctgcattgtgctagcatggaagaatcatgggctttggaattaaacccatttggtggaattaaacccatttggtttcaaatcccagttatgacatctgttaactttgcaaactcacaaaaattatttgaaattatctgagttttcattttctcaccttccagaatggggataatgcctcctgcatcggttgttgtgaggtttcaatgagatgaaatatgggaaagaagaggtactcacctgatggtccctgctttcctctgctaggcctgagtaggaactggaactctctaagagcattactcatactttttttttcttccaaggtagtttggaatgtgagtgcaagttagttctgcacatacagcccttctccaaatggtggtttcctttgaggtcttttacatgattatttatgactagagacaaacttaataagaactcaagaggattttaaatggagagaactcaagctgtagagaaaggaggaggcaacagacaggatatgtaggggcttacctagagcctggcacgacttctgagaagtcacccagcagaccggctagaggggatttgtgtgccacactctacttgccgggctgccattaaaatagaaagatataaaactgggtcaccaaaaaaaccaaacctcaaggctatccttccagagcagtagaaatgagtcccacagcctggtctttgagcagaggctgggaagataggatacatcactgtctggataccttctctttttaatagaatatattccgtatgattccctttccaccttaatggaaataatagctctctcctgcctgaacaaaagggattccaggtagtattgtggctaagagattacagcggacgatggaaggttcattttttagggaaggtgttgggtaggaagagtcacatttgacagaattcataaataatgtgtcctgaagtcagaggatgactg

SEQ ID NO: 40192 - DNA, 2300 bp, Homo sapien
aagacaaaacaaagttgactcttgccttgagatctgtgtgacctaagacaatgctaatggagactttaaggacaacagcatattggatgaattcatagaccatatttgtgatggttaatactgaatatcaatttgattggatcaaagcatgcaaagtattgatcctgggtgtgtctataaaggtgtcgccaaaggagattaacatttgagtcagtgggctggggaaggcagacccacccttaatctgggtgggcaccatctaatcagctgccagcaaatataaagcaggcagaaaaacgtgaaaagtctagatgggcctaacctcccagcctacatccttctcctgtgctggatgcttcctgccctcgaacattggactcaaagttcttcagctttgggactcagactggctttccttgctcctcagcttgcggacggcctactgtgggaccttgggatcgtgtgagttaatacttaataaactctcctatgtgcgtgtgtttgtgtgtgtgtgtgtgtgtgtatgtattctgtccctctagagaatgctgagtaatacaatattgctgtgttcatcttaataatttcaaaacatttttcaaaaatttaatcccaactgttagaaataacctacaagaaatccagtgaggcctacctacccagagataagtgattcacctgacaatatgcatcacaagtcttaactctcatttcattagtcctatccagagaccacattttctacttaagcaatacttagaggcacatctctcagcaaacacaaaccaattggacaatttaaactagcactattcaaccataatgaactctggttgaaaaacagtctgtccctacttgcatattgtagtgagatgagattccactcttcatgtcagaatggcacttacatgagtcaaagtgtctaaatgaaataatttaaatggaacaaagtcaaatacttacattttatttttaaattctcctctatttgcagttatactttaaagtgtactcccttctctatcctatcatgaggactggacagcctccacagagatggctggacaaagcaagggaatttacttaggtaagacaccatttctctttactctgaaatccctgcaaatgtagttattccagaggagactgtgcaatgactgatgggtttagcatcctacatgaggggaaattgccattcccagctgtaaaatgaacaaatatccagttattttttttagccatcttacagcttagctaatataacaggatttacagccaattatacatgaaagtttaattctgtgtcagataaagcatatctttgatgcagaaatagaggcagcattaggccttacctggttaaaagctttttgctttctattcattcattcgttcattcattcattcaaacctatacttactgaatgctcactaaatgccgggggtttattaagagagatttaaataagatgggatctttgactattacaggtttcagcctaggggtaaattaggggaagacaaccatgtattcaaataaatgtaattaagagtaatggttgtgtgtgtattttacatgcttgtcctgtgtaaataacacgtccacggttgcacctctggggtggaacatctataaaatttagataatgatacccactttgcatggctattgtaatgaatgctcttatacatttgctatttattaaataactataatttctcatctttctgttcccactgcccttaagagtgatttgcatatttaactcaataagcatctactgaaatgagttgatctgttgatgtaagtctgctcaatatggtcttgctctcagaatatgtttcttgcctttttgatgctttagaaggctttcaaggtaagtcaagcagggaacctggtgggtagatgagggaattttcaaacacacaactgtctgatttaggatcctacatggacttggtatatagtgtcacttacttgtaaatcagatttttaaaattggaagcaactctgtgatcatctagtccatctagtctacacccttccttttacaaatgaagaatccaagagccagaagctcccagacatcctgactcaatgtcctatatttgttgtatagcctcctttgtggaagttatgtatgcatttgacttcacttaatctaagacatctattttccttgaactcttgataggtctgctggtttcctcaagggaatccaatctagctggattttaatctctttgaattgtgtcctcagctataaaagttttagctgaggttttaatggctgcactta

SEQ ID NO: 40193 - DNA, 2300 bp, Homo sapien
taaggacaattattattttaacacttttgtattaacatttgatcagtctttttgtattgctcatttttatatgaaattagtttttcttaacttgaaaagagggctgacaggacagtttttccaatttcatggctctagagttcccttttctgttgtttttgtgaagtgtttaaaatacacagaactcattttctgatatattctggtctattaaacctcttaactttcatctgcagtccttttttttttttgtctctgttgtctttgttgcattcaacttggattattttcccagcatcttatcagtatggggctttgtccatggaagggagttttggccatttggttttaagagtttattttcagccctataagatcttactgcaaactacttgcatcacccacttttgggatgatctcaatctgttgttttcagctagacttattaagcaatgaagtcagtatctatggatggctttaacattcatgggttcatcatataccctgttgcttctctctgctttttctttcacaggcgctgaaagcatgctgctcttatagctgttggtattggtgggactaccttatcacctagtgttgttttagatgcagtctgtgggtttgggtattgctgtcctagtagctctggtatgcttttattatgtgtgtattcagtttaaaaaattatgccattaccatcttcccagaatccccaatcttaatatttgtattattttctacatgtcatctctagatcctcagacagattctaagcctcctgagggattgttaggattccacacagactggctgacattaaatgttggagggcggtactttacaactacacggtaggtgtgtgtgtatgtgtgttagaaagagaatgcaaaagaagcactgtgtaccctttgttcttcaatttgctgatttccttaaaagatactcaaatgctgcttaaatatactatgtgatctgaaaccattttttataactttttttgaagaaaaaaacatggttcactccagagaaagcataaaaggcatcacttcagtgttttagaacatgcttttggctgggcgcggtggctcacgcctgtaatcccagcactttgggaggccgaggcgggcggatcacgaggtcaggagatcgagaccatcccggctaaaatggtgaaaccccgtctctactaaaaatacaaaaaattagccgggcgtagtggcgggcgcctgtagtcccagctacttgggaggctgaggcaggagaatggcgtgaacccgggaggcggagcttgcagtgagccgagatcctgccactgcactccagcctgggtgacagagtgagactccttctcaaaaaaaaaaaaaaaaacatgctttttagatattgagtaataaacacacaatataagtaaaaattaacactactgaaatttgtggagactacaactgcttttattaaagggcagaaaaatgtaagtttggaagatcaagaatattattatgtaataatttgcttacaggatagacagacaagtatttaaagcaaaggaaactaaaacaatgtttaaatcaaaggaagtaccctattagaagggatctgataaatggcaacttactgcacgtttttgtttcccagcgttactcctaccaggttgtagcatgcatctttttgagagagcagctgggatcgagtatactcttgacttaaatatgtttgtttataaagacaaatggagaaatcaatttttttccctgaattcttaggagcactttagtgaataaagaacctgacagtatgctggcccacatgtttaaggacaaaggtgagtgtaacacgttgttttcacatttcatcttacctgttttatatctgtgctgactttataactcctgaccttctgtacttactaattatgtcagtttttaagagtaaaaacttatatttagcaattttttcctcatacatttctgactttattttttgtttatgggggactttctttattataatggtgacacaggtgtctggggaaataagcaagatcatagaggagctttcttaattgaccgaagtcctgagtacttcgaacccattttgaactacttgcgtcatggacagctcattgtaaatgatggcattaatttattgggtgagtttatttagactttcaatataattatgtaactactcacatttttgtaagtttaagattttaactttgtttcactcagtaacagtatatttccataaagtaaaagtatatattttttctattttttaaactagatgttttcacatgt

SEQ ID NO: 40194 - DNA, 2300 bp, Homo sapien
ttttgaacatactaaatctttcttagagtaacaacatacgttttagataacaggtagtagctaagtacagaacaggtttagaaaaagttaatagtgatgagaaatgtaaacttcgtgaacatattttcggggtagcattcatgataactcaagaactcgaatttatacgaattctgattttaaatgagtattaaatctctaagaccaaaagaacataaaattatagccaacaaaccacactctggttcgaattttcggagcatgtttactctacactgaataatcggaaagccatttttaatgccactggacaatttcactatttaaaaatttacagtgttccccgaatgtgcaggcagcagagtattttggcaaccaacacagcgagacccatttacctttaccttagactcgtaaaggctgagttacttctaggtatcatttagcaacgcaataaatgtctgcctcgaacagtgaaaatttcccaaaggagcagaacaactttcatgggtggggcaaaaggctgggaaggaagagaattcgttttggcttgctccagcgctggaagaacactgagcaccacactctccgcaaaggcctaacacagcaaaggcgactgtcaaatcgatcccttttgggtctgctgtacccgtcctctagggaatcaaaataaggcaaaataataaaaagagtacagagaagtttggcggcggcggggcgtgggggcttgaggcatctcagagaggagggcaaaaatcaacaagaaaatgcccccattttaaaaatcctgtctgcgacctcggatgggagattttgtttatccacgggcagtttacttctgtctccctgacccatctccacaggctctggtgctcgccgccactttccgagcagatcattactcagcaccggagccggcgcgcctcctcccgcaggcgggagcggggtctcggggagaggcgggaagaggcgcgaccgcccgggcgcccaggtgaccgcggccctccccgcgcccccgtccccgcgccccccgcaccaagcatccgggagacccggagcccccgggccgaaccgcgccggcccccaggcagctgaggcactgaagggcaggctcgggcacgggggtcctgagggtcgggaggaggccgcggggaccctgtgctgtccccgagcgcccccagcccgcgcacgcccacctcccagcccctctacccaacttcaccgctgccccgccagccggttccgcaccgtccgccctcgccccgacccccggcccgccgcgccccctcacgcccccgttacctttccgttcttggggctgccgttcaggaacagggtcacccgcctcatcgcgctgcccccgctgggtcctgagtgagccgccaccctcccacctggtcctcctcccacctttttctcctcccgcccttcccctccctccacccactcggattcgcctcccttcgccaccttcctgcccttggggacacaccacacgcacgcactctgtcccacacccaaggttcggccggtcctccttcccaccccgcccctaggctcctcagcctgcctggggcccttcccccacctctccgagactgacactctgccgtaccaaccaacccgcgtcaccggacagagtccagccaatcagcacccagtatcgggcgggctctggctaacctagccgggacggagggagggaagagacgctgaaggctagtagacgggaaggggcatcagccaatcagagaggctcctggagccggacggcggcttccagcgttactgagcaggcgcaccctctagtttaggtagcgcttatctgcatacgagggcggggtctggggaaaggaggtggagcgctgaaagggacccaagcaccagtcagcccctcctccagcgttagccccgcccacaagccggcccagctaggaaacggctgcggtagggacggactgattgggtaagagccagctcgtcgctctgttaggattggttgaatgagtcttttcgaagtttgcagcatccaatagaaaggtgggaggcggagttaaagcgctaagagaagcgttactccgcgagactctcctgaaaagtagtccccgaggtcacaaggcagtggcaggtgtctgtagtcctcgggttgactgcagctcgcggtggtccctctccgagcccaggaagccactccagtgccgagggagaggcctgggagcgctcggagtgtgcgcggactggagaagggggaggtggcggagtgattcgtagagtaaattcggtaccgaggggcggggtcg

SEQ ID NO: 40195 - DNA, 2300 bp, Homo sapien
gttactgtggaaaagttcaaaggtgatttaaaagtatctggtgtgcaaggattaggaggtaattcggcatgcttctgaggagtcacaatcttcccagttcccaaaatgaaagaggcatttcctgaaacggacgacatattgtaggggtgaggacaactctctgtctaaaccttcaacttcacaaggaggcagatcatcacataccagcattattcattgcagactccttggtttcagggggcttgtcttttgaattggcatccatctaagaggtgaagaaaaacaatgaaaaataaccccaccagcaagatgaacgtgattcgatcacgtaccttattcaggactgaattgtaatacagtccatactggcatagaaacacacgtcacaggtttcattttttattttaatttctgtgggtatacagtagatgtataatttatggggtacatgaaatattttgatacaggcatgcaattcgtaataatcaaatcaaagtaaatgaggtagccattatctcaaatatttatcctttttgttataaacaatccaattatacttcgttatgtttaaatgcacaattaaattatggaccgccaccctgttgtgctagcaaatactagatcttattcattctttgtttttctacctattaaccatctccacttccttcccatccatccccaatacacttcccaccctgtgctaaccattcttttactctaagcgcgtacttttaaagccaaattaaacagaaagaaatggagaaaactgctgttcaggcaccaaagcagaccccaaaggataagccatggcttttcaaccgtagcgaaaacctgaatcataagggtacccctctcaagacgcagctctatccatttccagaaattctctcaacaggtccggatgcactcctggtcacccagagcagctcctgacaggagtactaattctgtgctgcagggtaagccgaacaaagtgcctagaaatgccccggagaaacagccccgtggcagcgcggatgcaatcctacctctcacgccgcacctgaaggcccgccaggcagacaggcttactcccagagccccgtggcaggcgagcgtcgcgtcggccgctccttccagaccccggctcctctgtccggaagggctctcctggcaaagcacccgcagccgggagccgctcttcgaacccggagcccgaggtcccgacggctgacctggactcacagcctgcgctgatcctggcctgcgctctgcccggcagcctcctccacccgcctcctccgcccgccgaccgattcaaatccccgaccccgcccctcggtaccgaatttactctacgaatcactccgccacctcccccttctccagtccgcgcacactccgagcgctcccaggcctctccctcggcactggagtggcttcctgggctcggagagggaccaccgcgagctgcagtcaacccgaggactacagacacctgccactgccttgtgacctcggggactacttttcaggagagtctcgcggagtaacgcttctcttagcgctttaactccgcctcccacctttctattggatgctgcaaacttcgaaaagactcattcaaccaatcctaacagagcgacgagctggctcttacccaatcagtccgtccctaccgcagccgtttcctagctgggccggcttgtgggcggggctaacgctggaggaggggctgactggtgcttgggtccctttcagcgctccacctcctttccccagaccccgccctcgtatgcagataagcgctacctaaactagagggtgcgcctgctcagtaacgctggaagccgccgtccggctccaggagcctctctgattggctgatgccccttcccgtctactagccttcagcgtctcttccctccctccgtcccggctaggttagccagagcccgcccgatactgggtgctgattggctggactctgtccggtgacgcgggttggttggtacggcagagtgtcagtctcggagaggtgggggaagggccccaggcaggctgaggagcctaggggcggggtgggaaggaggaccggccgaaccttgggtgtgggacagagtgcgtgcgtgtggtgtgtccccaagggcaggaaggtggcgaagggaggcgaatccgagtgggtggagggaggggaagggcgggaggagaaaaaggtgggaggaggaccaggtgggagggtggcggctcactcaggacccagcgggggcagcgcgatgaggcgggtgaccctgttcctgaacggcagccccaagaac

SEQ ID NO: 40196 - DNA, 2300 bp, Homo sapien
tcatgtaccccataaattatacatctactgtatacccacagaaattaaaataaaaaatgaaacctgtgacgtgtgtttctatgccagtatggactgtattacaattcagtcctgaataaggtacgtgatcgaatcacgttcatcttgctggtggggttatttttcattgtttttcttcacctcttagatggatgccaattcaaaagacaagccccctgaaaccaaggagtctgcaatgaataatgctggtatgtgatgatctgcctccttgtgaagttgaaggtttagacagagagttgtcctcacccctacaatatgtcgtccgtttcaggaaatgcctctttcattttgggaactgggaagattgtgactcctcagaagcatgccgaattacctcctaatccttgcacaccagatacttttaaatcacctttgaacttttccacagtaaccgtagagcaattgggaattacacctgaaagctttgttaggaactctgcaggtaagaaaagttgtcattctgttgtaatgcttttcaagtttaaaaataactttaatataactcagctttatttgtttatacgtactgtcatattttaggtacctaaattgcctactctgcaaacttgcttcttcagagagacttctttgcacatgcacagttcatttagcatagcagggatcacggaatcgcagggcacccagcatgataatgttcccaagtcagagtcgtgcttgatgccaatactagaaaataatgtgtgtgtgagtcactttttgacctgtcacctaggatacaggagggtgtatgatatgaatagtaataatgcattttgttttcatttatggcaaaaataagagaaagtttaagagcaattaagaaaatataatactgaaagagcaggatgtacctcctttaacaatcacaaacagggttgggctcagtggctcaagcccgtaatcccagcgctttgggaggccgaggcaggcagatcaccggaggtcaggagttcgagaccagcctgaccaacatagagaaacctcgtctctactaaaaatacaaaattagccgggcatggtggtgcatgcctgtaatcccagctactcaggagtttgaggcaggagaatcgcttgaacctgggaggcagaggttaccgtgagtcgaaatcgcaccattgcattccagcctgggcaacaagagtgaaactctgtctccaaaaaaaaaaaaaaaaaaaaaaacacaaacagaagattgattctggctaatgtccttcgagcagtagaaatgaagtttacttgtgaagtctgacttagatggaaaagaaggaaatactatatgagaatggaattggatcagagaatagcatttagaattggaggataatggaagtcttgaatatcacagggcactagaccaggtaatacataagacaaggcgaaagtggcacgccaccctaactttcattctcaaaaacatcactcttagacctttaaaaggctggattcattttgtgtgcttaggcatatgtccaaaattcagggtagtgctgatggtaggtatcagaaagaaacaatcatcttgaagaattaagaacctgagactgcatgtacctaggtggagatcttacctttcagttgctggggataaaactgacttatttagaaaaagaaaaatactgagtcaaaagcaaaagccatctgtgtgtaggaaataagaaacaaaaatgaaaacttaaaatgtgttcatgtatttattcaacaacttttaataactgttctatgtaccaggcactgttctaggagcatagactaagtcagcagacaaaaagattcctcttccactgattgtatatgaatgactgtgccagtaactctccactgagttttttgtagcacatgtttatcatgttttctctctcaggctggtacatcacgagtattggatgtggttactgatgattgccttgttttgttccaatttataagagagtttcattacaggaaagtcatcatcctaccttaaaaaatgtagacgacgttctgcagtcggtgctcggggctctcctgaaacaaaccatctgattcgtttcattgctcggcagcaaaatataaagaatgctaggaaatctcctttggcacaagattctccttcccaggtatgattttcttctaagttctgtcgtgaattccgttaatgaagcttttgtgctttctttacaccttctagtgcatctgctctgtttcaaatctggagggagattttctctgtgttttagagaacatgcagttagcggccgggc

SEQ ID NO: 40197 - DNA, 2300 bp, Homo sapien
cacttctgatcccaagcattttggataaaggatacccaatgtgaactctttctaggtgacttcaaacattatcacatgctgttgacttcaaattaaaatagttgcccgtggccttttcccggaactcttgaattaagtatccagctccctttcatgaccttcacttgaatgcctaataaacatctcaaactgaacatagtcaaataggtcttgatgattttttccttcaccaacctgctcatctctgttttcctcatcttagtaaatgacactctcattcacctcattgctgtatctcaaatattggacttaacttgatacctttctttttcttttccttttttttttttttcttaagttagagtctcgctgtcacccaggctggagtgcagtggtgtgatcttggctcactgcagcctcaacctcctgagctctaggagtcctcctacctcagccttccaagtagctgggaccacaggtgctcactaccatgcccagctaatttttttttttggtaggtacaggatcctactatgttgcccaggctggtctccaactcctgggctcaagcaatccttccattccaccttggtctctcaaagtgctgggattacagatgtgagccactgcacccaagtgatacctccctttttcaaatgaaacttgtaatcgcattgacaaatgctactaggtcttcaaaatatgtcaaatgtccacccacttctcaccttttgcattcctatcagtgtggtccaggccatcaccatctcctgcctggatttttttatgtatcctctgaagtggttttcctgcttcccctctttccccaatcccctgttacagtttttcacacagtagccagagcactggttttaaaatgtaagtcacagtatctcactgccctcctcaaaatctttcatcgacttcctgttatacttagagaagtagccaaagaccatattatttctactaggccttccctggcctggttcttaacctttgctctgagcttatttctcagctctcttgtccatgcccactgttccagccacagcagccttgctgggcctctgctatgccaggtacatctttacctcaggtctttgcacttggctttgtgtgcataatgtccatccctagatctatgtgtggttcgccttgttcttttcaggtgtctgctcaggaactctctgtttacccaaagcagtagcacttccttccagcttatcatactgtattcctctcttgctacattattttccttaatagcatatattaactacttgttgtgtgtgtgtatatatatatatatatatatatattaactttttacttgaaataactataaatttgctatctagttgtaagaaataatataaagaaatccagtattcccttcacctagtttcccgcagtagtgacatgttgcatagctacgatatattaatatcacaaccaggaaattgacattgctacaatccaccaacttgttttcagatttcaccagttttacatgcacatactttttgtgtatgtttagtccgtgtggttttatcacatgtggattcatgtgagcacagtacagccaagccacagcatggttctgtcctgaggatcctcatgttacccttcatagccatcactctttccctctccctcctccctgctgtgagattttataatccctgcttattccgtgctggttttgggggtttgctcatctttacttcttcagcacccagaggagtgcctgtcacatcatgtatttgttcaatggatcacttaatcataaggcaacgctctcctgtgggaagaatttgggaagaaaagccacgcctgtttggggcacatacagtgtgtttatagtttggtgtgatgatctttcttttctcattcctgccaccctcggatgttgaaatgcctgtgactctagcggtaaaattgcttattagtcaatgcttggctcagattagtttttatggtccaagtagtgggtgtcatgagtagaggcacgctaatagcttatagctgattcatgataccttctttcaacctctgactcagagatttcctggggagccaaatccccatacccactttacccttcgtagtccgatttgaggtaaaaactgaccgatgctgcttctttacctccttttctgtttccaaatgaaatcccagacgttactgcccaatcaggttatattaggtttgaatttcttcatagcatgttattatctttgcaaatactatatttttggtctagaacaaacagatttaagagatcttctgcctctcaa

SEQ ID NO: 40198 - DNA, 2300 bp, Homo sapien
atttctcaaggagcacatagttttgtgccatttctgtactcttgaatctcaccattagtttcacctatatattctgtgctgtcacccaaatgacctttcttaaatttaagatcaaacgttgacactctcgaagtcaccatgcagtgagccttcattgctttcattcaagtcactggcaagggctctgctcctgccactcctgcatggatccacgggccgggccatgtcttgctgcatgcagccctgcacctgtgctgtgctgtctcactttgagttcatgcacatggcattcccttctctttgaagagcctttctgcatcgcccccatagtaggccaaaacagcccttgcttgtttgagatttgacttagacattacattttccgtggagccgatcttgaacacctcctacaggccaggtgcccaccttcacagttcacacagccagtcatggtgcgtgtgtatggtcactcctttactttacaccagcagctccttgaagaatacatcctctttgcttccagatcccacacctggcaagttattacctggcacacagcagtctcaataaatgtgtgaatgaattccactttccagatgtttgtttttgtttttgttttgttttgttttgtttttttgagacggagtctcactgtcgccaggctggagtgcagtggcgcgatctcggctcactgcaacctctgcctccctggttcatgcaattctcctgcctcagtctcctgagtagctgggactacaggtgcgcaccaccacgcccagttaatttttgtatttttagtagagacggctttcaccatgttggccaggatggtctcgatctcctgaccttgtgatctgcccacctcggcctcccaaagtgctgggattacaggcgtaagccaccacgcctggcctgtgttaattgttaatatgttttatgttggccctaaattctggttctcttcaacattgtcacattgaatatatttcattcctttcgcccataacagtctgtctttctagtatttcagtacagcatttccccaaggtcttttccatatgaaacttttttaaaaacataaaacattatttcttggttgctgatacgttactcagaattgaatgtaataccccattccggatattattaagcgacttttaatttttatggaaacctacattttcagtcaattaatgtcagacctttgtcttccatcttctgcttgtgcttgttaaaatccattttgtttgactgaatcttgattaagtcatctgttgtttgaatctgcaggttcagctagctttgtgttttcttcatattttacatacacacctcctgtttcttcatccggacctgggagcataaagcagtctcccatagcttgcagtatgtaattcacactaggttaatcctgagtcatcacaactgtgcgtcttacagatatctcatgacattatatctgtgcagttctaaagcatcttatatattttttcatttatccagccctagttttggcaagtgccttgtggaaatgtagaaagctaccatacaatttataaactgaatcctgctttgtagtttatttgactttgtggaagttacctgacttcctaccctcgatttagatgcttacaactttaaatgaaatataaaagttatctatgcaataaagcactgtatgaacaataattagagatattatagaagttgaagggtcagactgggcattgtggctcacacttgtaatcccagcactttgggaggccaaggcaggaggatctcttgagctcaggaatttgtgacaagcctgggcaacgtggtgagatcccatctccaccaaaaatacaaaataaaaagccagtcgtggtggtatgtacctgtggtcccagctacttgggaggctgagatgggaggcttgcttgagcccaggggcagaagttgcagtgagctgagattgtgccactgcactccagcctggatgacaaagtgagaccctgtctcaaaaataaataaaaataactagttaaagggtcaaaattttacatggtgctacatctttctcaattgcaatgttttaatgcattttctcaggttttaaaaagttgcagaaagaagaaaggaaagggaaagaaaagtgttcagaaatctttatatggggaaagagacattgcttctaagaagcccctcctcagtcctattcccgagctgcctgaagtccctgagatgacaccttccattccgagcatccgaagactgggttcaggtatcctgacattttcctggtagttatattttatctt

SEQ ID NO: 40199 - DNA, 2300 bp, Homo sapien
tctgtaaagttttgacataattacagaaggagaaaactctgttgagtcccaagttctgtcccatctcccctttgccaaatggaagtgtggcaaaacagaattttggtgcatttgctacttcatgtgaaactaattccactgcaccccctttctcctttttactttaaatatgcaggttgtgttgtcaacaacggtgaatgtggatggacacgtcctggctgtttctgacaacatgtttgttcataacaactccaagcatggacggagagcaagaagactcgatccatcggaaggtagggctgcctgcgctcagcatagcagacacatgaaattctccacgaatttccttgttcgaacttcaaatttatgtcttggagtcagagcagagaaagtacacagaacaatgtgggtttttttttttttaaacgaagttgtaaacacagactccagcctgctccactgtaaggcccacacgtctaccagcccgtgccaagtcctcatgcctcccactctcttccatcctgttctgtgttttcctttttgtgagacgggcatttcaggcaaacataggcctatgacatcttagttaaacaggaacattgcagtgccagacatgtatgaataagtgtcacatgtgcccttaaacagattgtaggcaaaacaaaacaatgctcagaatgaaactgacactaattgatttttgtttgcttggacaagaagaaatcatggtctgttctgggtagttttccaagtgcattaaagtaattagaaataccggtaactgttaaatttcaagttgtccaaaaaattaaagtatatcgatgaagataactgacaaatctaagtaaattccattttaattattccccttctgtctgcactccccaactcactggtatagaaagaccttataatacagaatgttggtcaaactaggctactattttagtgtgatgttttgttatatactaccacccaacccccacctcccaccctaactcagccctgaaaatgtatcttgtatcattgtaaacaggaattaatgaactgaaagaaaatgattgaatcagtaaagaatttggagtggtgttaattctcccacagtgggcactgaaaggggagaagaaaatcccagagttcaggactaggaacccatccagtttcttttgactgattggatgtgattgactggctgttcaaagggggctcatgtttttggagtcctgccaaagttctcctctacctttgaccctgtcaactttggaaatggagtgatggattgactttagttatggcctgaaaaccatattgggttcctgttgggatataaagtccagaggcctggagcatatggaagaagtggggaaaatccttcctacaaagttagtagagtgattagaaattgtctcttgatagagctgaaaaaagccttcaactatgatagattttgctttctccccctctctctctctggcccattaacaggccttgtaaatcttaacatcttagggcagaggaggtggggagagaaaggggatttacacatttccagtgtgatcaacttataaaaatatgggcaaaaacaacagagtttttcaaacaccctttgcacaattacctaagtgttttactttttcatacataatggtcaactcattaggctttaatgactcggtgaaaaccaacagccagttagggaatgatggcaagtcaacaaatctcagcttgaacttcttggaatgaccagcagctttcaaaagcagcccatccgcagaattctaggcttcaaccaaatacgggtgtccagccctttgaatgcaaggactttttatttgtggtgtgtccaatcctttgaaggcaaggatttgttttcttatctgtggtgggggatatcacaaaaattatacatggaccttttttgtttgttgtttgttagctcatcagttatcgttagcattagtgtattttatacgtggcccaagacaattcttcttccaatgtgggcctgggaagccaaaaagttggacacccatgaaagaacaaacctgactttttctttcctgtcttcttagctaccccctgcatcaaagccattagcccgagtgaaggctggaccacaggaggagccatggtcatcatcatcggggacaacttctttgatggtctccaagtggtgtttgggactatgcttgtatggagcgaggtaagcagaggcaacaggcttactctgatttccttttgcccaaagattgttttgatctgggaaactagcacaaacaccaagggtaaaaaagcataaa

SEQ ID NO: 40200 - DNA, 2300 bp, Homo sapien
tcattccttcatattcagaggtaaggtagggctgggagctgtggctcacttcggtaatcccagcactttgggcggccgaggcaggtggatcacttgaggtcaggagttcaagaccagcctggccaacatggtgaaaccctgtctctactgaaaatacaaaaattagctgagcatggtggcaggcatctgtaatcccagctacttgggaagctgaggcaggagaattgttttaaccctggaggtgggggttgcagtaagctaagatggtgccactgcactctagcctatgcaacaaagtgagactctatctcaaaaaaaaaaaaaaatacgacaggatcaagccccctgccctccatttaataagtaaggaaggacaattacaagtagaatatcaactgttttaatttgggagtagacaggaagagtcatttttaaacacgactcttcattttgtacctatttagtgcccttcctcaaaaggtctacacatgtttgtgagtatgtatataataagttctttttttttctcaataataatggccatgcgtaactgatgtgaactgagaaatagacccatgtctagggtggttcgtcttctgggtcaagtgattcggtgggagctccacccaggtccactcccttctgctatgcttggccagcctttgctgatatccacctctttgagcttctcccccacccctgatctgcagtacatatgctggagctcgatttgataccagtctttgtgctacttgtttcctgtgttaactatgattctccagccagaaaataaactcttttaggttagggaccatgccttataactgttggtacctatttcctatctgcctcctcctaggacctccccccgagcttagaccatgggagaacctctgtgtgtgagtaatgtcatctgtcttatggtctggtcaagcccagcatgggcaaagcagttaggacgcaaactcatcccagtttggcacacaccaagcactgtgctgaatcctttatatgtattacaggttgagtattccttatccaaaatgcttgcatctagaagtgcttctgatttcgggttttggaatatttgcattctgtacttacttactggttgagcatccctaatctgaaaaatccaaaatccaaaatgatccaatgaacatttcctttaagcatcatgtcagtgctcagaaaggtttagattttggagaattttggatttcagattcttggactagggatgtgtgcctatatctcattatacctcatttcagcactgtgagatacacattgttatttatatcttacagataagaaaaactgagattagaaaaggtgaagtaatttgatcatggttgcaagttaggggacagaagcctgggatttgaattcagctctccctgactccaaacccatgttctgccactgttccacaccacctctcccctcaccctcattagatgctacacatcctctattttcaacactgaattatggcaaccttatcttctcagcaaaagtcgaggcatcgctgccaccactctctactgggcagcaacaccacagacaattcaccagccagcatcccaatgctgggcatgatgtcaggacctgtctgaagtgcaagaacccattcctgagcttgaagaagtgactttccagctggcgtatagatctcagcttccacatggcacaccagctttctgtggtggaggctccactggcggtggcggtccaggtcttttgatagagaaccaggtttctggaaccagcaggcagatggtcattttctccacttcattacatgggtgtgctttgagcaaaggttcttgacaatgcatggatgaagggcagccactttttctgtaaagttttgacataattacagaaggagaaaactctgttgagtcccaagttctgtcccatctcccctttgccaaatggaagtgtggcaaaacagaattttggtgcatttgctacttcatgtgaaactaattccactgcaccccctttctcctttttactttaaatatgcaggttgtgttgtcaacaacggtgaatgtggatggacacgtcctggctgtttctgacaacatgtttgttcataacaactccaagcatggacggagagcaagaagactcgatccatcggaaggtagggctgcctgcgctcagcatagcagacacatgaaattctccacgaatttccttgttcgaacttcaaatttatgtcttggagtcagagcagagaaagtacacagaacaatgtgggtttttttttttttaaacgaagttgtaaa

SEQ ID NO: 40201 - DNA, 2300 bp, Homo sapien
agaagactccaggtgatcagtttttgctgggaccgaaattctccgtaaaacctgcatgtaacagagaattgccgagttgaaacagggcagtgaatctcatccctacaaatttccctccctacccccttcttcctttggacactcctgtcttacttggcttttactagccacccgatccatttcccaatcgccctgtatggctctcccgccccttccagtccaacagggaggaccaagccagagctctggggtcggggtaccacagtcaacacaacccagaggcggggggtttaccttctctaccttcccccaaatcaatgaccccagtccctggatcccggggcctgtgcagagacggtccgtgcacccgccccgcaaactccctaaccccctatccgttttcaagcgaatctccgcagttcggaccagcacttcctagtcgcaatcccgcgcacgcagcgtggtgccgcggtttgtcccttggggaggtggaggcgcgcaccggtccctttctcgagagagccgagttttcttgaagtgcaagcttcctgtcagcctaggcaaaccagttgcaaggcgctgtgtcctctagcggcaaactctagcagttcatttgcgagcgctcacctacacctaagggatctggtctctcaaatctgagacccaagaggggagaaagtgccctgaacgcagtccaggcgctcgcaaatgccctccccgtaatgagaccgggagactggggcgcaatcgctcgaactacgaacagctgattgtctcctccacggcagatggtctttgagcacagatttgcattcattgtcttcaaatctgttttcgcgctggtgttctagatttcagcagcagcagatctatgcgcagatcagaatacaaaaggagaagcaagaaaatgacacccagccaggaggatgtttaataggcaccgcgagcagccccgcgcagttaaaaaaccgtctagggtttcagctgttcggtgaggctgctgccaccgcctgccggccaccagcccgcggccagcaccgcggcgaccgcgcgcggtgggcgaagtttccacgactcccccgtccctccccgcccactaccgggggcttcgggaacggagaggtggggagggaaccggaggacccgcgggaatactccccggccgctcgcgcactcagcccgcctcgatctgtcagcaacctctcctccacacgggtgcgactgccgctcgcgcccgcccgcccgcgggtgttttccttaggtcctggaccgttttccccagcactgtatttgagcagcacttgcccctcgcttgtccgccccaccccatcccccgccttctttcatatgttctccactctcagcaacgtgcaagccgcacacaacatctgatatcaccatggaactccaggagacctggggagccattcagggagctgggtgctctgggggacgtttgcgcaaaacataagcacatgtggccacgctcacaagcatgcacacagatccgaaccccgggaacgaacgtgcctcccggcaggctacaaaagcctacatctagaggcaggatccagggaggcttcccgcagccaggccgaacccctgcgtccccagcccgcagagacctgctaccctaagtcagtgcagggtgtgggggccccccaatcctgcgcaagcacacggggttcgtgctaggactcgacgcccgcagctttctgtcccctttcacctcccggagtcccggcaacgcagagcgtggcgcgcgccgccggaggacgtcggcccggcttgccaggcgccggccaatcccgcgcgtccatgcaaatgaggctccttatcgggccgcagctccgcctcccgcagccagggccgtagtaacccattcatggggcccgcgcgcggctgcagccgggctccgtggcgctcgcagccaccgcctcctctcggctccaggtcttccccttctttttacaactgatcctgttggggattttttttttttctaaattggaacggtggggaggagcagggaggggggacctggaggaaggggagagattaggcagccatcaatttcctccagtttctcccagaacaggtgatgcttctaaattgtgatcactttcaggaggcagcactgcagctggaaggatgcgagcgacctagggtggagtggctgaggcggcagatctgaacttgcggaggataagaacccaaactttgactacatcagtccgcacctcgccagtgaagcaaaggacgggttatcttttttttttttctaagactcaaacttgggc

SEQ ID NO: 40202 - DNA, 2300 bp, Homo sapien
taagatggagagctctccctggagagtctgggattgaaccaccaaagaagggcagagcaagcaaaaaggaaaataaatgaaggcatacccagagaaatacatttatgaaaaacaccagcattgaagaaaatacagcacgcagtgcactgaagttttgtacctgttgtacaggtagccaaaagatgacacatagagggtggatttttagttttgattaattcattggtaacgtgggaaatattcatgcagaaacagaggaatgatcatgcagtggtgcagttgttcctttgaaggaattttgaacgttgcattacagttcaactgtcctggaaatcaaaaatatggtagaaagtggagatggtggggaggacgtgtaaatatctttaactcccccttcttggtttccaaacgcctttatcactccattcagccttaggccaaattctggatgcttttacaggtgtttttcacgtgtaaaatgtgcatatctatctcctaggagtatcgtggagatggaatgggatatgtaaagtgtgctgtatatagcaactgcatcattagagcatctttcaacagaagtgcacatcccctcatagctgatgactggcatttcctgttcatttttttccttctacctcttaaccttactgacgatgctttcaatacaaatctaataataacggcagctaacatttatcatgtgctcaaattaagtcatttcatctccccaacaatcctatcaggtaggactgtcatcttcatctcctgagccttggaatcatattaggcagcctggcttcagagcccagcactttttgtgtttttgtttttgttttgacaggatcgcattctgtctcccaggctggagtgcagtgatgtgatcacatagctcactgcagccttgacctactgggctcaagcagtcctcctactgcagccttctagtagctgggactataggcacgccatcatacctggctaatttaaaaaaaaaaattttttttggagagatgggtctccctatgttctccaggccgaactcggaactcctggcctcaagcgatcctcccacctcggcttcccaaagtgctgggactacaggcgtgagccaccgcgcccggccctgagcccagctcttaagcacgcagtccaacacgtttagctggagagacgccgggtcacttcttgggccataccctctcatcacaaactcaggtttctcttagaaatcactcttagtgtccgcagtgcctaggactcccgccttggatcctggggcccacgagaaggtaatttaattcacccagatagaaccagcccaatcgtgtccctctgaaccccgtgaactttcaccccggctgagcagtaagtctgcaccgctgtccctttctttgtggtctcagggctaatccaaagtgacaatttcctaagaagcagtacggggttttttgtttgtttgttttttgtttttgagacggagtcttgctctgtcacccaggctggagtgcagtggtgcgatctcggctcactgcaacctctgcctcccgggttcaagcaattctcacacctcagcctcccaagtagctaggattacaggcgcacaccaccacgcctggctaatttttgtatatttttaagtagagacggggtttcaccatgttggccaggctggtctcgaactcctgaccttgtgatccgcccgcctcagcctcccaaagtgctgggattacaggcatgagccaccgtgcccggcccaggtattcctagaagacataggaccccatgaatccttgcaggagagcacgtaaactggactcctaagcccgccccagagccccggcgctagtgctcgaggctgggacactgctaggtgcacacagccgcggcctggcgcaggcggtgcggacagagggtatgccatggcgagacgctggcgcggcgcaggccctgccggccgggacacggagggcggggcacaggcgcagcaggaagggggcgtggccaagagccgcccggccgctcccccgcccctccccctccgctctccgccccagcccggcggctccgccccctaggtgacgtcactggccaggccagccggcgccattttgaaagtggagtcgcctgcccctgccgctgccgccgccgccgtcgctgtcgtagtcgccgccgccgctgccggagaaagagcacgagcggggaagccccagagtgaaatctagcatcctgccggctggtctgcccgcccctccttccttttccccccggcccccgtcccctccccccgcaggtgccatccg

SEQ ID NO: 40203 - DNA, 2300 bp, Homo sapien
aaacattgtcttaaccaaatgacccaagttaacgccaccagctgtaagtcatgttgataccatgtatccctttgaacaatgctgtgagaagtcacttcatctctctgttctgttcctaaaaacccatggtcccagtctgatcatgaggaaagagcaagcaaatccagttgagggatattctacaaagtacctcaccaccactactcaaaactgtcaagatcaagaaaaataaggagagcctgagaaacttaaaggcagagagactaaggaaacttgatgactaaatgcagtgttgtttgaattctggagcagaaaaggaatgttagtggaaaacctggttaaatctccaaatgcagtctgtagttaatagtaatatacaaagtcgacgtcttagttttgacacacgtaccatggttgcgtaagatgttgacagaagaaactgggtaaaggatatatggaacactgcaattcttgtaactttctgtaaatctaaacttaattgtaaaacaaaagtttgtttttaaacagatgccattttatatatccttgatacctaggaatttggtttcttcttgaaggacttggggatgtatgcttttaatcagttttcttcaggccctgtttcctacttgtgaaccctgatacaagaaggggaaaggttttaaaaaggaggcatccagtcctatggaggcctctgtggaatctttgataggctctgctaagaagtgggagcaagggagagcagctttactattttgattctacataataggcagtcttaatcaacttcattgttccctttaaattttttaaaattcagtactgaacatgtatatgtttacatgtaggtacagacatatatgtgtttgcatacaccacacatgcatatcaagtttttccctctagctttaattacttttaagggacagggatagagacctgtctgtgacttgatttgactatcacatggaatttatgagtgccaccaatctttgcactttatttccatgtgtgtatgttattcagctgataataggaaattttttagtaagttcagattagggtttttttttttttcgtggaatccttttacgtgaaatgtgaaatagcatattttaaatgccttaaaatgtttttcttcttcagtattttaaggacttttctttattttcttcccagataaaacaataaaattatggaaaatcagtgaaagggacaaaagaccagaagggtataacttgaaagaggaggatggaaggtatagagatcctactacagttactacactacgagtaagtacataagaaaaaaatgtcacagatagtgcttgtattcatattatatagcccaaatcctgagcagagcttgaataggaataattacagtctatctcccctttcccagtaattctgtaatcaggtaggacattgagtaactcatttaaacatagaaactgacctacatagaggtctcactttggccagggacagaagcaggactcaagcacaagacagtatttcacgccatcagacttcatctctggtttgtcatgttagctatcacaaggtcaagtttcaagataaattttctttggaaatcaaaaaagtagatacagatcaaatcttctagttgtagctaaaaaataccaagaattagatgttatgggttaattttctttttagcctctttaatctgaaccataaacatttattagcttggcatgtctttcaagcaaaatattgaaactaagaactgcaaattctaatagtattgcaaccagtaaaagaagatatattatccacattgttcattttttcttcagcactcgaaaggatcaacatcagttgctttttaaaactaaatctatgtaatattgttctattttatgttctcaaaaactgaaataatgaagttttctgaatcttaattgctatttgaaactgagccttttgtaatttctgtttttcatgtgtcttattgacaggtgccagtctttaggcctatggatctaatggttgaggccagtccacgaagaatatttgccaatgctcatacatatcacatcaactcaatttctattaatagtgattatgaaacatatttatctgcagatgatttgcggattaatctttggcatctggaaattacagacaggagttttagtatccatttggttttctttggtgtttggtgaagaaggcatgttgtgcccatattagatttatttcatctctcctaatgaatttggttgctttttatagtctgtgtacatatatgtatggcaccttatttttttcttt

SEQ ID NO: 40204 - DNA, 2300 bp, Homo sapien
atttagaaggtaccttctcatttctgtcatttctccttaagtagctccttaaaaagagatggtgaaatatagacacttccttttttcctttgagttacaacaaatactttggaacttttgtttgtaattaatattaatgttgaaatatgtcatatttctcagactttttaaatatgagatttctagtttatccttttttgacatattagtaaatacagaattatataattcaaaaaacaggcacagctttgttagcttttgacattgtataatatgatactatcaaatttttaataatatatgcccagaataaccatataatttatcaccaaaccaaggcatggttacgctatgcatacatgtgcatttataatggaaaatataggcttcagttaaatttatgcccagaaaatggtatttaagaaagaaataggcacagtttcagtgttgttatcagtagttaatggactgaaagccaagaatagtgatattcagatattgctataatgttcttttattagtctcttaactgtgccattttcaagtgtttttggcctgaatgttttattcaggcttataaaggctatgtgtgccatgcccagaatggagttttcctttgtcataccagtaggaaaatgtacctccctgaagggcttgtgtgttttgtaaaaggacaaaatgcctttattgttactgagaagattgagattaataggtttaaaaggtgtgtgtatgtgtctgtatatgccctttttttctttttaaagatatggacttgttaaatcattttcctaatttcagtgcagtatatttgtatttttcccccaggtgcatgaatacctcagaagtaaactctgttcactgtatgaaaatgactgcatatttgacaaatttgaatgttgttggaatggatctgacaggtaattaagtcaaacctctcaaatatgaattttattaaagaaaagaaacaactatttcattccaggtcctaacttcgtctctagggattccttgaaataaatttagtaattttagatatagcacagcagtactggtagataaaaaattaaagcattgtatttcactagtaaatataaaagtacacaaattctaggtaatctaaattatttaaatgtctagaattttttttcttttatgaaccagatcacatttctgacatgctaaccattaaaacggtgaagcttcagcttggttgttattcttccattaaactgttgcagaaacattcaggcggcagataactcatttggattgttagaaacaccaggttttccagatgctacattaacacctcatagaagtggtctttcatatgtatgttatgtatgatgttaaccataatatatatggttaaaattttagtagtagttatcctttgctttttataatttccagttttgccgtagtgtaattcctttttcgtattcatttttagtaaaatgttacccattatttaaagataaaataagtcttactttgagtcttttagttgtctatttgccactatgttccagtagaacagaaagtagtaaaacataattttggaattaaactgacatttaaagtaatcagagatacttcaacaacagttttatcacagagcttaatatgattccgatttcatggtgttgtgtgttacagaggataatagaacttatagaatgttttctttcatctggcttttaaaattatctgatttttgacataaggactagtaaacctagagttctgttaatagcaaacattgcctttgagtgctactactaaacctgaggcatcaagaagaaagaaggaaagggaagaagaaaaaaaagattaacaaatttgaagagtaaagagatactgaaataaggtgtggcgcacagctacaaccagtttttcattgtatttaagcagataattagcagttttatgttctattatcagaaaaaaacgatttgttttccttaatattaaaaatttttttttaactatttcaaacttagagaaaatttgttagaataacacaaagaactcttggctggccttgacccaggttcccctgtcgctgtttgctgtatcacgtgttctattctctgtttatttatagctatatttgtccacataggtacgtgcgcatgtgctcacatgcaacttgtgtgccacatgggaatttattccatttacgccagatgtgatgcccataaccctaaattcttgaatgagtatttcctgacaaaaacactttccaacatagtgacagtgcagcatccaaagcaacattcacagcgatgcagtac

SEQ ID NO: 40205 - DNA, 2300 bp, Homo sapien
agacatcttggctgcagttgcattgctatctctcaacatggtatacatgaaattttacaatactacatccactttattcttgtgttttgcatttatattcttgatatcagtcacgatatatgtgtatgaagtcttttgcagaagcttatcatggcaacagagaagttcaaagaagagttctagcaggcttgatggattgatgagattcttatttctcagcaagatcaaagctttgcaaaatgtcattcgaagatctggatccaatacagtatgattacaggacagaagatctttcaccacttgaggaaaattacttagataccctgggtagcagtaactaatctataacaaagcaaaggctcttctgaagtttctctctttctctcctattattcagatgcacatatttaggacgttctgtgccataaacaccaccagctctgctagttctttaccgggtttatatggttgcaatttgaaaatctccacattggatgtgtagtgattatactgctgtagaaactcctagatggagggtggtgggtctcgcttcatcagattctgtaactgcagtcaggttgctgggcagcttgttgttgtttctgctggacattctggctgaagactggcttcgcggcgagcagttttaataaaactcagatggccagcagccgccaatccctaccagctgcggcttgaactcctgcttccgggtatgaccggaaacagcactcaatctattaatagagttcatttctgaccaaaatcttaaaagaatttgcaaagggatttgacaaatcaatccttaaaaaaaaccttttagcatggactttttcaaatatattaaaaaattagaggaatactttaatgtattacatagcttcaataattaccaacacaaggtcaatcttggacaagtccatttttaagttcatctgaagagtaactagccattaacatctgaaaaagacaaaggaagagaaactttaatagttatctaacagaggtattgcagatagccctgaaacagactcacatttttgtggtcattcagagagtgacaaaggtgcaatttcaaatcagtgtagaaaggatggcttaaaattaatattattaggtcaatgggctacaaaattgggaagaattgaagttaaataatttacagcatatggaaaataaatttcagatggattagagctctaaatgtaaagttaagcctataagaaaattagaaaaagttataagggaattatagattagtaatcttggtgtgactgtctccccaagccatgtaagaatgataaatctgattacatgaaaaccttaagcttctacagagtgaaaaaaacaaattaaaagacaagttagagactgcgagaaacatatgtcactcataaatcagaccaaggagactggacgaagacatggagatgtgaagtaggaggtgtgctcaggaacatagtttaatgtcatccacgtacaggataaacggcttcccacgtcatgtcccagaaatcgattagtcgatgggatttgggtgagtactttcttctctctgttttcctgaatttttcttttttctttcttcccctttcttctttctctttttttcagaatgatggtgtgtttgtaatcgacattttaaaaattctgtaacaattaaatttgggggcggccttcccttgtttcccgtatggagtgttgatgtttcagcagctttatttggagtttacacgtggaggcacctgggtttggggattcctttgtgtccccaagacacctattgcagaagtgagtcctaagaggtagaaaacagatgcgtgcgcagggctgggtgaagcactgtggagcctgtgtgagaggaggcacgggcgcgaacacaggagcgcacttcctcattccgtttctcctcatcctctctcccactgccactggcatcactcatcccatccggtcatcccaagtcacacgcaagagttcgttcccggcgcgcgcgtcagcctgactcgagcgtctccacgtccggggcccgcaggggagcgcccctgccccgtccggtcgcttgttgtgttgtcatcacgtggcctgggcgggccctgacgtcaggggcaggggagggacggcgcaggcgcagaaaagggggcggcggactcggcttgttgtgttgctgcctgagtgccggagacggtcctgctgctgccgcagtcctgccagctgtccgacaatgtcgtcccacctagtcgagccgccgccgcccctgcacaacaacaacaacaactgcgaggaaaatgagcagtctc

SEQ ID NO: 40206 - DNA, 2300 bp, Homo sapien
atcccagcactttgggaggcccaggcgggcggatgacgtgaggtcaggagtttgagaccagcctggccaacatggtgagagaccaacaaccccctctctactgaaaatacaaaaattagcctagcttggtgtcgggcgcctgtaatcccagctacatggcgaaacttcgtctctactaaaaatacaaaaattagctgggcgggtggcaggcacctgtagtcccagctactcgggaggctgaggcagaagaatcgcttgaacctgggaggcggaggttgtagacagagcgagactctacctcaaaaaaaaaaaaaaaaaaaaaaaaatgtcctcaaaagagcagtagacaggctgaacatgagaacctctgctttgctcccagccggttgtgaacttggacaaggccatttactctagacctgtttctctacaggcaaacaacaggaggcagttagctagctctgaagtttcttcccattctaaaatctaagacagtatgctaaacatgggcaaataacttaaaattgcataggaatatgtgatacaagtaacgtttaaagactcatacattcatcctaatttactgtgggaaataatataaccatcttacattctggaatatatgacacttaaaggttttgggaattaacccatcaaaacctggagcagcagcatccatcttaaaatctccaaactccatcgctacctggtgagggctgaaactctcttccctaaaataatcttcaggccacactggaagcacctccctcttacgaaagatactgcatgacctttaagcatccaagtggttttgaaaagacttcatctggccatatgctcactgctcccattacctctttcccaagagttgaattaaagaaaggttaggcaagaacccttccaagaaggctcccggttctcacgactaggaacaatctgaggacaagatgtctgggcagcggaatgttatgaaaagaccctggcctgggttgtctatcagcctcgtccgttaactttcaactgcccgagtgcgtttttaattccgtttctttaaatgcatggccccagactccctgacgtgtgcaatcttgggtggttcaggaggctgctctcagctttactgggcgcacaacccatcgctttaaaaaaaaaaaaatcacttgggcaacttcgagaaatctaataaaaaaataaaaaaggaaaaaggagaagcaaggcacagcctctcaccccacacgtgactgaagccaaccctagacgagcaaatgaattttcctgacaaacgtgtggcaacaaaggaatgctcgctggggggctcccgcgcccgccagacgctgcccgcccgcgagccccgcacacctgatccccgacacgtcccgcggcagccgcccgccccgccccgctcccgcgcgtccatcccccggcgtccccgccgcacgtccccatcccggcccacgtcccctccgcggcccgctccgcccacccggcctccccgccccccaggcccgcccccgccccgccccgcccggctccgctgctggggaccaccccccgcaccagggggatccgcgctacccgcgccgctcccggaccgcgagcccaaacggccccgggcccaagaccccaggaggcaacagagaggcccggagcaaggcaggcgcccctcctcttgacaggggacgggagctgtcagtcacctggacatcccatgcctgagccaatgagctgccttctcctcccgcctcccgcgccgcgccggtggcggcggccggggctgctcctcctcccccatccccttcacagagcctcggccccgcactcactgttgaggccggccggcgggggcagagactgctcattttcctcgcagttgttgttgttgttgtgcaggggcggcggcggctcgactaggtgggacgacattgtcggacagctggcaggactgcggcagcagcaggaccgtctccggcactcaggcagcaacacaacaagccgagtccgccgcccccttttctgcgcctgcgccgtccctcccctgcccctgacgtcagggcccgcccaggccacgtgatgacaacacaacaagcgaccggacggggcaggggcgctcccctgcgggccccggacgtggagacgctcgagtcaggctgacgcgcgcgccgggaacgaactcttgcgtgtgacttgggatgaccggatgggatgagtgatgccagtggcagtgggagagaggatgaggagaaacggaatgaggaagtgcgctcctgtgttcgcgcccgtgcctcctctcacacaggctc

SEQ ID NO: 40207 - DNA, 2300 bp, Homo sapien
cttcgaggtagatacagttattatctctattttatagatgagaaaactgaggcacaaagaggttaagtaccctgtgcgagggtaacagctataactgagagtgggagcctggcttcagtctcagcccctgaccacactataccagtgtatcccaagtacaaattgtccgccttaagtagaaatgctttcagttatgattcagggtgtggaggccacagcagagatcacttttactaagcttttctaggtatgtctctttcaggttccaaaagtatatattggattatgattgcttatgtgtttttaatgaagaaaataggatccagacattgatttgaaagtccttcaaaaaagtaaaaaccaggttgggagcagtggctcatacctgtaagcccagcactttgggaggctgaggtgggaggattgctgaagcccaggagtttgagaccaacctgggcaatgtagggagaccctgtctctactaaataaataaataaataaataaataaataaataagtcgggcatggtggcatgtgccctgtagtcccagcttcttgggaggctgaggtgggaggattgcttgggcccaggaatcaaggccgcagtgagctgtgattgtgccactgtactacagcctgggtgacaatgcaagactgtctcaaaagaaaaacaaaagtaaggaccagaaaacctgatattgtttgttacacccttttttctcttcgattgcctacttcaagtgaatattaattgtattttagggaagactgacttccacagagacctatctggaactcctggttccttacctctgcttctgtcagagcagctctgggttttggtttgttactattgtacacattaggcttctatacaagaagaactggtcccattggtttaaaaataagtttgaaaatcctagaaacagtgagagtcagaaaaaaaaactgtttttatatacatattctctcccccaccccctttctctccagttgaaatatgttgcagagctctaaatttagggatgcttttggcgtatttcttatacactccagaggcactcgagataaattatcttcaatgttagatctctcttagctttgctagttgtatttgttaatccattttgagttctctagcctgtgtccattttatgtgtgtatagaatgaggccatggagatgttgtacaactgtgtcgtttggcagcagagtcctaaggaattggtggtgactatgggatggtggtagccactggggctgcctcaaatggaaaggaaagggttctaagtatttataaaagaaaattctagtgtataactgagcatcttctatttaccagcacttgatactactaaatcgtcacagcaccccggtgttattattatctctgtttacaaatgaggaagctgaagctcaggtcacacaggtagacaggaagtgatggggtcagattcccagctaggtctgccttggagctttccttcttgtgagggtgatgttcagttcactctggaactggtgtagccatcgccacatttagagtgcattttagagtttgagccagttttgatgattttacttcaacttactgatggaactccttgttcatccctggaactctctaacacttctgctgggagtttagagggatggccacaccaagctgcttgggtacattttctaaaacaaaatttattgtaagaaatggaaattatgaacaaaatataccactatctctttttgctgtgaagttaagtttattggctactgttaacaatttatttacttacttacttactattcttttgtagagacagggtcttgccatgttccccaggctggtgtcaaactcctggattcaagcaatcctggtgcctcagcctcccaaagtgctgggattacatgtgtgagccactgtacctggcctcaactcttgttaaaattaaagcaccttaatacgtttagcaaactcatcagaccaataaatattttcaagatgtatgcagaattaccagtggcacatcccctttttctgtggctccaccccttcaactttttgtccaagaaaacttttcgtgtttgcctgtagctgatgtgcagttgtttctgctcccaaatcaacagggtttaatgaaaaccctagaaagtagaaacccgtgggagagaaaagaaaaaagacaagttcacaaggtatgtttagtgtataaaaaaggagaaggactagaaagcctgagatacaaaggaaatgaagaaactaatcagtgagatagagataaagcttttttctgaatttttagc

SEQ ID NO: 40208 - DNA, 2300 bp, Homo sapien
gactcttcctcccagtgtgacctgcagtgttaccttcaaataaaaacatggcaagaaacacccttgatatacaatagggccatggatggaaatatctggatacggtagaaatagaagaaccttgtattttctcacataaagggggtcacaggacaagctggaaaagaagccagactttgaggtggaagactcccactggaattgctggatcatttaactaaatacccaaccttggctatgcgccccaagctctctaaatctgtttcctaacctggaaagcagtgctgataaggcacgcatctcacagtggggctgtgagtaggaaatgatgtaattcagttggaagcgcttttttcaaatgctttattcaaatgcaaagcacatctgccgctaagtccaaaatgccccctccggttctctcagcccctccactcctatattcttcttccccagtctgtttctcatccggagacgcctttccacctatcaagatgggctgatcttcaaattgcgactgattgtccagcagatgtaactatattcaccaaactatctctcacaattggactgtgggggtggttggtaaccgcatttaatcctgggctgacaatgggactggatccctggttacacggccctacgcggtggccctgcggtaaacggcctctcagcccaaacccaccctggttactgagcatgcccagaactccctcccgggccaccaaaggaggggcaccatttctgcaggattttgccactgtggaaagagaggcggagctgtcatcgcgcagaggcagggactgatacgcggaaaggacgtggagatgggaataagcaatgaaggaccagcattgaccgtgttaggcacacaaatctaattgccccctggttacttaccaacccggtggccgtggctcagctactgcacacacacaccaagttcctacacacctttcccctgcttggccccacacaattcatggcactcacagcccacatcctacctcctactccgcaccagatgcgcacccgcacttactccccaaacacgtggcatctggtaacccgggaaacgctgcgactgtggcgcagtgcgcaacaggggcgggggaaccaggcggggctctggggcgcaggggaaagctggagatttgggaagggggtttcagtttgttttttctctctttttttttttttttttttttttttggtggaggaagcagaataaaccaaatcgcgacacgttcctgcgcccttcttggcgcagtggcgcagacacggtccatggcgccttgcgcaatagagtcggtctgcaccccgtctttaagtcgtggccctgggctggaattcccgactgcactctttgctacacccccatagaccgcagacctgcgtctctctctatattcctctcccatctgctacgcccctctgaatttcttcccgccatgttgtgtgccccccccccactcccccgtcaccccaaccacaccaaagtggatgcacgaagcgggaaccttctcgtttcagtctctgctccctgcagcctgccaaggcgagtggacaaactgaagctggggtgtccagcgtcttggctgcccccctcctgtccaccctgcctgtgctatccttgctcatcttcagtgccatcccgcttcccacaccctgagtagcctggcgcccggcttgtccccttttcccatccatcagctcacacccagggtaacggggcgggacccctatccacagtgcgccctcgcccccggcccacctccgccatgcggcggggcagaggcgcctgggccaggcaggtggaggagaggggcactggggctgggggctgcgtcctccggtcctcactccgcgtgccctgcccgatacttacccaggcgcggagagcggtcagcgggccctccgctccgcatccattagctggtggtctggccgcttcacttccggagcgcggggctaggggcggtgccgccctcccctctctctctccttccctcccctccagccctcccctgagcaccgctcccctccccggcgccgcgccccgcccgcgcctccctcctcccagcgctgccgggaactggcagcctttcggctcccgcagccgcagcggacgccctcccagatccaactttgccgcttccccgagctcgcgctgtagccgcggggggcgtgggcagggaggggagaagcggggtcagggggagggaccgggagggtgggtcgccggctcgccagccctccttcctttctgtgcaccttgcggtgggcggcgaacggcagccgcg

SEQ ID NO: 40209 - DNA, 2300 bp, Homo sapien
cttcttccccagtctgtttctcatccggagacgcctttccacctatcaagatgggctgatcttcaaattgcgactgattgtccagcagatgtaactatattcaccaaactatctctcacaattggactgtgggggtggttggtaaccgcatttaatcctgggctgacaatgggactggatccctggttacacggccctacgcggtggccctgcggtaaacggcctctcagcccaaacccaccctggttactgagcatgcccagaactccctcccgggccaccaaaggaggggcaccatttctgcaggattttgccactgtggaaagagaggcggagctgtcatcgcgcagaggcagggactgatacgcggaaaggacgtggagatgggaataagcaatgaaggaccagcattgaccgtgttaggcacacaaatctaattgccccctggttacttaccaacccggtggccgtggctcagctactgcacacacacaccaagttcctacacacctttcccctgcttggccccacacaattcatggcactcacagcccacatcctacctcctactccgcaccagatgcgcacccgcacttactccccaaacacgtggcatctggtaacccgggaaacgctgcgactgtggcgcagtgcgcaacaggggcgggggaaccaggcggggctctggggcgcaggggaaagctggagatttgggaagggggtttcagtttgttttttctctctttttttttttttttttttttttttggtggaggaagcagaataaaccaaatcgcgacacgttcctgcgcccttcttggcgcagtggcgcagacacggtccatggcgccttgcgcaatagagtcggtctgcaccccgtctttaagtcgtggccctgggctggaattcccgactgcactctttgctacacccccatagaccgcagacctgcgtctctctctatattcctctcccatctgctacgcccctctgaatttcttcccgccatgttgtgtgccccccccccactcccccgtcaccccaaccacaccaaagtggatgcacgaagcgggaaccttctcgtttcagtctctgctccctgcagcctgccaaggcgagtggacaaactgaagctggggtgtccagcgtcttggctgcccccctcctgtccaccctgcctgtgctatccttgctcatcttcagtgccatcccgcttcccacaccctgagtagcctggcgcccggcttgtccccttttcccatccatcagctcacacccagggtaacggggcgggacccctatccacagtgcgccctcgcccccggcccacctccgccatgcggcggggcagaggcgcctgggccaggcaggtggaggagaggggcactggggctgggggctgcgtcctccggtcctcactccgcgtgccctgcccgatacttacccaggcgcggagagcggtcagcgggccctccgctccgcatccattagctggtggtctggccgcttcacttccggagcgcggggctaggggcggtgccgccctcccctctctctctccttccctcccctccagccctcccctgagcaccgctcccctccccggcgccgcgccccgcccgcgcctccctcctcccagcgctgccgggaactggcagcctttcggctcccgcagccgcagcggacgccctcccagatccaactttgccgcttccccgagctcgcgctgtagccgcggggggcgtgggcagggaggggagaagcggggtcagggggagggaccgggagggtgggtcgccggctcgccagccctccttcctttctgtgcaccttgcggtgggcggcgaacggcagccgcggcagcagctagggggcttgtgcacacagcgagggagacttagggactggcagacggacggacggacggcgaggaccctacccgagcccccgagccatggccgagagaaagcaatccgggaaggcggcagaggacgaagaggtccctgctttttttaaaaacctgggctccggcagccccaagccccggcagaaattctgtggcatgttctgcccggtggaagggtcctcggagaacaagaccatcgacttcgactcgctgtcggtgggccggggctcggggcaggtggtggctcagcagcgggacgtcgcccacttgggcccggacccgcagccgccgtactcgcggcagggccggcgcgccggcggagagccatctgttgaatcgggccggaaggtggagatccggagggcctcgggcaaagaagccctgcagaacatca

SEQ ID NO: 40210 - DNA, 2300 bp, Homo sapien
catgccccaaccatcatcaccaattctgaattgttctcaaaggctgtcactgtaagtacacaaatgtaaatgcttgtggaatccctcgctgaatatgtatagaccactcccaactactctggaagccctctgagaagaagaaacctcttgcactttctataactaaccttccctctgccctacaaggcaaggcgcacaataggtattcaatcaacaatcattcattgattgacttattatttttaccagcaggcatgggagagaaacggaaaacgtgttaaaacattttgcattgtaaattatcagttaagaaattaaggctgtggaaaagaattacactagtgtaaggatcactcagataaagaaagaattgtggtgtgagattattactgcgctgaaaatgctcactgttcatatttgtcagaaagtgacaaacattttctaaaatcaagcgtgaccaaattggcctttgtttcccccattaacacaataaaagggggtttagtcttcttcgacagtctatttcgagtgcgaggggttttcccccttttcttgtctttttgaccctttgaacataatccacttagttccccgcttcctaaagcgcctcccacatagcggtttggggagcgctctgtgaagccccggctgagacacttattggaactttgttccccacataggctatttaggagcgtctcggtttcctcgggtgactccacagccttcctggctcttctcacgctgcgagcaggagtcaagggcggtgcggtgctcggagggggtccggggggcgctgaccatggtcctggcctcggagctcgggacgtgagcgcagaaggcgcgggcggaggctgtagggagcggccgtccgaacccccgcccctcccgaccaccggggagccgcgggccttcacgcaaagcctccaccgcacgctctgagccgctcaaaaaaagggtggggcacccagccgcagctgcaatcggaagccgcccgggagggtttcagaagaatggaaccgcggccaaccccctcccagacgaccaccgcccgccccagcaggggatcagcccattccctatgcccacgccccacctctcaagctcaaggagacgcgggcagcctttgtgggcgcacggccgcccaccgcccagcccgagcctcgccgcaccctgcgcggagaaggggcgggtagggcggggtgcgcgtgcagatgcgggaggcgaggtccagggcggggcatgaaggcgggcgcgccgggctcaggggcgagggaggggcgatccccgcgccccgtcctccgtctccacccccaacccccacaccgacctggtcgttgatgttctgcagggcttctttgcccgaggccctccggatctccaccttccggcccgattcaacagatggctctccgccggcgcgccggccctgccgcgagtacggcggctgcgggtccgggcccaagtgggcgacgtcccgctgctgagccaccacctgccccgagccccggcccaccgacagcgagtcgaagtcgatggtcttgttctccgaggacccttccaccgggcagaacatgccacagaatttctgccggggcttggggctgccggagcccaggtttttaaaaaaagcagggacctcttcgtcctctgccgccttcccggattgctttctctcggccatggctcgggggctcgggtagggtcctcgccgtccgtccgtccgtctgccagtccctaagtctccctcgctgtgtgcacaagccccctagctgctgccgcggctgccgttcgccgcccaccgcaaggtgcacagaaaggaaggagggctggcgagccggcgacccaccctcccggtccctccccctgaccccgcttctcccctccctgcccacgccccccgcggctacagcgcgagctcggggaagcggcaaagttggatctgggagggcgtccgctgcggctgcgggagccgaaaggctgccagttcccggcagcgctgggaggagggaggcgcgggcggggcgcggcgccggggaggggagcggtgctcaggggagggctggaggggagggaaggagagagagaggggagggcggcaccgcccctagccccgcgctccggaagtgaagcggccagaccaccagctaatggatgcggagcggagggcccgctgaccgctctccgcgcctgggtaagtatcgggcagggcacgcggagtgaggaccggaggacgcagcccccagccccagtgcccctctcctccacctgcctggcccaggcgcctctgccccgccgca

SEQ ID NO: 40211 - DNA, 2300 bp, Homo sapien
aattataggttactttgttttaaattaatttgagtctctttatttactcccttgccaagtagtttttttgtgagctaataggacactcctctccactgccctgtcctccgcaaagctgggactgactgttggtttttcacaagtagagagaggccaagtagaaaggcgtattttaagctttctcagactcgtgactttaaccattaccggttgacagcaatacttgccgacatcatctcaccttgcttgcggcatatcagattgctggagggggaagtgcttcactttctctttcagatgcacagctaaattgaacttggatgaattaaccatcggtgaaactttgtgcgtgccctacggctactttctgggacttcagatttttagagatataggagtgaaaaggagaattttacaccttctctgagtctggaaggacagacattcccctaaagtggctaaggtggtgaagggcagaaagattggaagtcaggcccacagcagctcgaattattccgtatttatctagctaagctttgctgagcaggtgtgagccaattacatactctttcttcccccaccccccagcccatgattacgtagggattctatgtatccttcgacctcaagcagagaagcccgagcgctacgagggctggtccagatgttttagttattgtacctgccagggcaacctcccacgggggttggcctcggtagattcctgaggatcaactggatcagcgtttttctttcccacggaccctgaagttagagcatcccagcatggcttggacaggcaaagctaaggggtcccaggcctgctcaattgctaggaccacgaaggggccttgagtgccgtttgaagtgacaaggctctgcctgggcagtcaggacactcttgattttaactccgattcagtaggttttccccaagactcagtttccctttcctgtgggatataaactcttcctttcttgctcctccacagctcatctcctcctctccgccccacggtgcggtgtgggtcccatccactggcactgtaaaccctcaggaccccggggcgctgggatcgcagcagctgcccccgacagcgctgcaggcaccagcgaaatgcgctgcgcccccacgcacccctcagggagccgaggtgggcgtgactgtaaagcgggcgcacagagcgcagatcgcgccacatcggcctcggcgggctgcggctgctccccattcctccgccctactaagttcctcgcggccggaaggcacaaaaggatgtttcagggcggggtttcccataccccgcagccttccccggatgcctccttcccggctcggagttggaagggtttcctcagggctctcatttcctgcagcccggcgcctccacgcgggccagatcccgtctctgcagcctccccccggcccgcgcccattccccgcccccaggagccgggcccggacgctcccgggaagcagccgccctctccggggccgggcgtggccgggccctccccgccgggttcccgcccgccgccgttccagtcctcagccgcgccagggcgggggccaggcgagttcagcgccagcaacggcgggggaggagggcccgggagccctcccgggctgcgcggcgccggccggcggtgcagtcgcgcgctcgccgccagcgaagccattggctcggcgcagtcaccccacgcggggctgccgcggcggcctccgcggattggcgcgcaggcgggcagggaccggggcgcgcgcaggcgagtgcgtgcggccccgaagccccgccgtctcggggtgccgcccctccccccggccgcgacgaccacccctccattgtccccgcgtggcccaggccgcgcctggggccgccgccaaacccggtccccaccgccccggcccgaagaaagcgcgcgaaaggcgcgctcccagcgcgggcgctcgcgccgcctgccgcccccggccgttcactgccgcatttcgcgctctcgcgccgcgccccgccccaccggcctaaatttgcatatcccaggatcgcggccaatcgctgctcgtctctctcgaagcggatggcttttgcctgagaggaaagggagtggctggcggcgcatgcgccacggtggccgacttgaaccgaggcttttattgctgtagtttatttccacccccttccctcctgtttctctctctccttctctctctctctctctctctctcttttttttccgccctagctggggctgtgttggaggagaggaagaaagagagacagaggattgcattcatccgttac

SEQ ID NO: 40212 - DNA, 2300 bp, Homo sapien
aagctcatttaaagaagttatttactacaaatgactctacacacacacacgcgcgcgcgcgcgcgcacacacacacacacacacacacaaacctttttaaagaaacgctagaacccaaccccctctaggccagaggaaaacattacagctgtatacgcacttgtgcctgttgccgtagagtaatacggtagcagcaggagattacggtactagctgggctactgcctgagttacgtcagcgagagctgcaaagttccttgctattcttttctggtgtcggggagctgaatattaaaagggtgattgtggagttaccggttatctgcatttttttttcttttcttattttgactctttttaaaaaatgcaggtaaagtgacagcggttcaggagcttaaagacatcagtggtggaggggtgagtcagcgggtgcaaaaggacaaggatttggtgcctcggagacacggtcccctctccgcctccagagaagagcaggcaggcagctcccgggaccgaagccgggtccacatcccccgcgcgcgagctggtggctcagcagcggcgcttcaggtgagtgcgccggggccggcgtcccgcagggccgagtgggtgagggcagacctcccccgccgtctggtgagacggaacccccacttttcccagcgcctcccgctttttccaccaggttttataccggcccctctaccccacccccgattcccttacatcttctgcgaagttgccttctactgaacaagtgtctttttaaccctgtgtttatcaccctcgaggtaggaggaaaagggtttctgcagtggcacgtttttaataccacctgtgaggtctccaacttgcgattttaacaagagtctttgcccgaggtcccacctcagggcccaaccccagaaggcaaggtgggcacttcctcacgccgcgctgtcctgccgagtccctgcggtaggttcgcagttgtggaaacccaggtttcttacgcagatggtggcccccagcccagaaaatcgaaggcggcccctgcccgctggcatgccggcttaatgtttacgcctgcaaaatccgcagtgactgtcacttgcaaagctccctctgcagagggacgtcctccccaccccgtcccccgccagtcccgctacggctggcagctggagcccctcgggtggccaacagtgaggcttggaaaggcgtcgtggacagacctgggtcgctttctgtcttcgggtccctcccggcttcgctcgggacctggctctcaagccagcttggctggtggacagaccggtgcgctctgcacacccgagtgcgaattccaccggcgtgagagtgagcgtgctcgtggtcctggccctgaggtccctgggtcgcagctgttccctctcccaggccgccccctccaggtgactgcgaggcaacctgttctaacggaaaccgagtacatcctccagaattccccggctaggatccgtgcgacacactcgccagccgcagtcgcccctccggggcttcgaggattttaatttcgtggtacctgcgctcgaaatccagacttcgagcgctggagcctggggttttggggatttgtttttttgtttgtttttcgcttcggatcctgaactcgggcagaggtgactcagtagagtgcgctaggcaggttcccagtggtgggggcgcgagatgagctccgaagtcgcctccaccgctgccgggcgaagcagcttctggaccgcagaaccaacccggctcccaactggtgtcccccaacccgtcaagctcagcacagcctctttccctggggcgcctagctcaaagccgcctttctctttgcgctctttcaggtggacgcggtcaaacgatgccccgcagcctcctgggtctcagcacatattccacacctacgtcccctgacctgtgctcctagaagctggagagagcaggagccttcggtggggcagctcaaaatgtaggtaactgcgggccaggagcagcgcccaacctgtagcgctgcgctacccaaccatcggtccctgcctttgagcgtcgacggctgatcttttggtttgagggagagactggcgctggagttttgaattccgaatcatgtgcagaatgctgaatcttcccccagccaggacgaataagacagcgcggaaaagcagattctcgtaattctggaattgcatgttgcaaggagtctcctggatcttcgcacccagcttcgggtagggagggagtccgggtcccgggctaggccagcccggcaggtggagagggtccccggcagcccc

SEQ ID NO: 40213 - DNA, 2300 bp, Homo sapien
gtcatgtacattgtttccaagttttactactttatgtaagtctacaactataatgagatgccacaacttgctcatcagaatgggtaagacgaaaaagaatgatgatattaggtgctggatatcccaatcaccctgatttaagcattatacattgaatacatgtatcaaaatgtcacatgtacccccaaaacctgtgtaattatatcaatttatgagatgttttaaaagactgaaaatactaagtgttttttcaaggatgtagagcaataaaatttccttacatcattattgagagtgtaaatgaaaactccaactctggaaattgttagggtcagaaagtttaccccacagcccatcattttcattcctgaatatataacaaagggaaaatagtgcatacaaacatcaaaaagctaagttgtccattcagaaattccttcttggcatgtatgttttccaattctgagaaaaattagttgagaaagaggggaaaaagtattctaattttcttgcaaaaattaaagcttcacaattaacatagagacattagttgttggaaggaatatattgagtgaagtaggaagcaagaacagaaacagacaagaatggtagtcaaaggttaaggtcaatgtctcctgggccagtgcaggagcatgtaggtaggaaatggtcatgatctcatcaattagcagtgcttgtacttgtggccatgttcaagtctgtgttcatggcccagtctgcattcttgcaaataaaataaacattagcacatgtagattcatataatactttataaatcctgggaggatgtcccaagaaacaaaaaattttgagagcaaaagaaatcctaaattgtcaatattgacatgtgattctgtgtggcgctgttaacctttcaaggagatctaaacgttatttgaatactactgaataatgtttgctggcacttttcagtgtttgagtattggctataggcttcagttctaagtaaacattttaccaaaagagagacaaagagaagaagatgtgactgttatgaaatactccaacatggaatcagaaactgatctaaatctgaactagcaaagatgatagcactttcaataataaaatgaaaatcacagcaggcagaaaaaatattttcctcattttaaaaaaataagcttatatgaagcaacatgcaccccaacagccaaactaaagatgcttttgcttgcaatcaatgattcagccagtgtcatgatgaaaatgaaagaaattgcccacatctttgatatttctcataaaacaaagataaagattacctgatagaaaaatgaagactgaatgtttaaaatctttattttaaaaatagctttagaataattgtgatattatctttcaacctttaaaatgattattaagcattaattttgtgttaataatcccttcttttaatgttttctggtgtcaagttctttacattgtattgaaatacataatcttgtcataatatcttggtaggtaataataattaaccgtgcatgtattaaatacttttttaaaccaaaaaaaaagcatctggaactttcagtataaccctgttataaaacaagtgattgaatctttactatgtccattcattattagtttaaaatacaaataaaatgtaatgaaaaacacaacttatgatttcagaaattctgatttcttatttgcaagttccaaaattactaaagttaaggaatttggaagcactacaaaaagtcatataaaagaacagctctagctctattcataataaataaggctagaacaaccccttattaatatttcccctaaatgatagctctaattataaataaagcacatgtccttgtcagaaggtttcagtgaaatgaaaccaatcagtgatagacaaatcagcttaaacagctccacttgccctaaaaagaatgttcattatggatggagctggaggccattactcttagcaaatttatgcaggaagagaaaacccaaataccacatgttctaacttgtggttagacacaaagaggggaacactggggcctacttaaaggtgaagggtgagaggagggagagaaaaaaaaaaagaaaacaagttaaaaaaaaaaagaaaaaagaatgttcttgtataaaagccaatccagaaaaaggtcaaaatactttctcatttatcctttgcaagctgcacagtaactacttagtgtagagcttcttaccacttccagtttcagttgtcttggttctggaattgttgtttcatatgcacaatacaactctgcaatttttaaatt

SEQ ID NO: 40214 - DNA, 2300 bp, Homo sapien
acatatgaatattggggaacatgccaaagttctggagatggaaagctgtgatggctacacagcaatgcgtgtgcacttgaggccagtgagctatacacttcaaaatagtgaaaatggtgagcgttatgttggacatgttcagcctcaataaaattacccctccccggctgggcgtggtggctcatgcctataatcccagcactttgggaggctgaggcaggcagatcacgaggtcaggagttcaagtccagactgaccaatatggtgaaaccccatctctactaaaaatacaaaaattagccaggtgtggtggtgcgtgcctgtagttccagtgactcaggaggctgaggcgggagaatctcttgaattcgggaggtggaggttgcagtgagccgagatcacgccattgcactccaccctgggtgacagagcgagactctgtctcaaaaaaaaaagaaaaaaaattacccctccccaccaagaagaacacatgaggcaaggctggacggtggaatgtggggatgatggacacatcttggggggatttaatctggagaggtgttctggaggagggggtctcgctccacagctgcctggctcctctcctgcctcaccctgccctctccagctcactggctgagggcagcagcctgtgaaggttatgttagtggctccctcattccctgagggaactacagaagccaccatcgctgacccgtcaccccccctcaagattccaccatatggaaatgtaaactagtacagtcactatggaaaacagtgtgaaaaatttttaaagaactaaaagtaaatctaccatttgatccaccaatcctactcctgggtatctacccagagaaaaagaagttattgtacaaaaaagatacttgcacatgcatgcttatagcagcatgattcgcaattgcaaaaatatagaaccagcccaaatgcccaccaattaacaagtggataaagaaaatgtaatacacacacacacacacacacacacacacacacacacacacaccgtggaatactactcagccataaaaagcaatgaaataatggcatttgcagcaacctgggtggaattggagaccattattctaagtgaagtaactcaggaatggaaaaccaaacatcatatgttctcactcataagtgggagctaagctaggagggcgcgaaggcataagaatgatacaagggacttaggagacttgggggaaagagtgggaggagagtgagggataaaagactactcactggggacagcgtacactgctcgggtgatggtgcaccaaaatctcagaaatcaccactaaagaacttattcatgtaaccaaacaccacctgtttcccaaaaacttactgaaaattttaaaaaatccaccatatttgggaatcaccagtgtaatgaccagtccatcttcctacctgtggctccctctggaaggcccaggagggctggatgggaggggcagtgaggacccactagtgtcagcagagatgtggctgatacctttgcaaaggtggccagagggaagccttattctccagagactccagtgcagggccctcatcagctcccaatcctggggtttttgcagtccccgcaaccccccgccttctgagtcatcgttcaaacccaccagcccttctgacagagctggaaacaggcaccaagccctccaggaagctatttttagggttcatctgttcttttttatttcttctctggattccatattctctcacccccaaatttaaaggacctaaagatcctggaaatcattcattatacccccagctcgcaagctgtggcttctccccaaccttctctgtaccactccctctttctttcttcctctccgccctcacccctctggttctccagctccacaggcagcagagaaagcaggctctttgtctgacatcatctttcactccctggcctgctaagagttactcactcaggcaatccctgctccaccagaggagactgtccaattgccaagcaacccactgctggccaatcacagagcttggaggtgatgtcatggcaagagcgagcagtggtgctgatgttgagagaagcccagggtaccactaattgagggagtgaggaagagagcagctcgcttctaactggactgcacgtaagtagaaataaaatgcaactaatttgaggcttttcaggcaaaagaaaaaacaagacagcagctacagtggggagaagcgaggggcctagcacctattgtgtcacctttggttctactcaatcatttaaactttgtcag

SEQ ID NO: 40215 - DNA, 2300 bp, Homo sapien
aggcataagacaggttattctggagaggagtgagatctttaaaaaatgttcataaaattagtaattgactatgcacaatgaaatcatgtcattatgttccagagatgacatatgtactcgtatgtatgagattaaagatgatgacaaatactgactcatgtccactgtgaaggtgatcttaacttccagtagcagtggagctgtttgggttggacaaaaatgattgttagcgatgtgagatgctgggattacagcatctcccttccagatttcaaaacgaaaatgcagctgcttacactggcctgtgccactcactcctcctcccagccatgcctggagaacctgacaaatgccttcaggacctgctgaacaataagtactgaagtctgatggcccagggcagggggaagctccccttctctagggtgctgtttgtccttgtttgtgggtgtcacctgggtgggattctcctgccagggaataagctgaggaagatgggagattctggtttctatggatactggactagctgggatttgcataacagttcagagaacagacagtctgggaacaatgtggacccaggaggaacataaatgcacatggaaacgagttggagggtctgggcagccgggttgcatacagccccctactagggacacgaatccgtatcttcccctgctctctggataggcagcagtgtggagccctgaggatggagggaggtggtgtgtgagaagtgccccaaccagggtatggtacatacttggggctcaacaaatattggtgctttttactctctatcccctcttaagttggctataggcgtgcaaaacctcccttgtttacttaataaagcacctcatgtaggctctgttttaatccctactacctgagcactgtgtgagataggcttaaaaaagaggtcagggggcttgttcaaggtcacaggactaatcagtgacagagctgaacctcagaccctagtctcctggtgttactgtccctagatctcaaaacatctgggtttgcagcagtaaatgtggtataatccaggcagttcagttgatgaggggctgaactaagatgggggtgtgggggtaaggcagggggtgtggggagaagtgggcgattagaaatcctggaggaggtgggattaccaggcagactgtgtacagactggaccaggtgaagaaagggggctgccaggtttttggcctgaatgactggtgctggtcactgcggcgtggtgaggtcagtgccgtgtttgaggacattgggtggaagcacagggaaggccattagagagctcaaggccattagagagctctggagtccaggatctgcacgggagatacggagtcgtgtggcacgggcacattttagaggggggctgaagattcaggttaaagacttacgaggagtgaatagaggcagaattgcaaccaaaggaaggcggcgtaacagatgcaaatacaaatacgttgaacagtggtgtcaaaagaccccgaattcagatgtaagggggatggaaagtaacatattgactcgtttaagatggcatacagcctgcagcccccagcatggctttgcccagtaccagggaagacagaagcaaagacgaaaacaccgatgaccaacaaaaagtgatggatgaccagcctactggcagaaattggggaggatttcccctataaagcccatggagcctgagtttcagcagccacccagacacatggaaagcttctttgtcccttcctccctctcccctgtctacaccctgaggatcagatgccactgaggttccgatgttggacctttggggtccaaagaggtgatctgggtgctgcagagtcgtgctcctgggttactccttgcagcatgcccttttgctctctgagagctgggtctcagctgtaggaattaagggaggactcccactctggggctccaggaacatctgcagcatgtgacaggggcacttactgagcttgacatttgttgagtgaatgcctaaacaattgaatcaacccccagggagaaagtgaatttgggaaatgtgaaagggaaataaatcttggggcccccaaaccaccaagctaaagggaaaagtctagctgggaactgcttatggccaacctgcctcacactccattcaaagtcatccctctgctcacttagataaatgcgtatctgattgccttctttggagaggctagtcagaaactcaaaagaatgcagctgtttgtctctcatctacccgtgacctggaagccccctccctgcttgagttgtcccgc

SEQ ID NO: 40216 - DNA, 2300 bp, Homo sapien
atgacaggagtaacagggttactcattgagacatgcgtactgacagcatccttacattccccttcaattaaactttgtcaaatgcatttggagcggaacagacttccgtatttaaaaaggtattgcaaaaaaagaaggcagggccacagagggggccagaaaccaggcacaggggactcgggcagctcctcctctccagtccatgcagcttcgggccagctacccagtgttctcccaattggggctctgactcatgcattagcaggtgatgaaataaattcaatgtttcacattctgggtaatttttaaaagtaacagaggccaggcggagtggctcacgcctgtaatcccagtagtttgggaggcagaggagggcagatcacttgaggccaggagttccagaccagcctggccaacatggtgaaaccctgcctctactagaaattaaaaaaaaaaaaaaattagccaggcgtgttggtacatgcctgtaatctcagctactcgggaggctgaggcaccagaatcgcttgaacccaggaggcggaggttgcagtgagctaagagcacgccactgcactctaacctgggcgatagaggtctcaaaaaaaaaaaaaaacaaagggaagtaacagaaaatatcagagtgccatggacatgttcagaaaacttttgtttcaactgatacatatgttctgggtcacaagggaaaatgcattgcttcctatgggctaagattaaacgttttggaaaatgctgagttaggctaacccttatcttctattcatttttccttcctatatcaaagaattctccatgttagttttgccctgtaagttgctcctgggtttatgtatagtcactagaactctagatatggagatgctgctttataaaccagaataggccagccagccagggtcagagacctctcactcagataatacaaaccgcgggatcagcttggcaagtaggtgactggtttgggggaaatcttaagactccacacccctggccaggtctgtggctcctcctccacttctaaattgagtgtgccaagctacagggctcgtgggctgcacccacatccgtgccgcttaaagggacctgggccacacccggctggcacaaggggtgcatggcctgggcccttcagaagcaagtgtcgctgtcttgggaacatcatgtaacctcatctgtcactttccgttcgcattctcttctcccagcacgggcccctgggccgaccttgaagaagcagccagccctgagaacctgggtcggagaggtggggtcctgcatgctgggagcgagacgcgggcacactgggctctggcaggcaggaggggcgggagccgcagagccaagggattccgggttccagacccggctcggccgcctcgtgcaaatcgctgctcttacccgaaagtcgtgggcagtgtccttcaccggctgcacgcggtgcccctggtgtcgggggtcggcctggcaggagcagcacagcagctccttgtcctcgaggcagaagaggctgagctgtccgcggtgcaggcggcagacacgcgagaagcggtagctggtccagcgcgcgccctcggcctcctcgcgcagcagcttctccaccaggttgttgagggtgtggttggtgcgcaggtcggcgggtgacgcgcggtctttgcacactgggcaggtgggcgacacctgcacctcccagcagcggctcacgcacccgcggcagaagttgtggccgcagcgcagagtgactgcgtcgcggaaggggtcgtagcagacggcgcagagcaactcctccttgaaggagcgggaaggcccgggggacacgtcgggactccgctccatggcacgagcagccggctcgggcgcccggaacttttgctccggcccctcccacccgcccggctgccaacgcccgcgacccgagtgctgggaatcgcccagtcccttcccctggaacgctgagagacagcggcgctggccaatcgtgcgggggggatggcgagggggagggagggggcgctcggaggagccccacccacttccggtgtgcgcgggaaatcttgggagagcggggtgggccttctgcccgcagttcccgcctcctcaggtccgggcgggtccctggccggggtagcacggaagggtctcccaggcggcgtagtagggcttccgtgttactggaaacctacttccggctgcaaatgggaaaaggagcctctaccttaaccaatccccgggaacctcaggcccgcggatgggagaaaccagagatgccaacttcctgcttc

SEQ ID NO: 40217 - DNA, 2300 bp, Homo sapien
cttgctctgaaacttgcctcagttgctttttctgccttatgccctgtattagtccattttcacattgctataaagaactgccttagactgactgggtaatttataaaggaaagaggtttaattgactcacagttccgcatggctggcgaggcctcagaaaacttacaatcacagtggaaggtgaaggtgaagcaagacacctcctttgcaaggctgcaggaaggagaatgaacacaggaggaattaccaaacacttataaaaccatcagatctcgtgagaactcactcactatcaggagaacagcatggggggaaaaccacccctgtgattcaattacctccacctggtctctcccttgacacgtgggaattatggggattacaattcaagatgagatttggggtggggacacagccaaaccatatcatgcccctcagtctaattctttcttccaaggaggcaagaattgaggttgctgcagacccatacagattcactgctgttaactcagacaccttctacccctaacaggtatggggtaggaccctctctggaatcgggctcttatggcctacagtcaaacaaggtaggtcagataatttctttatggccagttattccacagaaaggcagagagaaagagtaatattttaaggtttcaagactggctttaggaaaaaggggttctggtttctatgacctgccttggggaaaaggaattctaatttctatggctatccttgggggactgagagataggagggcagagaaaaatttctgcttttgaggccattttggggtattgttttctgagtttcaacactaacaagtttgcatgccaaaatttcatgaatactgctaaaagatgaaactcctgggtcagagacaaaggataatactaacagcaataatagtagtcacagtattgtcattgggccagtttctgagccctaattcttgcaagactatgtgatgaaggctacagtaggttgcattacaggagaggggccccaagtttaggaaactcacatctcttataattgggaataagtctgccagatctttggagagacaagaattctgtcttccagggctattcaatgcagaaacatccttgaaaagatagttggaaaaaggcagtcagtgcctctgctctctcaagacatgcaggaacatgacacatgtgaattgtctcccaatagaaaaggaatgaaagtgcatcgtgtgaaaagtattctgcatctggaggctgtaaagtgatcaaactgaagcaggaatgaagatctgaaggaaccatccaggcctactgtacctggcaagaattgagcatgaactctagttatctcagctaaactttgcagaagtcctcaatttcactgttttaatgggcacttgcccattaaaacagtggttgtcatgagcactttccacatttatttcactttatcctcacacttcatggaaacagagctattacagccattgtactcatgagtaaatggactttgaaacatgatgacctgttcactttttcaaccacaggacaagaatcaggttttctcggagctcttctgccgccacccctctcttgtttctccttaccgcggcgggccagaagaagactggccaaaataagtaaacgactaatgcaagagtggcataggtcctcaaaaaggcgctgcaaacttaagtggtgattgcactcacggtgctttaagacccagccactacttcggaagcaggaagttggcatctctggtttctcccatccgcgggcctgaggttcccggggattggttaaggtagaggctccttttcccatttgcagccggaagtaggtttccagtaacacggaagccctactacgccgcctgggagacccttccgtgctaccccggccagggacccgcccggacctgaggaggcgggaactgcgggcagaaggcccaccccgctctcccaagatttcccgcgcacaccggaagtgggtggggctcctccgagcgccccctccctccccctcgccatcccccccgcacgattggccagcgccgctgtctctcagcgttccaggggaagggactgggcgattcccagcactcgggtcgcgggcgttggcagccgggcgggtgggaggggccggagcaaaagttccgggcgcccgagccggctgctcgtgccatggagcggagtcccgacgtgtcccccgggccttcccgctccttcaaggaggagttgctctgcgccgtctgctacgaccccttccgcgacgcagtcactctgcgctgcggccacaact

SEQ ID NO: 40218 - DNA, 2300 bp, Homo sapien
ccccaacacccccacaattagggcctcccacatggcacttggtcagcttgagatacagaagtagaagggaaatatttttcttctctaactggggtagatcattattgcaacttatgccatatggagagcatcgccatggatagtgtcttttagggatttccatggaatttgagggctcctgaggcatttctgatgggtttttttaaaaggcagtaacaggcagaaatgcatgaccttgtcacctgagttgcttgtacatgacactggacagaacctagggagacctgatggcggagttggccaccccagagagtttctcaatgtctttttcatttaaaaagctatgggtttatgattctgtgaggtagatttgggagattctttttttaaagtgctgaagaattcaacaacctctgaaaactcacctttcccagaattggtcccagcaagataagattgtagttcatttatgtggccacacaggggcagcacacacaaactctccttttcttaaacaggtcttgattgtctttgcttttagttcccactgccacctcctagtacagactctcaacaactcacccaggtatctaacttttgtgccactcagccttcatcacttcatttccaagcgcaagaatacggaggggacacccactgtcagatgccctctgaccatgtccttgccatgtagtcaattacctgcctcctcatccccacaccttccctgctaacttcagtgtacctctgtctgacttgcctctccatccctggccaagttctcccacctgaccaccttctgacctgctgaccgctgtgtagtcaccaagattacctccaaaatgctgagtgctgggaacgtgacaaatctgtgaatagcacaaatgggaaggggtgggggggctccagctgtcaaggctggcagtgcccatcaatgggttgtgagccccatgctgggcaggtgggccctagctgcagagagtctgatcttcatcggacccagagtgacatccagccaatagctatgggtagtccactaattatactttgagaaacattgacttcctagctttgttaacttatctaagtctccagtttcttttcagaaatgggaaggagtcagtgcaatcttggaaactgagtgcttcctcagcacaactccagggggcgccattctcagaaagtacattgtgaatagcatcctctagaattgtgcaacagggcagctctgggaatcagattccaatcctgcacaggacacagaataaagaagcttgggacaggggctctggagaggacattgtaggatgaggatgatgctgcgtacactccacttttttcactttatgccaagtccaggtcacttcctcctcctactcaggagcaagtctggagttttcctagggatagggaagaagtgttgctaagtgcccttgagtgcctgctcacatatcaccggcctgaggaaagaggggaccagcctctgggcggggcccctggaaggggctgtccagcatctctaactattcttgtgctgtcctcagaccctacttagtcacagctcagggacctggtcttctgtgttcagggacctggaccggttctgccaaaatccctagtggtatttatgatttttcatgcctgcaaagggactggggccactttaggacatggagagattaggacacaagtgctcagtaccatgtagatataacatctcccactgcggggggtcttgggagaaccagcctgagaagttggtttcctccgcccgccctgcgcccccacccacctcacacacaccttttggcctccaaaaggctgcaggtggagtggacagaggatggaggggtgttaggaattggggagttaactgctcacaaggggcacataacatccgaggatcccatttgcggccgggggaatggcagagatcgccccccaggtctgcccggcgctcagggaattggtggcagcgtctatttcagagtttatggtaagaggctggagccggcacacacagacaacacaccccaccctttaaggaagtggggaggagagcagcaggggtgtggttaacaactcagaggaggagggagaatctaacctgtcagcccttttactcagccacagcctccggagccgttgcacacctacctgcccggccgacttacctgtacttgccgccgtcccggctcacctggcggtgcccgaggagtagtcgctggagtccgcgcctccctgggtgagtccctcccgcgagccagggctgagcgctgcgcccggcagaagttggaggc

SEQ ID NO: 40219 - DNA, 2300 bp, Homo sapien
gtattgatggcatatattactagaagacagaaatatagataactaaggtcacccaggatcccacccctcgtccgcttgatggcacttggcaggaacttcagcccctcagcctggggctatcttggtctgtctacaccaggtgtaaactcacttccttgtgcttctgccacctctgtactgttgcgtcttgtttggccactttactccaggacacacaactcagccccttcaccaatgatgccaagaagtctcagaccatacagaacacttacaatttttcttggaggaaggaaggagggaggaagaagagtattagggagagaggccgggcatggtggctcatacctgtaatcccagcacttgggaggccaaggcgggtggatcacttgagatcaggagtttgaggccagcatggcaaaacctcgtctctactaaaaatataaaaattagccagacatggtggtgggcacctgtaatcccagctactcaggaggctgaggcaggagaatcgcttgaacccaggagccaaaggttgcactaagccaagatggcgccactgcactccagcctgggagacagtgagactctgtctcaaaaagggttagggagagggtcagatcatgggggcattcccattccactacttctttggcttcctccttgcttttatttctccctcttttcccagagcaatgaacaaattataccaccccagcttcctcgggcctcatcttctaactgcaatgatttagtgagcacatgtttctaaatagttttcttcttaggaggacttctgttaccatctcctcttcatcttttatacatttaaacacatgccacatccttggggcagagctgcccatgttgacatctgggccacagcgaggacctgcctatccctggggaatggtggggctgctctgagtgaggggcttagcagcctggaggacaacccctcttggagaatccccctgattcccctgtaaaggcaagctgagccaggagtggggtgtggatgattctgtttgtgaatcctgggaagtacttgccttccccagcctgcagatatgacatttggatgatgggacccagtaacctatttgtgcagacttctatgctgactttctgatcaaaggaggagatgagaggtaggcagcttctatgacacatgggtgattccaggcatggaaaacatacgaaacctataacattaatgggaaggcgagtcaggtgaaaatgtgtatatgtgccccagatccagtagctgccatggaggaaaccaggacctcatgatcctggaggccacagtgaggggttggggccatggtgaggaacttagaggagcaggagatgctcacaccactggctacaaagtgactgagcctgtctgagacaccagaccaaaggtgtccaaactccttgctccccaaaaaaagattcatgtctcacccctctgccagaagagctgtttctcctactcagatgttcctcattccctcttgcaattttgaagttaaggagaagctgattcagctacaagtctggttgctcaggactatggcatatgttacaggtagtttgccctctttgagctacagttttccatttgcagacagggaagagctcataaaagaggttatgtggattcatgttttcactctgttttcttaaaagtacttgctttctttgcggggtgctgtggctcatgcctgtaatcctagcacttgggaggctgaggtaggcagatcgtttgaaccaggagttcaagactagcctgggcaacatgacgagaccctgcctccacacaaaaaaaatacaaaatacgaaaattagcctggtgtgggggcacacgcctgtagtcccagctactcagggggctgaagtgggagaatttcttgagccctggaggttgaggctacagtgagccgtgattgtgcagctgcactccagcctgggcaacagagccagacactgtcttgaaagagaaataaaagttgctttctgctcttcatgctgctgtgagtgatggaggaagtgacgagcagtctcctttcatcacagaaaaatggaacatcacaaaggaccagaaatatccccattgaacaacaaattatttgagggaaaagtggggcagaccactaaaagtcatccagcccaaactcctcctcatggagaaaggtatcttttccttgagcacctgttgggaatgtttcgtcccaacacctcattccaattgttggataactcatggctggaaagttctttctttcactgagccaaactgtctgaagctcacgctc

SEQ ID NO: 40220 - DNA, 2300 bp, Homo sapien
tcatgccttgagtgtcttctttttaattcttttgagacggagtttcactcttgtcacccatgctggagtgcaatggtgcaatctcggctcactgcaacctccgcctcctgggttcaagtgattctcctgcctcagcctcccgagtagtacgtgccaccatgcctggctaatttttgtgtttttagtagagacaaggtttcaccatgttggccaggatggtctcaatctcttgacgttgtgatttgcccacctcggcctccctaagtgctgggattacagtcatgagccaacacattcggcctaaccttcctattttctaaagacaatgaactgtctaaaagtcattgcttttgaatcataagttacttccctcactctgcttatattattagttgcacaaaacttttaccagatatttataaggatgcccgaattaaaggaacactgaatgactttaatataagatcaggagtaggataatgtctgcaacagtcaatgaaattactagtcacagtggcccagacagggaagggaggctggcacatgtgagaacattagctatttggtctcagcttaagccacaattgcataaaagtatttatcaaggcatacatttttaggggaaatgagacttaaataatatgagtaaaatattaatagctgcctcctctggtaagactatgaataattttattttcttctgtaagtcctaaagtttgtatatgtacagtggtacctttaacaagtgtctaaatgaacacacaaacatacacacatataatatctcagagatagcaaataagtgaaaaggaaatcacaagagccccccaggacctgcaggtgaaggtcagtgttcctaggctgatcattcaagcattggctgccttgggcctttgttcttagaggccacagatggagccaccatcttcctcctcagcccagtatctgcccattcctaaagtgagtttcctaggatgcaaggctggagtcttttcttggaatgacatttgtggggtttccttttcctcacaggtcaaaatactaaattttatgactctcctaacttcctttctcctgatgattcccacgtatggcaggggaagggggcttctggtggcatgaggtgccctgggtctgactgcctcattctccagccttcagcctccctctccaccacctatttctccaggcggttcttcaaggatatgccccacaatgcacttgacaagaagtccaacttcgagctcctagagtaagttctgggatcacccatctcccctcccttcctgtccttccatgtgtacttttcctcctcaccctctcctccacccctccccagaccagagccacatagggccgtctctaggtcccaaagccctctcacctcttcctgattggcccgcagtcctgtggtgggggtgagggggagtcacatgctgcctttttcttccttcttgcagaaaggaagtggggctggacttgtttttcccaaagcagatgcaggagaacttaaaggtgaggaaaccaatgggcgaggacctcttcgtgctgattcccgagactagagtgtaagggatgaggctggggctggggatactcagagaagccagggtatctgcgcggcctcgggcatttggacacaggaccactaaatgtacccaggggtcctctctggggctggggatccaactgttacatgcctgggctccggctccgtatcgaggccgtatcagctctgcggccccagtactgggaagctacccctcgccccctcaacctccttcgtagggttacggggagtctcccttgagacaatgggtatgggttttaggtcatagatcacagctgcttttggggcaaaggccctggggatcattttcgagcagtgggcagtctctcagcgagaccctaagggaaggagtgagacctgggaggagcaggcattgctcacacggcccatcccctcccccagcccaaacagttccggaagatgatccagcagaccttccagcagtacgcctcgctcagggaggaggagtgcgtcatgaagttcttcaacactctcgccggcttcgccaacatcgaccaggagacctaccgctgtgaactcattgtaatggcgggctctcttgatcctctccctgacctggattccaggcctctcggaaaagggggccaggagggggcagggagaggctgcaatcgctgcagattctcactcaggcagcaggacctcgctgacctgccgtcggtggaagtcaaaagcatccccttgcctgaagcaggcactgaaatgttgg

SEQ ID NO: 40221 - DNA, 2300 bp, Homo sapien
cctggttttcccggggaaacctcataaaggctcggggccaggcttcccacattgtgccctccacctcctgacactccctggtgctgctctgtgtggccctgcgggaatgtgccacccctcctgtttctagggatctgtgagtataaactccttcctttatgacagtcacttctgtgtctgcatgtcttaccaaacctgattaaaacaaattctgggtgaaaattttaggacaattagatgtaaacattttttttcaaagtgtgatgatggaaagtcgagtgtgcactgatgttaggagccaaagagctagatttcgtgtggcggggaggggggtgctttccagcattgaaacaactttcaaatatttcaggaatgtcccccctcttgaagtgggcagagcccaccttccacatagaagctcaaaaccccagattcctgcttccttggccttcctggcatctggtttgggagcacatgctttaatcagatgcatctgtttcgacctttgtatgcagagctagtgacacaaaggagcagggctggaggagaattaactgtggcagcggtggcagcagcagggatggctgcttccagggacagcggtgacagcggcacccatgacggtgccaggttcacatgcagctctgtagcagcaggacccaccatgctggccgcggggcagaggcttccctcttctccctgctctccaagcagcccctccagatttctaggtgcttctgtgaaccacccgttgttcctcaataaaaccattctccacttaaagtaattggtaggtttttattgcttgcaaccaagaatcctgatggatacaagctgtgattttcttttcttttctttcctttcctttcctttcttttcttttttcttatttcttccctccttcccttccttccttccttcagtctccaaatgaaaaatgtatacatctaactttatatatatgtaaatatggtaaaatattaacatttattaattatgaatagtggaaatatgagtgtttatggttttttggtattttatgtcttttaattctctcaaaagatgattctagcaatcgcatgcacatgtgtacacacaatgcacgtgtgtgtttgtgtttatttgtgctaattgactcctcatagtaaacctatgaggcaggagccattgttcacatcctctttttacatctgaggaaactgaggcataggaagctgaagaggcctgtccaggattatgcagctgttcaagagcagagctagaaattcagcctcagcagtctgtggccgggtcatgtccagggcctttgcttttaacaaaataagggagatgagctagcaagtagcttgagggaaaggccgaaagcagagtgtttttagggtggaggatgagcttctttaggggctgaagggaaggaacgagtggggcagagagggaggatctgagaaagcccaggctgttaatagatggggtgatgtcaagatcacagtgggccaggattcgccatgcacaggaggagacaggagtactcatctgatactagagaaaaggaggcttcaccggaaaatcaaaggcaaggtcacctgcaaggaggctgacggggtgacagagaagcagccacaccgggtggccgcgcaagtgaccggtggtcctctagggtggtggggggaggggtctcacaggggaggagggcaaggagagaaccgtgggctggctggcagctctgtccttactccaatttttccgatgctatttactgacttagaaggtaaatacattccaaggttcttcaagttctttacagctgggcttgttccaaggctggaatttgtgaagtggattcacatacagtgaagctgtattgacagacagacccaggacccaggacccagaacctgtgggtgcactcaggggccccaggcagtgatcctggagcccaggggtccagagagcagggaagggagcatcgtggtgactggacagagctgcatctgtccccaccggacataggctggagagtcacaggctcctcctccttcccctccagagaggctgtgtgtgtgtgtgtgtgtgtgtatgtgtgtgtgtgtgtgagagagagagagaacagcgtgagcctgtgtgcttgtgtgctgagccctcatcccctcctggggccaggcttgggtttcacctgcagaatcgcttgtgctgggctgcctgggctgtcctcagtggcacctgcatgaagccgttctggctgccagagctggacagccccaggaaaacccacctctctgcagagcttgcccagctgtccc

SEQ ID NO: 40222 - DNA, 2300 bp, Homo sapien
caggccaccgctagaaacacgaacatatggtttggctgggagccaaggatctggaagcaactccgtggtctcgggactgagccactgagtcaatggggatgccagtttgtaagatagggaacacactaggaggaacaggcgtgggaagtagaaatgcagagagagttctgttttagccatgataaatttgagatgcctgttagacactcaagagaagatgttcagtaagaagttggatattgacgttgagtaagatgttgagtaagaagttggcaagtctggagcccaaaggaaactctaagttggagatttaatttctttcttttttttttttggaggtagagtcttgctgtgtcacccaggctggatggagtgcagtggcacaatcatggctcactgcagcctccacttcctgggctaaagtgatcgtcccacctcagcctcctgaatagcagagactactggcatgcaccaccatgcctagctaatattttatttttattttttatagagagaatgtcttgctttgttgcccaggcttgtctcaaactcctggcctcaagcaattctcccacctcagccccaaagtgctgggattacaggtgtgtgccaccatgcccaatctggagatttaacaggtttcatactatataggtcaggctgcaattttctttctattttttaaaattcaattatacctttgagatcaactaacttcatgagaaactagcttgctgtactcccttctctgcctatctttcagtcttcaaatccagagtaatccagtttctaccataaagggcccacaaaaagtgttctgaaacatccggtgtcatccaagtccaaaattggacagcttttttttcagttcttcctgtaacatttggcagtgttggccactctctgcttctttggcaagaatctcagaaaacactaataactgctccaggcaggagcctggaagaggttaccaagctagagaaggaagcaacagcatagcttgctaagggcaaacagcccagaggaaacccacggctctggtcaatcctgttgttgattgctagatccagagactgttgtagacctcccagttacagtgaggtatctgacaacccctcacaaggttcttgaagctccgtggtggagggtatcttggataaatccacagagacacattcaagagtaaattctccactgttggagacctcactcactctgtttggtctccaccaaagacacggtttttaattcatggagctgcactacaacagctcaagaactcccagccaaagttttagtttttctaggaacataaacgagccaatagtgtggaaatcggtgattaaaaacaaacctcgcacattttaagacagaattattacaagtagcatgtacaaaaggaaaataatagcctacatttagttcttctaagcttcattccacaagagattgaaatcgaagtattctgggctggcacacgatagctggaacatcatattttattctagaaacacatttgccttggcaaagaagagcgtgcctagaggagtggtcaggatagtgagggatctgtgatccttcgttctgaatctagaaaagtcactggatatgcccctcccccgccccccaacacggtcttatgttctgaatgtagaagtcactggatgtgctgacacacacacacacacacacacacacacacacacacacacacacacacacacacagagtctgtggcctctttcccaggcattccaagtccagcaagttcgcagggagctgtcagtccgtccaggaaggcccgggcctgggtttgcctcttcaagcagctactgcaggggcgtggggagggggcataagagactttggactttcctttgagacagtagaaagcgttacatccagaggcgagattctagcctggggtccccgccttcccggcctcctcttcctctccctctgactccctttcctgtgcccctccccctgcctctttcccggccagagtccagccttaacccgggcagagggcggagtcccgttaagggggtgtggggaggaggcggggccagggcaggggcggggcagagccgggccaagctgggcgggtcatgcgccctggccttcgcgcatctcccaggttagctgcgtgtccgggtgctaggctgcagacccgccgccatgacgctgcgcgcggccgtcttcgaccttgacggggtgctggcgctgccagcggtgttcggcgtcctcggccgcacggaggaggccctggcgctgcccaggtaagggggcccagcgcc

SEQ ID NO: 40223 - DNA, 2300 bp, Homo sapien
ctttcctgcttacagcttctcaataccccggcccctctgccgacctcttgcaatccaagtgacatgagccatgggtacgtgacagtaaaggtgagtcagttttgtctctcagtcggctaagtgctctcccaccaggtcacctaaaacgaccagcagagacacccaagaggctgagctgtgaggatcacctgaacctgagcctgggaagtggaggttgcagtgagctgtgatcacaccactgtgctccagcctgggcaacggagtgaaaccctgtctcaagaaaaaaaaaaaaaaaaaaggaccagcagtgacatttgttaaatatcgagggtggttgaacatccactatttataaggaaatgttatttcccacaaatctcattcctcagaaatcagtgaaagacagaccctgtctcggattctataaagcagtgtgactgatgtggccaaacccccatagaacagcaggctagggagcttgggcagcctgggaggctaaagcatgcacacagctggcctgtgttggaggagagcatgttttcattcaacaggcatttatcgaacacttcctctgtgtcaggcacaggccagatacaaggggtgcagtgacgatcaagacagacctgtcctcaaggagcccacattgagggcaaagagagggaaaggtcattaaaatgttctttttgttttaaagggttatcataaagccaaggccacacacagagggccctggctcgtggcctggctgagacatctaacttggcttgctgacacagagcaggggtttagtacgtcctcatggattcactttgggatctttcctcatttgtcattggcctcatttaaatatgaaaggatctaaagcagtgggtccactcatcagcaaaaaaggccagacagctactgtgcaggcagataaacccagctggaatcttggttttgccacttaactgacattgcagccttggacaagcatcttatcccggtgagcatcagtatccacaacttcataatgaaatgacaataatatctctccatgccatttctgtgagaattaaatgaaatgttgtatgcagaccatggggcatagtatccaacagccacgtactccataaacagcagctgacaaacaggagaactggaggctatggctgtgctgaccttggagaccttggggacccttgctgtcctggaggagaaccttcagagagaaattctgagatgaatggagggtcttccatggtcccagggattttacactcacaacctcggtggtttggttacagcaaggatgaggtgcctgctcagaatgggatctgtgctcagaatgggttctgccagggtggaggcagccaccacaaatgtaaagtgggcatccaggcacgagtgggtttgcatagtaagaaaaggcttttctgggacttaaagctactgctcagcgccactgacatcccttctataactctgggttctcctgaaggggtgagtgtttaatcagggccttctggtctcatctctctggtggtaaagaggagtgaggggcttttcgcccagggctgggggctggattgtaaccgtggacagggttattctcataattcccttagggtttgcatatccagccagtttcaagagattatttatttgaccttgaaggagtgtgatcagaatcactttaccccaccttgtctttcccccaccccatatttaagagctggcagtgaatttctggggagtcccagctgcgccaggctctcagggggctgttgtattgattgccactgaatcctaaactgggttgataatagatctttctgtgttctggctttatggacatttttcttaacacagaaaaaaaatgagatgggaaaggacatgcgtttgctgggctactcagctgagtcaatatgaagctgtgagcctcagtatccacagcttcatgatgagatgataaagctcaagagtgagctgtttagttgggatctgtgctagaacacaggcgaactaggatcgtttttgatcagacataagtgtgaaacatttctcagtgtaaggtagatcaaatttaatgtcaacttttgccaagtgctgaaggaaagactatggaacaaactctgataaacactgtagtctgtgagagggtctgccagatgcccacctaatgttttcttgagcaaaatagcttgttgggaattatgaataaaactttctgtggggccaggtgtggtggctcatgcctgtaatcccagcactttgggaggccaaggcaggaggatcacttaatgccaggagttcgagac

SEQ ID NO: 40224 - DNA, 2300 bp, Homo sapien
ttgatactgtgagtggatcctatgaaatcagttaaaaggccttaaaatcaaaaatctaggttttcaggagaagatgaaattctgcctcaaggccacagcactaactcagcctgagtttccagtctttggggctgccctacggatttcgggcttgcaagattataatcgtgagctaattcctagaaataactctcttaatagaaatatatattggttctgtttctctgaagaaccctgactgatacataagaaaagaaatggattggtgaagttaataaaaacaaaagcacagcaggctttgaaaatcatcaagtccaaatcacctggttgttctgcatatgaggaaaccaaggctcagagaagtgatgaaacttgtccagtgtcacacagcaagttaggaaaggcggtgtcttcacacttctccatcaaagagtgcctggtagccgtgtgttttctatagcttatattttaatttctaaacgtctatgaattttgcattctattccattatataattgtgttttccatttttaagtagtgttttattttccaaatcgttttccctaacatttctgctctaggaaggagtgccacgcctgttccgcggacttctgaccccgcacaccaacccgatggaagtagtgaagacagtagggacgcacagcacagtgactgaagcctgaaaccctgaggctcagtaaaacttcaattcctagaagcctaaggcaatcgaatgttctcgaaatagaccttccagaatcaatgcaattttcggttcagcttttagatgcgtataagatactctttctttgctgtgggatttttctggtgcttgagatcttctttcccgagcgttctccttgcagagatcttttgatatggagcggcgtgcacgcagcccctaggttgggcgctgaggggcatcgctgatgcgatccacgtgcctccccgtcctcaggccgcttcctttcctggtttccaggtcctcgtttctcccagcgctgccctccccatctaagcccaagtcgccgtgagcccgcgctgcccccttgtggccaaagccctccccagctcaggaaacgggaacgcttggcggccaggctgagagtcggtgcgcgtgacccggcttctgctcgcagcatccaagaagttgcaataacgtggaaggatggggaacggcgcctccctggctagcgtgaaactcagccacagcacaaaattgaggctgttggccgtgagcggctctcaaagctgaatttgaggtaagaagtcgcctgccaacagggcatgcgcaaatctcaccatgtagagtgagtggctttccggcagcttctcccctccaggcggccacctggccccacactcctcaggtgcagggccgaggaagggaggggtccagctgagctctgagcgtcccaggggatacagcacctgaccaccactcagaaagcccccccaaaaatacaaagacagagaattgaagacagatgccacctcacttgactagtggggattgggtggggatagcccaacatcggcagagccaacctggccacctacatgggagggtccccggggtaagatgtggctttgtgacctaaggaaggcgggtaggtcgggctgacgggggagaggggccagtgaagcccccatccctagggacacagttcagctgaaggaatctcactctgggccttcacagggttagcatcctgtcggcccctgcgcggggccgggggggcggggattcaggtggcccctggtggcagctgtcttaacccaggcgaggcacacaggaggacaccaagccctggtctccaacctcaaccctgcacagcctgctagtcccacgctaaagtgattgaggaatggcacagagacgggagcgaacccccagggaggcaccaggcgagttgccggaaaggaagagttcgctacaggacagacaggtggtttcaaactggaagggatgtctccgagtcccctgcgagaaagatcttatccttaggtctgcggttactagttacgttacgttacgttacgttacgttacgttacgttacgttacgttacgttactttttgagaacaagtctcactctgttgccgaggctggagtgctttggtgtgaccctggctcactgcaacctccgcctcccggattcaagcagttctcctgcctcagcctcccaagcagccgggatcacaggcgcccgccaccatgctcagctaacttttgtatttttagtacagacggggtttcaccatgttggtcagtctggtctcgaattcctgacctcaa

SEQ ID NO: 40225 - DNA, 2300 bp, Homo sapien
cagtcacggttctagaacattccttggatcagcagcatccatatcacctgcagactggctggaaaagcagtctcagaaccaacattataaccagccctgcagtgattcataagtactttaaaaagtggtcaatcatttcagcaaagcagagccacacagtccgggggaccacaggtggcctctgtgtgcttgtctcggttttcctgcccctctccagacatgttgattagacactgccaatgcccagcctcagacctcagtctaatttggaagtagtcagaatttactatgattacataagaccctcgtgtttacagaacacattcccctctctgaggtctggattagatccattttacagatgaagaaactgaggctcagatatttaagtgacttggaatcaaggaaagaatactggactaggggtcgggagggctgggctctcatcccagggttaccatgagcatgctgtggactctagggagtcccatgccctctctgggcttcagcctcaccgctagggtagagaggttgggtgagagaacgacctccttcccaggtctgagctggatggttcaccagggaccccaggctccctggagcagactctgtgcccgctgctgagtctggaattcctttcctgtatcttgcctttggctgccccattcttcatggcccagcaccctgtcttctggtcagaacctagttctgaatgggtttttccagaagttgttgctttcaggggcccctggcagagaggtgtttctggctggctttgtctctctggcatgacaaaggctctgttcctgctggaggcatttcagggctcagtgggcagctggggcagagcccgtgagaccacagccttcctggtgagcccggtctccgccccctaccccatctctggggaaggcgctgaccccatctcttctcccacgctgctccctggctctttgcgcctgattacttctcatgagaggcactccttgttaatgtgctactgagtgtccagatgggcctgctgggctgagcgggctttggatgtgaaccatttcaggaaggggaaccccatcgtcctgttggttctgtgatggcaaatgggtgagctcagataagcagttcttgggaggggcatggtgggggtggagtgcagggggaggggtttctgttttatgcaacagcctcagcttctgggaaagggtccattgtgtaagaccggggctatggcctgtgccccgtggctcagggcagccagcccagtggtggcaggaacactggcagggcagcctgctgtcggcttagaggggatgggcagtgtggagggcctggcagagcaagaggactcatccttccaaagggactttctctgggaagcctgctcctcgggccactgcgaaccctctctactctccgaagggaattgtccttcctggcttccactacttccacccctgaatgcacaggcagcccggcccaagtctcccactagggatgcagatggattcggtgtgaagggctggctgctgttgcctccggctcttgaaagtcaagttcaggtggtgctgagactccctgggggctgcagcgctgtggtgaatggggagcgtctgctggggtgaaggtttaggtgcacattgcagaggacgtggctggtctctgggatgcagtccctctgtggaggtggcatggggagggacggatgcatgacctaaggggggtattttcagtgtctgacatgatcgataccactctggacaaggaggccaggatgcagaaagcctgtgtgcctcgctgattgtcggggaggatgtggcttggacaagagcctggttcctccgatgccagggttcttgtttcttccactcaacattgctgtcctgcagtccctccctccctgcacctcctgccttcgctttcattcgaggtgtccatggcaagtctggtcatttccccccatttcctcaggaataaaagtgcagcagtgcctgctgtggggacagctgagggcagtgaggccctggggagctgctgcaggcagcaggtgggcgggacgccagcaggctgtctagctgttcccatgatggtctcctgttctctgcagaggcgtgcaaagactccagaattggaggcatgatgaagactctgctgctgtttgtggggctgctgctgacctgggagagtgggcaggtcctgggggaccagacggtctcagacaatgagctccagggtgagtagaccaagcatgatgttcctctggccacagggtgatgaggtcagagggcagggtagctaattctgct

SEQ ID NO: 40226 - DNA, 2300 bp, Homo sapien
taggagccggggctttgggattgaaaccctcaccatctgtgtgccctcttcactgtcttcccatcctccccacggctccctgttcacagtcattgattttctttctttcttttctctctttttttttttttttcctgagaccaagtctcactctgttgcccaggctggagtagagtagcgccatctcggctcactgcaacctccgccatccgggttcaagcagttctcatgcctcagcctctgagtagctgggactacaggcgcatgctgctacatccggctaatttttgtatttttagtagagacatggtttcaccaccttggccaggctggtctcgaactcctgatctcaagtaatccgcctgtcttggcctcccaaagtgctggggtgacaggtgtgaatcaatgcgccctgccaggtcattgattttcttaagcctccagccctgccctgcttggaaacgttttgggaagctgctcagttcaaagttcccaggagggtgtgcctggaggggagttgctcccaaagtctgcctgctccccccgccccccctgccccccaccccccgccatcttctcctcctcctcttcccctgagcagcccctttgtccacagaaccggccttttctggtagaaggagcaaggccaagtggtttaagccttcttagggagaatgaggctgtgtggtagtgctggggactcgagggccttggccttggcatggctcttccacccagggcagctggcagccaggctcccaggaggcagaggagatgaggggggaggtgagtccgagcaaaggaaaggaggtcggctgtgcagtcacggttctagaacattccttggatcagcagcatccatatcacctgcagactggctggaaaagcagtctcagaaccaacattataaccagccctgcagtgattcataagtactttaaaaagtggtcaatcatttcagcaaagcagagccacacagtccgggggaccacaggtggcctctgtgtgcttgtctcggttttcctgcccctctccagacatgttgattagacactgccaatgcccagcctcagacctcagtctaatttggaagtagtcagaatttactatgattacataagaccctcgtgtttacagaacacattcccctctctgaggtctggattagatccattttacagatgaagaaactgaggctcagatatttaagtgacttggaatcaaggaaagaatactggactaggggtcgggagggctgggctctcatcccagggttaccatgagcatgctgtggactctagggagtcccatgccctctctgggcttcagcctcaccgctagggtagagaggttgggtgagagaacgacctccttcccaggtctgagctggatggttcaccagggaccccaggctccctggagcagactctgtgcccgctgctgagtctggaattcctttcctgtatcttgcctttggctgccccattcttcatggcccagcaccctgtcttctggtcagaacctagttctgaatgggtttttccagaagttgttgctttcaggggcccctggcagagaggtgtttctggctggctttgtctctctggcatgacaaaggctctgttcctgctggaggcatttcagggctcagtgggcagctggggcagagcccgtgagaccacagccttcctggtgagcccggtctccgccccctaccccatctctggggaaggcgctgaccccatctcttctcccacgctgctccctggctctttgcgcctgattacttctcatgagaggcactccttgttaatgtgctactgagtgtccagatgggcctgctgggctgagcgggctttggatgtgaaccatttcaggaaggggaaccccatcgtcctgttggttctgtgatggcaaatgggtgagctcagataagcagttcttgggaggggcatggtgggggtggagtgcagggggaggggtttctgttttatgcaacagcctcagcttctgggaaagggtccattgtgtaagaccggggctatggcctgtgccccgtggctcagggcagccagcccagtggtggcaggaacactggcagggcagcctgctgtcggcttagaggggatgggcagtgtggagggcctggcagagcaagaggactcatccttccaaagggactttctctgggaagcctgctcctcgggccactgcgaaccctctctactctccgaagggaattgtccttcctggcttccactacttccacccctgaatgcacaggcagcccggcccaagtc

SEQ ID NO: 40227 - DNA, 2300 bp, Homo sapien
atggtaaaataaacttaggtccgtgagtaagtggagtattacatagccataaaagtatgcccttaaagaatatttgaagatggtgaatgtgaagaatcttgtataaactgcatggaagacagaaggaaatataccacagtgctaacctttgcctctgggtgatatgaattaccggtgattatttttcttattttccttttggtttagttttctccatttgaagaagcagataggagccggggctttgggattgaaaccctcaccatctgtgtgccctcttcactgtcttcccatcctccccacggctccctgttcacagtcattgattttctttctttcttttctctctttttttttttttttcctgagaccaagtctcactctgttgcccaggctggagtagagtagcgccatctcggctcactgcaacctccgccatccgggttcaagcagttctcatgcctcagcctctgagtagctgggactacaggcgcatgctgctacatccggctaatttttgtatttttagtagagacatggtttcaccaccttggccaggctggtctcgaactcctgatctcaagtaatccgcctgtcttggcctcccaaagtgctggggtgacaggtgtgaatcaatgcgccctgccaggtcattgattttcttaagcctccagccctgccctgcttggaaacgttttgggaagctgctcagttcaaagttcccaggagggtgtgcctggaggggagttgctcccaaagtctgcctgctccccccgccccccctgccccccaccccccgccatcttctcctcctcctcttcccctgagcagcccctttgtccacagaaccggccttttctggtagaaggagcaaggccaagtggtttaagccttcttagggagaatgaggctgtgtggtagtgctggggactcgagggccttggccttggcatggctcttccacccagggcagctggcagccaggctcccaggaggcagaggagatgaggggggaggtgagtccgagcaaaggaaaggaggtcggctgtgcagtcacggttctagaacattccttggatcagcagcatccatatcacctgcagactggctggaaaagcagtctcagaaccaacattataaccagccctgcagtgattcataagtactttaaaaagtggtcaatcatttcagcaaagcagagccacacagtccgggggaccacaggtggcctctgtgtgcttgtctcggttttcctgcccctctccagacatgttgattagacactgccaatgcccagcctcagacctcagtctaatttggaagtagtcagaatttactatgattacataagaccctcgtgtttacagaacacattcccctctctgaggtctggattagatccattttacagatgaagaaactgaggctcagatatttaagtgacttggaatcaaggaaagaatactggactaggggtcgggagggctgggctctcatcccagggttaccatgagcatgctgtggactctagggagtcccatgccctctctgggcttcagcctcaccgctagggtagagaggttgggtgagagaacgacctccttcccaggtctgagctggatggttcaccagggaccccaggctccctggagcagactctgtgcccgctgctgagtctggaattcctttcctgtatcttgcctttggctgccccattcttcatggcccagcaccctgtcttctggtcagaacctagttctgaatgggtttttccagaagttgttgctttcaggggcccctggcagagaggtgtttctggctggctttgtctctctggcatgacaaaggctctgttcctgctggaggcatttcagggctcagtgggcagctggggcagagcccgtgagaccacagccttcctggtgagcccggtctccgccccctaccccatctctggggaaggcgctgaccccatctcttctcccacgctgctccctggctctttgcgcctgattacttctcatgagaggcactccttgttaatgtgctactgagtgtccagatgggcctgctgggctgagcgggctttggatgtgaaccatttcaggaaggggaaccccatcgtcctgttggttctgtgatggcaaatgggtgagctcagataagcagttcttgggaggggcatggtgggggtggagtgcagggggaggggtttctgttttatgcaacagcctcagcttctgggaaagggtccattgtgtaagaccggggctatggcctgtgccccgtggctcagggca

SEQ ID NO: 40228 - DNA, 2300 bp, Homo sapien
gggcactatgggagagataggctggattttctctgtgtggctccagagggcagaactgggctccggattggcccatacacgagccagactgtgactcaaccaaagaaggccctaactttatcaacagctttactagacaaatggttgcatggcaggtagtgagctccctgttattggtggcattcaaacatgggcaggatgaccaccgggtgcagatgctggggatggggtaggaatcaagcagtgtgtgagtcctgaaccaatcaacgtctatgatctgcttagaatatgaaacatctggtgatgcatttatggcgctttcaaaatttacacttttctttcctcaaagtttgaccttctgaaccttgtttgcttagtagtgggaataatcaagtaattattcccaagggatcacagtcatgactgtgaatctgtgaatcatgctattttctcccaagtcctttcttcctctcttcccttcccctaattcagctggctaaggcggatctcactgactgacctccaaagtctaatttttaaaaatataactagatttatgccttctgttccggatgctgagggagctacagaacagaaaagttacaaggagcgagctcaaaaacaattcttctaacctcaggtattgataaggagcaggcactgataaggagcaggcactgtccacagaaaatgtagctgttactgataattagacattttttttttttaagaaaaataaagtgtagcctcttctgggacatttttttcttcttctgggttaatggccttctaatacttggcttggctctaggttaggttgcagggagccgtggagatgatccattcccgattcctcatcgtccagatggaagaaactgaggcccaagggcaaagtgattagtccgaggtcacccagtgtctaggggcacacctaggactgtaatcagactttcatggacctggtctgggttctcccacttagtcatgggccttgaagattccccgaggctgcctcctgaaaaggactggggtcctagtggcccctggacgttgggcaagcaagggactgggcctccatgttgtgcctccatagtcctgatcctgaactggaaaactcagcccctgaccacgcagctctcctttaagcccctttgtttcacatggttttcaaagtctgccacccacagtggggctgcctgtacccgccctgtccacccattgccccagctgtcagccccttgacttctctcctggggcttaaacatccctggctccaaaatgggcagctcactttcttccccaagaagtagctgcacctccagggttcctagatttgcccctccttgccagggggaggggtggctgcgacaggagattctccctgctctcagcagaaggaactccagcagttggagaccagcaaacccctctggacacagatctgatttcctaactgggaaggctcagggcaaaataaaaattcaggtccactggttcaaaaactatgaagaatttcaagaccgtcacagtagcccattaaaccaaacgtggatctgcaagggtcccacagccatgaagcccaccctgcttggttgggttccaaaaagatggggacagtgattgcttaagctctgtggatcaaggaccccggagaggccttctggctctccacatatctgctctgatcactcctaaacacaattctgtttcctccaggcctggcgggtcagtccagggacccccatcagtgtgatgtttccaggagtaggcgtttcaatacttcctgtgctctcttctccagcacaaggcccctctccatcccaccctcattatgtctgactctttactatttaaatgggtcaagagaagtggcgcttgtgtaatgtgaaggttaaggtcagtagggccagggaactgtgagattgtgtcttggactgggacagacagccgggctaaccgcgtgagaggggctcccagatgggcacgcgagttcaggctcttccctactggaagcgccgagcggccgcacctcagggtctctcctggagccagcacagctattcgtggtgatgatgcgccccccggcgcccccagcccggtgctgcaccggcccccacctcccggcttccagaaagctccccttgctttccgcggcattctttgggcgtgagtcatgcaggtttgcagccagccccaaagggggtgtgtgcgcgagcagagcgctataaatacggcgcctcccagtgcccacaacgcggcgtcgccaggaggagcgcgcgggcacagggtgccgctgaccg

SEQ ID NO: 40229 - DNA, 2300 bp, Homo sapien
aaaatggagattagagagaacacagcatcacccttgctgatctgatgggatctacagacaggggtggctgtccttgtcctcttctctactccaggcttaggagacactttctcttcccctcgggtctcacctactttacttcagcattaaatagggcttggggatggggagatggtgctgactgtggcatcagaagagaccaggctggcctgtgccactttgtggtcccgtttctccctgcacttttcttctcataacattcatcccacttctgcactgctgcttgtttaattactggctttcctaaccagactggccatgtgacatgttcctcacacttctggagcttggggcagagcctggtcccttgtagcgaaaccattttggtatagtctggctgccctgtttgcttttggttgcttgcttgctttttgtttttctggtgagttttttttgtttttgtttttgtttttgttttcttttttccatgaagctgaaggctacaccactgaacactgaaacttaaccttcattcactactttataggtaacattcataggccaccatggtaatgatctcttcagttgttttttaggaacttgggctagctcctgtccatctcaaactggtgagaccattggcccttcaactgggcaagtgccccaagaggtgggctttcaatgtcggagagccaaaaaactccacccttggatcatgctaaccctgccattttctgcatatatgtcctatgaaataccattagctcagactacattggcatggaatgaacctgtttcttcatttgtccccactgccaattgcctttccccatggcttagaccactctacttccctaacccataaatatccttaagcctgatcttctgggaggtggatttgagagctgttctcccacctcctctcttggtgcccttgccaataagtcttttttctcttttctaaaacccgtgtcacctgattgattacctgcaggggcagcttgcagggtgggcagattggacagcggacctagacctggccggcagctgggagctcggtaaatgtttgttcaatcaatgaaaaatgacacgtgagaatcctgagtggcgcttatgaccagtctcaactccctgcctgcattcactttccttggctgtcactgtttaccccagagacccctccaccaacaaaatcacagaatttgatggccaggtgcagtggctcaggcctataatcccagcactttgggaggctgaggtgggtggaccacctgaggtcgggagttccagaccagcctccccaacatttttagtctctactaaaaatacaaaaaaaaattaccggacgggatggtgcatacctgtaatcccagctactcgggaggctgaggcaggagaatcatttgaacccaggaggcggaggttgcagtgagcggagattgcaccactgcactccagcttagatggctagagcctcaaaaaaataaaaatgaaaaataaatcacagaatgtggcgcactccaggcccaattctctcatgtagaaagaagaggcttggagatgagaactggatgcccaaagtcactcagctcgccaggggcagagccagggtgctcacagggtggccaaccttccacgtctgccctggacacgggactttcagtactaaaatgtgcggacgtccttctcccggacgtccttctcccaggccctcgacatcataagatgggcgagaaaaacgtgcagggctaaaatctggggtccccacccctgccccagccacttggcggtcccgatagtgaaatggactaagatcaaggagctctcccggtgagcccccccattgcggccgcagcgcgggcagggaggacgccgcgggagcccgggttcgaggctgggctgtggggctgcgggggcgcacgggcgaggtaggcggggcgcggggcccccgcggcggcacaaagaggccggccgcggcagttttgaaaataccaaggaagttgatctgggccggggcccaagaagtgacgaggagggagggaggcttgcgagcgagggaggaaaggagggagagggagaggagaaggcgggaaggagggagggaggaagggtgcgcggggcgaggggcggcggcagacctcgcggggccccagcgggaagcgcgggcggcggcgggatgcgcgctctgggcggcggggcgcggcgctaggcgcccggcggggcttccccaggctgcgaccccgcgggaccctccactcctcccgccgcctccgcagcccgcgcgccggagcatgagtccc

SEQ ID NO: 40230 - DNA, 2300 bp, Homo sapien
cagtggcatcgcccctccgcgccccccacgccatgacgaggggacgccgggggaaatcctgcagccgtgggagggacggatgtgctgggggaccgagaggccgcgggaagaggcactcgcatccagaaggcattttagagcgagggtcaggcgcagcggcggactgcgggtcccggcttcggagcccgctgtccagcagggtccaggaggacgtggcgcccactcaccgctgctgctggtgaagtagaacaccatgatcccgggagcggtgcggtgactccaccgcggagcagcagcgctcaactcacgaagctcaggataccagactcgcggcggccgcctggcccccggaactcctccgtgcacttccggcggacgtcggggcgcgtcataacgccggccgtgggcgccatttttaatcctggcgaggcgaagtgtagtggcaaggagtttggttcagtgatttgtgggttaagggaaagaggctgggcatcttgggcacgttagttaacctgtctgtgcttcactttcctcagcagcgaaatgaagatgatactagagcagctaactcacaggatattttttagggttaaataagttaatgggcgccaagggtttagaacatagcacacaaacgagttgtttctgatactcaccaggacaatatgcctcttggggattggactttgttctggcttaaatcgaaggcctgccatcccaaacctctgaacctcagaggtcctcctgctataaagtaggaataatcatattcatgtaaagctcctacagcacttggctttgccctgattatttctcttgagaaagcacttttatctgaggaatgtgagtccctttaaattactaggtctggagaggcattaagataagaccccatcatgttctaccacccccttgagctatgtattcatctactgaaactacctgcttctgccacaggtagctacctactaacctaacactgccacacaagacactatgacatgacccacaccctatagtttaacaatgtctagccaatcactgatgcttgtagtttctatacatcaatgagaatgcttgacagttgtgtatcagcccacttcctgccccccttcttcgtctttaaaaacctgcttgtagcaaaggccagacagagctcatatccaagcctgctggtggagggcggtggggggaggggggttggaatcttctgggcagctgtccccgctttaactcaagcaaactctacattctttttttttttgcctcagccttttccttttaaactgacactcttacatcactgtcactgacttcattctatgaaattgagggcgtcacttaacgaaatttatttacatgcttgctttgacagcatgtatactaaaattggaatgatacagagaactttaacatggcccctgctcaaggatgacatacaaatttgtgaaaattaaatttgaaaaaataaacataaaactctaaacttatttgaaactaaaaatgtgccagaaacactgtaccaggagctggtgacacaaagatagtaacaatagctaacaataaccgttttaggaactttctggttttccaaagtaagaatttagctctgttctgtaaatagcaattgttttgggttctccgttgtattatttgtaaaatgggaatggcaatagatattaatgccttacagattgtggtaagaagtaaatgaaacaaaacatgtaaagcatctaagaatgcctggcacatagcaggtgttaagttttatattttaatttgaaaaataaatagaaacctaaagttactaataaaaaaagtgaaactgacaatgaagcttcaaatgtgaaaaataagtgcatcgagaatcttggagaggcctttatttatttatttatttatttatttttgagacggagtcttgctctgtcgccaggctggagaggccattttacaaaaatttcttaccccgtgaccccagaatgtatctcaacttcaactggaccgagaactacaattcccagaatgcacctaaacaaggccccgggaacggagtccggcgttgctgcaggggattgtgggtggcgtggtttccctcagagatttttcacctcaccagggcgcgagaatcttggaaacagccaccagggtgggcggggcaagggctggtgctccaccaatcaccgagccagcccctggaagcgctgagccgtggccaatcggaacgcagcggcttcctcctagcctggcgcgcgattatttgaagacgctcacggagcggctggctaggctgaggagag

SEQ ID NO: 40231 - DNA, 2300 bp, Homo sapien
agtggcttcttcggtctcgggcctgcggacctgccgagcgccgagcaaaagctctttccccgtgacattcgcccccacgttccacagggtctcccgctcgcctcagccttccacagccccccgcctcggcctactccagaggttacctgcgcctcagagcccggcgagctctcctcagcctagccagccgctccgtgagcgtcttcaaataatcgcgcgccaggctaggaggaagccgctgcgttccgattggccacggctcagcgcttccaggggctggctcggtgattggtggagcaccagcccttgccccgcccaccctggtggctgtttccaagattctcgcgccctggtgaggtgaaaaatctctgagggaaaccacgccacccacaatcccctgcagcaacgccggactccgttcccggggccttgtttaggtgcattctgggaattgtagttctcggtccagttgaagttgagatacattctggggtcacggggtaagaaatttttgtaaaatggcctctccagcctggcgacagagcaagactccgtctcaaaaataaataaataaataaataaataaaggcctctccaagattctcgatgcacttatttttcacatttgaagcttcattgtcagtttcactttttttattagtaactttaggtttctatttatttttcaaattaaaatataaaacttaacacctgctatgtgccaggcattcttagatgctttacatgttttgtttcatttacttcttaccacaatctgtaaggcattaatatctattgccattcccattttacaaataatacaacggagaacccaaaacaattgctatttacagaacagagctaaattcttactttggaaaaccagaaagttcctaaaacggttattgttagctattgttactatctttgtgtcaccagctcctggtacagtgtttctggcacatttttagtttcaaataagtttagagttttatgtttattttttcaaatttaattttcacaaatttgtatgtcatccttgagcaggggccatgttaaagttctctgtatcattccaattttagtatacatgctgtcaaagcaagcatgtaaataaatttcgttaagtgacgccctcaatttcatagaatgaagtcagtgacagtgatgtaagagtgtcagtttaaaaggaaaaggctgaggcaaaaaaaaaaagaatgtagagtttgcttgagttaaagcggggacagctgcccagaagattccaacccccctccccccaccgccctccaccagcaggcttggatatgagctctgtctggcctttgctacaagcaggtttttaaagacgaagaaggggggcaggaagtgggctgatacacaactgtcaagcattctcattgatgtatagaaactacaagcatcagtgattggctagacattgttaaactatagggtgtgggtcatgtcatagtgtcttgtgtggcagtgttaggttagtaggtagctacctgtggcagaagcaggtagtttcagtagatgaatacatagctcaagggggtggtagaacatgatggggtcttatcttaatgcctctccagacctagtaatttaaagggactcacattcctcagataaaagtgctttctcaagagaaataatcagggcaaagccaagtgctgtaggagctttacatgaatatgattattcctactttatagcaggaggacctctgaggttcagaggtttgggatggcaggccttcgatttaagccagaacaaagtccaatccccaagaggcatattgtcctggtgagtatcagaaacaactcgtttgtgtgctatgttctaaacccttggcgcccattaacttatttaaccctaaaaaatatcctgtgagttagctgctctagtatcatcttcatttcgctgctgaggaaagtgaagcacagacaggttaactaacgtgcccaagatgcccagcctctttcccttaacccacaaatcactgaaccaaactccttgccactacacttcgcctcgccaggattaaaaatggcgcccacggccggcgttatgacgcgccccgacgtccgccggaagtgcacggaggagttccgggggccaggcggccgccgcgagtctggtatcctgagcttcgtgagttgagcgctgctgctccgcggtggagtcaccgcaccgctcccgggatcatggtgttctacttcaccagcagcagcggtgagtgggcgccacgtcctcctggaccctgctggacagcgggctccgaagccgggacc

SEQ ID NO: 40232 - DNA, 2300 bp, Homo sapien
aacttcttacttttggtactagggttttttttttttttctttcttatttacttctactctttagggatttctactcctttggtccctggaaaaccaaggtcctttcattacaaggcaagggttacaaactcagtacctacagaaccagcaggctgggtggagactagggccagctgaagaattgcccacttaaaagggcatgtgctattccaagttcgaactcatagattctttgatggagtagaggtttagtgatcttacaatgtctcttaatattggaaatacacatttttaagtgaaatctctagattttaaaatattggtagctaatccaaagtttttaaataccatatgggccaaccaaaacatatctgctagctagatttggcctgaggggctccagtttgcaacctctataagtgaatctcaacattctttcataataggtaaaggttgtctcaactacagctatccagcctaaatatgtttttgttttttttttttccttaagaatttcacagtagtgagatgctgcttttggtatgaggaaaagcaaatttagaagcttcattgcccaggtgctgggtcataatatgatggtgactctgatttcctgtggatctgtgaagttcagtattatacttattttctccagtaccccaggaatttcttcatagctgtatggggtaaatattgtcctaagatttgataaagcaaaaaaatctttttttaaagggcaaagtcaatttccaaagtgtgcatctatgtgcatctgatattgtggaagaaagtccctaggacttggagtcagaggaccaggatttgagtgttaacactgccatttactagttactttaccttgagtaaattactgaccctctctgagtaggcctcaggtttctctttgttcctgtccttattacttcatcaagttaatgtcagatagaaagcactaaaaattgcaaggtactctgataaatggctgctttctttcccttgtaattcctccaaaattgtaaatttatatatatcaactttctgtgtcaagatctttaggtgaagaacagttttctgtgggatctgtcaacttcatgaaacagaccaatatccagaaaaatactaataccagagatacaagtaaaaaaacaaaagaccagctcatcatcgtgagtaaattccaaacaaagcttctcctatctagccctttgcagaaaagcttgccaacccctgtattagacagttcagaacttggtattttcaatgtcattaagcaatgttttatgtgacagaatgggagttgtaggtggtgacattgaatattcttgaatttatctgtgcttttcctgcactctattttttgtcaactcttgggtcaaataattttaatattgtttaaaataatttaatattcttagctgcttaaggaaaaatattgtataattaatatagaagtcctaaaatttttgccctccctgtttgaaataaggctttttcaggtctttaagggtttcattaaaaagttccgttgttcattttagctgtaatttccacaatttaatcttattctttcttagaaccatgagtctagtaaataatcttgtaaaaataaaaaaatctttggtttttacactgtccattcaaataattccctttcatcaatttattgcatttttaggtctcttgtctcttttttttccccccccaaagagatggagtctcaccatgtcgcccagactggtctctaactccttggctcaagtgatccacccacctcagcctcccaaagtgccgagattacaggcgtgagccactgtgcctggcctgatctcatttcattttgtcttgggggagggaaggaggatatggtaaccagattttcatttagtttttcacttgtgtcagcaggaaaaaaaaaattaggtgaaatttgaatgaatggttataggaacttaatttagagctatttgtgctatatttaaatgggtttctttttttaccccccaattataggacgctggtcagaaacattttggggctactgtgtgcaagtcttgtggtatgatatatactgcttccaaccctgaagatgaaatgcagcatgtacagcatcaccacaggtttctggaaggaatcaaatatgtggtgagccaaaacatagtctttcagtttgttctagaagtaaaactaaaagagacatttcttttccaccacctctaccacccagccggaaaagttaacttttaatgatgatgtttcaagcttactatctcaatttaagataaatattttgtaaacactgc

SEQ ID NO: 40233 - DNA, 2300 bp, Homo sapien
gtttcacctaggacctcattatatgctcattaacacactaaatcacacccaccagcgcaatgacagttctgggaacacccatatttggtgtaaaaacgagtggcaccacagttccaagaaatctccatctttttccaagaattgtcataaatattccaccccttggttgaagaaacccatacagagagaaaccgcacaccccactgtgtgactctcttgagtacgcccgcaatcccctttcttaagtgtgtactttttccctttgcaacaaatctccatactttcactattttccaactcatccttgaatccattctcaagacggtgtcaagagtctggacacctgcgggggtccaggacccaccggcatttgaggacctcccctggcccactgatatcatggggactgttattcttccctcagacgtagatgcctttttctgtaaagacttaagcctgtatgtatgagacagaagtttggcaggactgatttcacaagatagaggtcacaaagacccccactgataaaacagatgcagtaaagagggtggcccaaacccaccaaaaccaagagggcaccccatagggggccactcagcgttccctttcctggcacaccagggttggaaaaaccactccaggcaaagaacccggatcaagattgagactgaaatccactagtggatgacctctggtcatcctcactgctcattacaggctaattataatgatttagctgccgaaagacactccccctgagtgccatgacggtttacaaatgctatggcaacccggggaacttattaccctacatggtctaaaaggaggaggaaccctcagttccagaaaatccccagggccttcttgtaaaactcatgaataatccatcctctatctagcatatgatcaagaaataacggtaaaaatagcccatctgcagccctccaggctgctctgcctgtggagtagccactcttattcctttactttcttaataaacttgctctcattttactctatggggctgctctcgaattccttcctgctccaagccaggtggcctctgtggctgtaccctagttttggggttttccctgcaacatatagtttggagctgttaagcaatatctattgggtggcattctaggacttgaatacggcttgatcaaaggcgaaggggtttgatttctttgccttgcaatatctaataaaaatctcttggggcggagaggtaaaaaaaaactggtcggcgcacactggattgcaattgcacaccagtagctttcttagcatggcttgagtaaatttttgcatcatccagaactgtggtcacataggggaaggcaaactccaacatgtgatttatacgtcttggctcatattctttgatccccacgaccctcaggacctgcgccatcctcgggggatgcctcagggcacatcttcctggggagaagccctgatcagagttgcggggctttgtcacctacattaatggattccagtcccgatcttgatgcaagttctttgcttactgtggtttttctaacccttggtgtacctcgaaacagaaatgagcggccccacaagcggtaccccctgccctgagctctgggcccctggtctgccccacggcccatcccctcctggggagcagatgttcctaaataatcgttgaataaattaaagaatgttgaattgaatgtggcaattacatgagttagcaacatttctaaatatcttttttttccctcggctaaagatgattgttccttaagctacgcatttgtctttacagtgtttcaaggcctcataaacctataataaaattgacgtcataatcacgacacattcaacacagatgtgagcgtttggagagagcttcagccttcagcacaggcaactgtgttctattcaccgggctgtgctcctcggaagggctggtggttcctgtaaaagtttgtgctccccgcgcctttccttccttccctcgtctttggcgcctgcgggcaccgggagtcctgggagagggaggaggaacggcgaatcggcggggcgtgtccttcacgccgccccgtagctcggggccgaagctggcgcagcgcgcgactttttgaaagccaggagggttcgaattgcaacggcagctgccgggcgtatgtgttggtgctagaggcagctgcagggtctcgctgggggccgctcgggaccaattttgaagaggtacttggccacgacttattttcacctccgacctttccttccaggcggtgagactctggtaagaggagctttttttt

SEQ ID NO: 40234 - DNA, 2300 bp, Homo sapien
cctatacttcactgtcaaatctccctttgcctgttccggcagctttattcataatagacaaagattggaaacatcccaaacccccttcagcaggagaccgatatacacattgtgtgtggtatgtgcctatcacgcaataggactcagtgcttcgaacagggcgggaggtgggaggacaagcgaggatgagcgtggagtcctcacatggcagaaaggcagaggatcaagccagcccactcctgcaagccctttctacggcatcccaaatacattcatgactcaaatacccccacaaaggccccacctcccaacactgttgcaataaagattacatttccaatgcttgaatttagggggacactaactaccacatttcttgctaacatacacatctctttagggaaggtctttggacatcacttttttttttaagacaggatcttgttctgttacccagtctggggtgcagtggtgcgatcacagctcactgcagcctcaaactcctgggctcagttgatcctcccatctcagcctcccaagcacctgggactacaggtgtgcatcaccacgcccagctattgtttgtatttttttttttttgtagagacagggttttgtcatgttgcccaggctggttggacatcatattttgagcacatttctggctgtttttaagattacattcctaggaatgttggtgaattgatgggggacaaaaacatttgtttccccttgagaggcaatggtacaggggaggggttaagagcatagaccctaggatcacattgcctagggttgaatactagctctgccacttactggctacaagaccctggacaagtcacttcctctctgtctctgtaaatgagcataatagcagcacctgcctcagggggttgttgaataggttcaatgagctaatatataagaaacacatggtatatgctataaagtgttgtcttcttttccttctcctcctccgctccctgggattattaccataatgatacaattatcatttgttctttctgtaaaatggagtttgatgttggagctgcttcctaggcagtcaggcagggcagtcactgagaatgaggacggcgtttctgactcagctgtgggcgggcagctgcagtgacacagctgagtcttggcaaacacttttcatgtacgaagcctgaccctggagtcttgaggctgaacttttcaccaacaaacaggaatgcattcatgaatgttacctctgggtgctgtcctctggaagccatctgcatagcctaactctgccaccctggcttggacaattatggtgatttctctgatgcccctgatactaccacctcaatctgaatttagcagctcccttcacatatggttagattgcctttaaagagattttttttttttttagagatggggtctcactatgttgcccaggctggtcttgaacttgtgggtgggctcaagcaatcctcccacctcagcctcccaaagtgctgggaccacaggtgtgagtcactgcacccggcctagatgtcctttttcaaacgtaagcaatcatgctcaggtttaggattattcgtgcctgggtccccctcccatactgaattgctatggacagccagctagtcttcatcctgcaccccccagcccctgtgcagcgttaatgagccagaaacgctgattctgctgctgagttccgtggaaccccctggggcattttcctgactacccccagtgtggccaatccgtgtccactgaggatgaatgtgactccaggaaaatacatgaagtaactctgtgccaagcttggtgaatgaattgagccatgccaattctgtgctataaataaatttacaagactggttttcttgcgtggctcataagccaggtctagctgccactcccccagaagtcttccaaaaagtattttgagcaggacctttagactggggtgttggagtcccaaggccaaggccgaccgcgctgctctgggcccagcgggcgttcccacacggggctgtaatgccacgattggccgcaggaggggggccgtattccagaccccattgcagaagcctccgcaactgctccaagaactttattttatacggactggcggcgagagcagctgcagttcgcatctcaggcagtacctagaggagctgccggtgcctcctcagaacatctcctgatcgctacccaggaccaggcaccaaggacagggagtcccaggcgcacaccccccattctgggtcccccaggcccagacccccactctgccacaggttgcatcttga

SEQ ID NO: 40235 - DNA, 2300 bp, Homo sapien
agtgtgtggcttctgaggctaggccatcaagggccatggaagtttccatggtggctcttgggtcactttctcagggggacgcctttgtgtactgaaattgagccactgtgtgcagaggtcacatggagagcagctaaggcccccgcctgaggccaggagccagcaccagcgagcagccgggtatctttggaagcagatcctccagcctcactcagatgactatgcccccagccacacctgaccaaacctcaggagaatcctgagccagagtggccagcccagccatcccagtcctgacccacagatccctgagagatgacaggcgtttactgtttgtttttaagccactgcaccgctatgttcggggtaatttgtttcatagcaatagataaagaagtgaccttagatagagctgtttctatcccatgattgaaaaacccagatcacagaaagtgaatgagtgagtgggggctgagaggacgaaggcatgaggcagagatcaccctgttgagagtttgctgtgagcagaagaagcaactacagacattttcgagcgtctccaggactttaccccatcaactgtcccatctcatcagccctttaatgacttcttcctctgtgactacaaacatgcccaaggtgctcctatcaaataaacaatgtatctttgagatcagaaatttgggaagacaattacatactaacatcgtatcattatttaacataggaaaataaccgaaatgtctaagaacaagagagaggtaaaatgaattatttttcatccatatgatactatattaaatggttattagtacaatttttggacctttttttttgagttggagtttcgctcttgttgcccaggctggagtgcagtgctgcgatctcggctcactgcaacctctgcctcccaggttcaagcaattctcctgccacagcctcctgagtagctgggattacaggcatgtgccaccatgcctggctaatttttgtatttttagtagagatgggggtttcaccatgttggccaggatggtcttgaactcctgacctcagatgatccacctgccttggcctcccgaagtgctgagattaccagtatgagccactgcatctggcctggaacatatttacaatgatttggggatattctcatgttgtaatactaagtaaaaagagcagagaaaaaagagagaattataccaattgtacaatgctatgtggccattcccttaaaacgtatatcattgattaaaaaatcacagagctctctactgaaattttagcaaacacatttttactctctttactaatgattaccatctggccgaaattgattaatgtctctcataggtctagctttatatttttctttcctctcatttatgtatttatttccctgggaaaaaaacatcgccaagacattacaaatcaaattgtatttcattaaaagtttaacaaaaagtttatgaaatctggactatccttagaaaattcaagacatatacttattgtccggtcatagcacgttgtcattcattcatttatttagtcgttcaataattgctcatttagcaaatatttctcaaacactacttaagttattcccagatgttgaggacataaagatggatgagacactgtgcctgatttcaatgagctaatggctgagtacaggagccggacaaatgagtaaactaacacagaatcacttcagaagggttgtgatccaagtgagcacagggactttaggaagcccatggcaggggcacccagacgacctagaggcgtgaccactgtcctccctcttttagtttaatcatatatttaaagagcatgttgtctctacactttcctgtgattcttggtagtgatctttggccagggcaatgcaattctaatccagtgaccttccagttaatgcctaactctgctaatttattgttgattgtctagaggagtaaaggaaaccaaggttttcatcagaccctgaaagctgtttgcctgaaaaatggcatctatgcctccaggactctggcgagaattgatctaaatgaagccctcactcagcccgtctatgaccagatcgaccctgtttttggaagcatttttaggtaaaggatctctcatcttgcaccttcgggaacaaacatcggaagaatgtggagccagtctttaagaatttagactttggatctgtaagtgtaaagagtagcttgtaactggagaaggaaaccttagtccttggcaaaacacaaaagccttcttggtttggtttacttaaaaatttcccatgatga

SEQ ID NO: 40236 - DNA, 2300 bp, Homo sapien
acacactgccatgaccggctagattttgtatttttagtagagacagggtttcaccatgttggctaggctggtctcaagctcctgacttcaggtgatctgtccacctcggcctcccaaaatgcagggatcacaggtgtgagccactgggccttgccccaggaagctttaaaaatgctcaaaattaattttaataattaagtaatttagtagcatttgtggttaactgttgaagctaagaaatagccagtagagggagagctgagcacacgtgacatgaatgtaagcgtaaggtgtgattttgcctagagagatcagtataagactcagcatccaggatggcatttgtgctgactttctttgttctgaactttagcctggtgtttctgtggttttcttatggaggagggacgtcatcttgccaaaagttcaaagcagtttttaagaccacagtctaaacatttatcttcaattctttccctgttctgacctctttaccttctgaatcccctcttcagactaaatacatacctagagtactgagggttgtcttggtaatgactgagttggcctttaaaggtaacatacacccttggcccagcacagtagctcatacctgtaatcccagcactttgggaggccaaggtgggcggatcatatgagatcaggagttcgagaccagcctggcaaacatggtgaaaccctgtctctactaaaattaaaaaaaaaaaaagtcaggcatggtgacgcacccctgtagtcccagctactcaggaggctgaggcaggaaaatctcttgaacccggaagacggaggttgcagtgagctgagacggcgccactgcactctagcctgggtgacagagcaagactgtgtctcacaaaaaaaaaaaaaaggtaacacacaccctgaagctgagggttcaagggacaactttttccctgtatgtgatgtgatggtttgggttgccagacacagcaaagtggagtgggttttattttcttctctcctggacagcactttcaaatttttgttttctgggtttattaaaaatatgaatttaaaattagatgggcgtgatggagcatgaccatggtcccagctacccaggaggctgaggtgggaggatggcttgagcctgggaggtcgaggctgctgtgagctatgatcacgccactgcactccaggctgggtgacagagcaagaccttgtctctaactaaataaagacataaaaatatacggatttaaaatttaagttccagaaagaggtgtaaagcggtatatcactcatttctacactcaaacaatccaatgttgttttatttttggcaaatgttatttttggtgaattttaagactttgggtcaagaataactttatatttattatctcatatcctccatctctcccagtcatgtcttatagttgggtgtcggggagccagtgctttgtctgtcttggaactggggcatttttcctgtctgctccagtgaaccagtcatctgaatattgttcaccctcagagaaaagatgctgtggaaggatgcagtgatgcacttggaaaggaaaaaagacatctgtctacttgtaggaacatggcagagaagggtgcaagatccccgtttcatgtaccatttagatttttttttttttcgagatgtagtcttgctccatcatccaggttggagtgcagtggcgcgatcttggctcactgcaacctccacctcccaggctcaagtgattctcttgcttcagcctcctgagtagctgggactacagggttctgccaccacgcctggctgattttttttttttttttgtatttttagtagagtcaaggtttcaccatgttggccaggctgctgttgtactcctgacctcaagtgatctgcctgcctcagcctcccaaagtgctgggattacaggagtgagccaccgtgcctggtgaatttagatttaagtgaaagaagacagaataaatcagtatctgtgggaggagaccatggtaaatagctccctgatggcaagttggtttcacttctgctgtgtaaacgtggctttgtgattgtggcccaaagggctacgtaccccagctggttccaaatacctgaaccaaggagaagctgccaccatctcctctgtggactcctgtaaccaaaccagaactttttttttttttttctgttcagtgacatctggtaagttgtttcttttatgtaatttgtactgtaacttgtggttgattttttaaaaatggaccttaatttttagaacagttttgagtttacaggaatattgaga

SEQ ID NO: 40237 - DNA, 2300 bp, Homo sapien
gtttgggaatcattggcctggctatggtaaccgccacccacctgatctccccacttccacaccaaccccctcccacagtctattctcaatgcagcaaatagacatgcttttaaattacagatcagatccattcaattctctgctaaaaacaccagtggctccccatctcaattagggtaaaagccaaaggcttttcaatggcccacaaggtgttacatgagctgcactgccccctgtcccatgcgccactcctctgacctctctttcacattgcctcacccactgctcccgtgatgtcagcctcctcagtctccttgaacaccccagacatcctctcacctaggactttttttcttttttgagatggagtctcgctctgtcaccaggctagagtgcagtggtgtgagatctaggctcactgcaactgccacctcccaattctcctgcctcagcctcccgcgtagctgggagtgcaggcgcgtgccaccatgcccagctaatttttgtattttcagtagagacagggtttcaccatgttggccaggatggtcttgatctcttgaccttgtgatctgcctgcctcagcctcccaaagtgctgggattacaggcgtgagccactgcgcctgaccttcacctaggacctttgcactaaccattatcttagccagaaatactctttcccacatatctacacatcaagtattagctcaaatatcacattgtcaataaggcctactgtaacccctatttaaaattatacctttaaccacctatctccctcccctctctgagataaaacagggaagaggtagaggatggtgccattagataaggaagagcagatctggagtaataatagagttctgtttgggacatgttaagtttgagatgcctattagacacccaaatctaacaagatatcaaataggggaaaagttggggttggactggaaacctgggagcaaacacgtggtgctctggggatcaccttggagagacaaggctgagtgacccccatggaacactagtattctgaggtgaggcagagacagagttcacaaaagaaagagaagagaaaccaagagagttggagggccctgtcataaaagatgttcatggaagagttgacaaaaagagtcaaactctgtaaaatacttgaagagatttattctgagccatgattgaccaactgaggcaagacaggcaagctccaaaattggggctttgcctgggagggttcttggctttgcccaggaaacaattcaagggtgagctgatggtgttaaatagcaacttgcattgaagcagcagtgcacagctgcagcagagggactgctccttgccgagcagggctactcacaggcagtgcccagaagagcagctcagaggcagttctgcagtcatatttatacccacttttaactgtattcaaattaaggggcaatttacgcagaaatgtcaagaatgaggatggtaacttccaggtcatcaggtcattgccatggaaaggggagggtaatgttcaggtgttgccacggcaatagtaaactgacatggcatactggtgggcatcttatggaaagttgcttccacccctgccctgtttcagctagtcctcaacttgatccagtgtccaaactctgcctccagaacagagtcccacttcctacctcacatggtctgtgacagagccccaggggatcctgagaacatgtgtccaaggtggtcaggttacagcttgattttatacattttagggagttataagacattactacatgtaagatgtatattggtttggtccagcatggaggaaaagttaaatattaaatctgaattcaattgaacctggacacaaacaatagtcaccaagtcctggaacaagttttgtgagtcccttgaggctttcatccagcgctgtttcagagaaatctctatttcaatctattcctatacattagttattgaaaaacaatagacaatagcaaaaacaagttgacctttttgtgttccttgagcctggttgtgaagggcccttgtgactgggcctcatgccaaacaacttgttacaaaaagagctagggtcccaggcccagccgaagcttcaggagacctatcctcatctgtgcaaggaggagtggccaactctggagcccaggctgttgcttcctggtctggtggtgaatcctccatagtctggtgagtgtagtgcccaactctggagcccaggatgttgcttcccggtctggtggtgaatcctccatagtctggtgagtgtagtgtccaagtctggaaccc

SEQ ID NO: 40238 - DNA, 2300 bp, Homo sapien
ctcctgcctcagcctcccaagtagctgggactacaggggcccaccaccacgcccggctaattttttgtatttttagtggagacggggtttcatcatgttagccaggatggtcttgatctcctgaccttgtgatccgcccacctcggcctcccaaagtgctgggattacaggcatgagccaccgcgcccggccgtaaatgtttcttatcagactttaagagtcggttctgtgctctatcagccttaaggtctctgtgttgatgttaacactggttagcagctcctgaattctaaaaaggaggagggaataaggaggcatgtccaaccccacttcccatcatggcctgagctagtttttcagtttaactttggaatgccctgggctgagaattattttcggtttacagaggagaacttatgttcattggtataggatgacaatgaggtcagacaaataccactgaacttggcaggctgggaagttacaaagcttagcaaggccagtttcagtgtcatagtggggtcaaagcctcgttgttgcctcaattctagtagggtacatattcctgtctttattaatgggagaggttcttaatctccagcccatggacaaaggagatcatagatgggtttcaggaaaacatcccaagtcctgcctccaaattttgcaaaattttgtgcctgtgtatttttctggagaacgtaaaccaaacagtgtctgagacaggtctcagtctggaggtttattctgccaaggttgaggacacacccaggaaaaagagacataagttatcatggaatctgtggcctgtggtttttccaaagagggttttgaggacttcaatatttaaagggaaagagcagacagaaggggaaagaggaacaactatgcattcatttcacactcagtaaatctgccttttacagaagacaaagtaaacatagaggaaggagtcaaatatgcatttttcttggggtggactgaagggtgatttctagtcttgtccttgtcccctacctactgtaaatttgcatggtcagggtggaattcaacagaagtgttgtaaggtaaagactctgccactcacaaggaatttccctgtgagcaactcctctgggaggccacctagggagatatgtgggcttctgtctttgcagctgtttaggaacagaaggaaggcagtttttgcgtgactcagttcacaagcttaactttttgttgttgttgttgttgttgagacagggtctcgctctgtcgtctaggctggacaacagagaatgatctccactcactgcaacctccacttccgggttcaagagattctcctgccttagcctcccaagtagctgggattacaggcgtgcaccaccacgcctggctaatttttgtatttttagtagagacagggtttcaccatgttgaccagggtggtcttgaatgccagacctcagatgatctgctggccttggcctcctgagatgggcatagtgctagtattacatgtgtgagccactgcgcccggccctaagcttaacttttttctttggcagagtttagggtcccgagatgttattttccttccacaagagacatccacagctttcacgatggttaccgatcatatgtgccattcatctaagaccaaggtgaccacctggtcccaaagcctgcacctcggattcttactcgattcccgcctggtctcttccaggccctcagttagtttccacaacatgggagggttcctcctccgtggtctcgcccattcgcgttcccacccaccctccccggatgtgacgaccctgggctcccactcccccccatgagagaccatccacttccaccctttcacttaggcttcctggcgcagcctctatccaggaactctgtcccatagctgtactgcccaggtcgagctttctaaccccaagatgccactccgttcagacgttcccatcctccatccctgagacccggggcaggatcgcagcctaggggcctcacgggccgcctgctaccctgttagttgcaacacggggcggggcgtggctttgtgcacgtcggcttccgggaagagctttacgatacattgaccgacattttacgacaggcgggattgttttgtggctgtcagctttccccgtggtctgagtttgtggctgcatttttatctctggtggctctgctacggcggcgcagaaatgaggcagaagcggaaaggtgcgaaaggggaaggagatgggggaaaggggtggtccgaaaggggcgaacgcccaggcaatcaaatgctgaaccgaact

SEQ ID NO: 40239 - DNA, 2300 bp, Homo sapien
tttgcatgtccaaatcttgccctatctttaaagatccctgtgccatttccttcatgaagtcttttcctactcatttactcttccagttcttgatacactcaagagctatacaagtggtttccaaatcttatctgttcttatcagccgatccccttttaccctccaaataaattcttacacagaacctcaatatataaacagctgaaagcagagctgctgtggtggaaataaagagacctcctcctttttttcctccatgccttattttcctcttcccttctcccttcctctgccatgaccaccaccagtcctacctctgttgcatggcccctgaggcacctttgtagaactctggaagtgctgagttacatggtttggaaagcatttagcctttgagtatagatggactttatttctctcaaaaattgttgtgtatatgttagccttgcctcattaaattagatgcagtgtgttacagtgaaaaaagcatggaagttgtggtgaaaagagctggatttgagtcttggctctgctgtttacgatagcttgttaacttgccttagcctcatttttcacatctataaaatgggataacagtacctaccctccgtgttactgtaagggttcaaatgagataaagtaaatgtgtgggctccataattgccagggccttccatccacgctttcattatgttttagctttctctgcagtgtgagtcctcagccccctgggccacggaccagtaccggttcatggcctgttaggagctgagccagacagaagaaggtgagcagcaggcgagcaagtgaagcttcatcagtatttgcagccacttcccatcactcatgttactgcctaagctctgcctcctgtcacatcagcagtggcattagattctcaaaggagtctgaaccctgttgtgaaccgtgcatgtggtgggtctaggttgtgtgctccttatgagaatctaatgcctgatgatctgtcactgtctcccatcacccccagatgggagtgtctagttgcaggaaaacaagctcagggttcccactgattctatgggaacagaattcgttatggtgaattgtataattatttcattacatataacaatgcagtaataaaaataaagtgcacaataaatgtaatgcacttgaatcatcctaaaaccaccctgctcccctggtctgtggaaaaatcatcttccataaaaccagttccttttatcaaaaaggttgggaaccactgctctacaggtgagaagcttgcttgctgacagcttccaagctgatatcccacagcttttgtccctggaaaaagactggcattttttaccttgaagaaaagagctcagattggcctggcttagagatatgcccatccttgaaccaatccttgaactgtgcttgagtggatggcgtcatacaagaacctgtcagcttctgctgttgcctttggatgagaccgagagccccagttgccagaagttcatgatggtggacagacaatattttagaaatgcattaagattcttaggcagatacctgggtttgagtttcaactttactccttgatagcatcttcatgtaacaggcacatattcttgttctgtctacctctgttctgagaattacctgaattcatgcatctaaatgttctttatgaactctaaagtattatgcacatattagtaattacacctctggagataaagggaagagaattactttggtcctttcctgtgtgattaagttctttctcctcacattgtttctactcctgtatcctttcctgtatttatttttaataatctcatagagtatgtgcttctaaagggagcttttcccatatatatgtaaagccacgtttgttttaaagatacaaaagatatgatcaaattgtaaacagtagagatttagcatcttctgaacttgagctattcatttggcatatttgtatggtttcggatggaaaactgctactaaatcagattttaaaatcttgattgaatgatacgatttttgacattgttgaatattaactttccaggagatctcagccctgctgagctgatgatgctgactataggagatgttattaaacaactgattgaagcccacgagcaggggaaagacatcgatctaaataagtaagtggatataaagagagagcaagcttgttcttaggtagcagatctcttttatgaaattatctagtactacttgttttccagctcaagttttattttagttgagaattttagctttctgccttgccttgtcattcatttctttttttt

SEQ ID NO: 40240 - DNA, 2300 bp, Homo sapien
aggatggagggaggacaaagaagagagagaggccttcagtgagttgaccccctttaaaagagctttcccagccaggctcagtagctcacacctgtaatcccagcactttgggaggccgaagtgggcagatcacaaggtcaggagatcaagaccatcctggctaacatggtgaaaccccgtctctactaaaaaaaaatacaaaaaaaaaattagccaggcatggtggcaggtgcctgtagtcccagctactcaggaggctgaggcaggagaatggcatgaacctgggaggcagagcttgcagtgagctgagttggcgccactgcactccagcctgggcgacagagcaagactccgtctaaaaaaaaaaaaaaaaaagctttcctggaaaccccacccaaggacctgcagcttaatgctcattggcaacccttggtcaatgggaaatgtagtcttttagctaagtgcattgatgcctggaataaaatcaagggtaccgtttagtaaggaagaacagggaaatggggattgggtaggcagcctgcaatatctgccacatcatgtatgaaatcaggttccaggcctgagacactgaagtacatcaggatgcaaaagtgaccccgtgtcagtcagtgaacatgctggtttcccaaagagtccaaaatggtagctgcgacctgcagtgtaaggtttgggcaacagagatctaagtgaagaatcatgagtatgctggtctcctgagcccttttgctgtgaacacagacggaagggaaattttattctcagaacctgttgctcttaacctgagcagatgtttgctgtctttttcctattttctttttatggagatgtaattcccataacataaaatgcaccattttaaagcatacaatttggtgggttttagtattcttgctatgttgtgcaaccatcacctcagtctaaatccagaacatttccattaccccaaaaagaaaccctataccatttgcagtcagggcagatgcttccctcaatccttctccacccagtcctgggtagaccagagagctggacttaaccacatgaatgagtgcttgagctccttggatgacataggttcaaaccctgggattctggaatattttagaccctcttaggaaaaccaaggacagggtcatggtgaaattcacctaaggtaaggaaacgtggggtccacaaggatgctaaaccctcaagcctgtgccttcagcctgtgagctcctttcctgcagcccacaacccccggcggctgtagaagacaaagaggctctgcagtaagggacagggaagcttccagagcttctgagcctccagggccctcggtagtgatgccctaagttgcagaagctttaaaagctctctgttgtgacaccagacactgatatgggatttctacatccaggtggtactaatcagtgtgaaaagcgggctgagaggagagggaggatgcagcacattcattaagggcctcgtgtgttgtagattcaaacagaatctcctttttctactcacaaccatcctgggcagtattagactcattttccggaaggaggacttgaggttcacaaagagatgtgccttgctctgactgtacagccgaatttcagacacttccatctgagcctcgagtctcagcattctccattgcaccatgctgtgggcacctgtggaaatgcctcctgacctggcccagggcaggtgcagccacctcttgagtggcctagttaggggcaatgacattaggtcagggcttggcttagctcagccctgggctcctccgagtcggtaggagcttggcatgagctcccctcccttctgcctgcctcctattcttcactcctcaggcaaaaaggttgctcaaggagactccaggatttggggtctgcctcgtcactgtcaccaggaggctttttttctgacttgccagagctccccatcagtcctcacagagcctctggaagcacagggaaggcagctgtgggatcctggctgaacagagtccaggtgaagcaggcttgagaatggattgatggggaggtggggatgtcacaggtctgatggcagagccgggggaagggaacagccaggaaggcttgcaggttctgctgtttggttgctgaagggggtcagtgtgtgtatgtgtcatggaggtgggcagggaaggggagggctgtgcgtgggggagaggatatatatgctggtgtggctgagaaagcggaaccgagcctcgcatccatcggagggagccggggactgacagctctcaggtaggcaactgcacg

SEQ ID NO: 40241 - DNA, 2300 bp, Homo sapien
tcagaagggagagtttgcccagggacacgcccgtgagcgtcctctcatcttttcttcatctggccagcttcccgtgcggcctgcgacccatggaaggagagtggtgacatctcggacagcggcagcagcactaccagcggtcactggagtgggagcagtggtgtctccaccccctcgcccccccacccccaggccagccccaagtatttgggggatgcttttggttctccccaaactgatcatggctttgagaccgatcctgaccctttcctgctggacgaaccagctccacgaaaaagaaaggtacgtgattgtggtgtgagtgggagcccaggctggagcggatgatgtctgtgtggggacagccagccgtggagagcaggggaccctgcaggccctagatagtcttgggttcactcccatttcggttttttattgctgcttctgttacctggtgatattcccaggattctccttctcctatttaaagcctcttctgttttagcctccaccccaatccctgccttctttcctgtgtttctgcagaggtctgcgtgggagaggcctccagtagggtcttagccacagcatggagcactgctgttggccactaggaccatctcttagattggggctttctagcccctggttgtaagtttctctggtcccagagaacccctttcctggaggtttttgttgggtcaggccggggacagcagccagtttgagtccccactgggtaaggttgagcgagggataaggagaaagacatatccactcaccctgtcttcctttcctgtagaactctgtgaaggtgatgtacaagtgcctgtggccaaactgtggcaaagttctgcgctccattgtgggcatcaaacgacacgtcaaagccctccatctggggtatgtgcgagcccagggcctctagcctagggtcgcgtgtgggtgtccctccaccctgccgagtccctgtgacccacagcccacagtgctttcaggaacgtggcttgctgggaacaccccctggtgtctcttcctggccccctgagaaagacatcctggtgaacattgttgctgttgatgggaagggagctctgtccatcttggggatgtgtcttcttgcctcattgcaggaagcaagatgttttagttctgggtagaaacggggtcatttggtttagttgctggtgagaccccgtttccaagatgtttagtggccaagcactgcaccacccactcttccttgggagtgggtctccgctagccccaccctggtgcctccgccgtgttctgtgcagagcgagtttgcaggctgctagtggtaggagctgactcatggccctgggggagaaagcgtgactgcaggcaggtggggcccagagagggctcgtggtcgtgctcagtgtgggatgcctcctgccagaggagaggttggcacatgttccgggagagaatgagccttaggtgccaggaaaaataattcccgttgatgtgcaacacataatcctggtgacacccgtcaggagcgaggcacctgggtgttctcttgggctccgtccctggcttgctgggtggcctcaagcaatcacttccctccctaccgcggtccccgctgggtttgaagggggcagggtgcccctgattataccgcatctccctcccacacagggacacagtggactctgatcagttcaagcgggaggaggatttctactacacagaggtgcagctgaaggaggaatctgctgctgctgctgctgctgctgccgcaggcaccccagtccctgggactcccacctccgagccagctcccacccccagcatgactggcctgcctctgtctgctcttccaccacctctgcacaaagcccagtcctccggcccagaacatcctggcccggagtcctccctgccctcaggggctctcagcaagtcagctcctgggtccttctggcacattcaggcagatcatgcataccaggtatggggcggggctcgctggaggctcaggctcatagctgactcatcacgggccagcttgattacaggctaccgaccaccctgatggaaggctgagccctttggccaaattgctaatctcttctacaaggaaacaaaaggaaaccgaattcactgctcaataaatgtgggaattcctggagttatctacattggcagctgtcatgagtggttactaggaatctagctaaatccctaagtaactgggcgatggatttgggtgggggaattgtcacacctctgcttataagagaggatggagtcgtgtagttgggcttccc

SEQ ID NO: 40242 - DNA, 2300 bp, Homo sapien
cctatagaaattttggttctagttagataatgttcttatttcacaaatggtgggagatggaggaagggaaataatacttatttgctatgagctagacacacttatctatgttattccatcttggggcagatgaagaagctggggtacagagagtggaagaacctgctggagatcataaagtgaatgtagctcagtcaggactgcaagccggtttgtctgactacaaagactttagcccttttcccggacactcccactgactctttgccagaaaaacagcacaccttaaatccaaggtgaactgcaaattcaaacattatgtccaacacagattttaaaaccttttttgggggaaaggaattactacctttggagtcattaaattcgcttgaatagaaatattgatgcccacacatatatagacacggggccccctcactaccgttgtggcgctggtcttatctctgaaaaacacagaacaacacaatggaacaacttcaattctccttgttacaaattatccaaaagccagagcctaacggtgccaaaagcaaccggtcttgtttacgtaaggattgaaggctaacagttaactttctcccatttaattccagcaacagtaaataacgcctcactttacaccgacagaggagtgagatgtcatgaaatggggaagaaaacattgagtccaaaggaaaatgggaaggcgctttccagcctcctcccactagcgcgggcatgggcgcttggggcggctggggctgcgccgcctgggtcccccaggccccagccgagctcccgtccgcggcgccccagctgtctggctcccttcccgccctgggtcgagcccggcccctctcggaggagcctgtcccagaggcaggcctggaaaaacaacagcgagagaaactttggctcggtgcgaaaagccaagcctcaagtttggctccgggctgcagctgccggttccgatcgaggggcggggcggggtgtgtgtgtgtgtgtgtggaggggggggtcaccactcggtcaggttcaagtgcgcatgtgcgcgaggagtcgctcgggcacttattgagcgccgactgtctacgggcggccgggggtgtgtagcccaggcgcgctgggggcgtgctgggcgggtgcgggggcgcggaggcgcggggggcgggcgggggtgtgtcccgagtgtcgccgctgggcgccggctggcaggggctggcgtgctgctccgctcccttcccgggcgggaatccgggccgggttgtggccgcggccgcgtacgtgagcgcagtgtcccggggaggagggcaggccggccaggtgggcgccaaccgagcctcggcgggcggccggagcggagccgggccgcgggccgcgccgggagggcgggcagggccgcggccgctgcagcccggagctgagctagccgtccgagccgagccgtccgagccggggaagccgggcgcgtgctgccgctcgtggcgggccgaggtgagctgcgcggggacctagcggcgcggcagccggggacgggggcggccgcgaacttcccacgccccgcgcgcccgcggctgtcgggccggcggcctggggggtccgggggtctgggaggccggggccgcggcgggcggggcgcgggacgctgcggcagggccggggtggcgggcggggtggctgccgctcccgcgcgtcgccttgtttacctcgccctccgccggcgcccccactctcggagccccctcccgacttcgggcagtcgggactcgcccctcgcagggacagggaccggcccgcctgcccctccccggccctttccggcggggccgcccgcccggccctcccgcgcccggccctcccgcgccccgcgcgtttctgccggttcctgcccactccggccggcgcgcgaggccaggctgcgggacgggcgggacagagggacacaccctccgcccgcgggcgacccgcgtccctcccgccctggcggccaccgccccctctgcccgcacgctctcgcccggtcccgcctccgcccgcgcccctggccctccccggcggtggcaccgtgggctcacgcgggtgcccggggggggggcggggctgcacagggagtttgtcttgtgcaaacaatttccaaggcagcgttttcttccctgcctgggagtgcagggctcagcgccttcactttggaactgactcagagacctaaagaagcccacctggccagcgggaaggggggccgccgccgcctcccggttttgggcagccctggccagctccctgtggccttggaggacttc

SEQ ID NO: 40243 - DNA, 2300 bp, Homo sapien
ggaatttagcagagaggtaaatatatagaagtaagtaaacacccactgtttgaagaaaaatggaaacaagaacataaaactattcatgaactgtagtaacatgtaacatacaaaaataccttaaaaataagagaggatacattgttaactaacaaaactattcattttttttggagagaagaggtcttgctgttgcccaggctggtctcgaactcctggcctccagtgaacctcccacatcggcctcccaaagtgataggattacaggcatgagccaccttgcatggcctaaatattccttgaataattaaatataaaatttcagtctgcattttcatattaatgtaattgaggtgatccccacaacgttttgttcctcttcttagtgcaaaccagaaatgtttccttaagggtgagagttaaagggtagaaccagtctttgctgaattactgggtagcaggattattctatagcgggacttctcaatggcaataccagcatttttttggactatacaattctttgttgtggggggctgtcctgtgcacagtaggatgtttagcagcctccttggcctttactcatcagatgtcagtagcacccctctcccaattgtgacaatcaaaaacgtctccagacattgctgtctcatcacccccagctgagaaccagtgtcctatagaaattttggttctagttagataatgttcttatttcacaaatggtgggagatggaggaagggaaataatacttatttgctatgagctagacacacttatctatgttattccatcttggggcagatgaagaagctggggtacagagagtggaagaacctgctggagatcataaagtgaatgtagctcagtcaggactgcaagccggtttgtctgactacaaagactttagcccttttcccggacactcccactgactctttgccagaaaaacagcacaccttaaatccaaggtgaactgcaaattcaaacattatgtccaacacagattttaaaaccttttttgggggaaaggaattactacctttggagtcattaaattcgcttgaatagaaatattgatgcccacacatatatagacacggggccccctcactaccgttgtggcgctggtcttatctctgaaaaacacagaacaacacaatggaacaacttcaattctccttgttacaaattatccaaaagccagagcctaacggtgccaaaagcaaccggtcttgtttacgtaaggattgaaggctaacagttaactttctcccatttaattccagcaacagtaaataacgcctcactttacaccgacagaggagtgagatgtcatgaaatggggaagaaaacattgagtccaaaggaaaatgggaaggcgctttccagcctcctcccactagcgcgggcatgggcgcttggggcggctggggctgcgccgcctgggtcccccaggccccagccgagctcccgtccgcggcgccccagctgtctggctcccttcccgccctgggtcgagcccggcccctctcggaggagcctgtcccagaggcaggcctggaaaaacaacagcgagagaaactttggctcggtgcgaaaagccaagcctcaagtttggctccgggctgcagctgccggttccgatcgaggggcggggcggggtgtgtgtgtgtgtgtgtggaggggggggtcaccactcggtcaggttcaagtgcgcatgtgcgcgaggagtcgctcgggcacttattgagcgccgactgtctacgggcggccgggggtgtgtagcccaggcgcgctgggggcgtgctgggcgggtgcgggggcgcggaggcgcggggggcgggcgggggtgtgtcccgagtgtcgccgctgggcgccggctggcaggggctggcgtgctgctccgctcccttcccgggcgggaatccgggccgggttgtggccgcggccgcgtacgtgagcgcagtgtcccggggaggagggcaggccggccaggtgggcgccaaccgagcctcggcgggcggccggagcggagccgggccgcgggccgcgccgggagggcgggcagggccgcggccgctgcagcccggagctgagctagccgtccgagccgagccgtccgagccggggaagccgggcgcgtgctgccgctcgtggcgggccgaggtgagctgcgcggggacctagcggcgcggcagccggggacgggggcggccgcgaacttcccacgccccgcgcgcccgcggctgtcgggccggcggcctggggggtccgggggtctgggaggccggggccg

SEQ ID NO: 40244 - DNA, 2300 bp, Homo sapien
tgacagagtgaggccctgtctcaaaaacaaacaaacaaaaacgaaagaataaattcacaaccagacaccaacatccattgatgaatcctagcagtttaaatcctgttatggagtttacatactagtcctacctcatgtaagaaacattcactatttcatttcactcaataaacatttcctgaacaccttagtctcaaaggcaagcccttggcttttgctgccggactcatttcccttttctctgaaccactttactctgggtgttgcaattagagcataattatatgttatcttgtattgttccctaattgttgcatgtgcattaatccacttcctcagaggctgtatagtccttgggggcagggactatattacaaacctcaggataggtgaggaatttagcagagaggtaaatatatagaagtaagtaaacacccactgtttgaagaaaaatggaaacaagaacataaaactattcatgaactgtagtaacatgtaacatacaaaaataccttaaaaataagagaggatacattgttaactaacaaaactattcattttttttggagagaagaggtcttgctgttgcccaggctggtctcgaactcctggcctccagtgaacctcccacatcggcctcccaaagtgataggattacaggcatgagccaccttgcatggcctaaatattccttgaataattaaatataaaatttcagtctgcattttcatattaatgtaattgaggtgatccccacaacgttttgttcctcttcttagtgcaaaccagaaatgtttccttaagggtgagagttaaagggtagaaccagtctttgctgaattactgggtagcaggattattctatagcgggacttctcaatggcaataccagcatttttttggactatacaattctttgttgtggggggctgtcctgtgcacagtaggatgtttagcagcctccttggcctttactcatcagatgtcagtagcacccctctcccaattgtgacaatcaaaaacgtctccagacattgctgtctcatcacccccagctgagaaccagtgtcctatagaaattttggttctagttagataatgttcttatttcacaaatggtgggagatggaggaagggaaataatacttatttgctatgagctagacacacttatctatgttattccatcttggggcagatgaagaagctggggtacagagagtggaagaacctgctggagatcataaagtgaatgtagctcagtcaggactgcaagccggtttgtctgactacaaagactttagcccttttcccggacactcccactgactctttgccagaaaaacagcacaccttaaatccaaggtgaactgcaaattcaaacattatgtccaacacagattttaaaaccttttttgggggaaaggaattactacctttggagtcattaaattcgcttgaatagaaatattgatgcccacacatatatagacacggggccccctcactaccgttgtggcgctggtcttatctctgaaaaacacagaacaacacaatggaacaacttcaattctccttgttacaaattatccaaaagccagagcctaacggtgccaaaagcaaccggtcttgtttacgtaaggattgaaggctaacagttaactttctcccatttaattccagcaacagtaaataacgcctcactttacaccgacagaggagtgagatgtcatgaaatggggaagaaaacattgagtccaaaggaaaatgggaaggcgctttccagcctcctcccactagcgcgggcatgggcgcttggggcggctggggctgcgccgcctgggtcccccaggccccagccgagctcccgtccgcggcgccccagctgtctggctcccttcccgccctgggtcgagcccggcccctctcggaggagcctgtcccagaggcaggcctggaaaaacaacagcgagagaaactttggctcggtgcgaaaagccaagcctcaagtttggctccgggctgcagctgccggttccgatcgaggggcggggcggggtgtgtgtgtgtgtgtgtggaggggggggtcaccactcggtcaggttcaagtgcgcatgtgcgcgaggagtcgctcgggcacttattgagcgccgactgtctacgggcggccgggggtgtgtagcccaggcgcgctgggggcgtgctgggcgggtgcgggggcgcggaggcgcggggggcgggcgggggtgtgtcccgagtgtcgccgctgggcgccggctggcaggggctggcgtgctgct

SEQ ID NO: 40245 - DNA, 2300 bp, Homo sapien
ctccctccgcccctccactctctttccttccttccctgtccctcctcctccctccctcctccccatctacccctcccccctccctccctcctccccacctcctccctccctcctcctcccctcttctctccaccgacgctgcgcaggccccgcctacaacaagagtcacgtgcgcggcacgcaccctccctcggctggggctctggccgcagaatcccgggggaagagggttggggctggctgggcactcggcacgggccgggaccccgccgctagtaggcggacgccaggaagggccagacggatggcgcggggcggggcttgtcgcgaagggcggggcctgttgccagggctggcgcaggaaacgggccgaggggcggggctgccggctgccgactggggtgctgtttactcctggcgggggagctttaaccctcgggcgcggggcggccgggaaaacgcggcgccggagccgcggccccggagccggaggtggggcgggagggagggagggaggggctggctgaagacgccctggaaggctgggcttttatttttcttattttatttaaaaaatgtctcgcctgctttccttgccgcccacctcccatgccacacacacagacacgcgtgcgcgcgcgcactcacacgtacacccccgagtgcgcacacacgcacatacacgcgcgcacacacgacacacatacgtacacacatgcgtgcacacacgggcgcgctcacacatgcacaaatacacgcgcacacacacggatacacacgcgcgcgtgcacacaagcacatacacccgagtgcactcacacgtgcgcatacacacgtacacacgcgtcacacacatacacactcgcgcacccacacatatacacgcgtgtacacacacgtacacacactcgcgcacacgcctgcgtgcacctacacatatacacacgtgcacacacacgtacacacatgcgcacacacgcggtaagtggttgctagaggctgcgtgcacgcagcgctctgggccccgagcggcgcgtccgggcaacgctgcttgggaggtggagatctgacacgtgtggtccctgagggcgtctctgccacttctcctaatccaggaaatgactcggtggcagcatcgccctatggtttgtgtgcctgcatgagactccagtcacgcactaagctgatctgagtctgtactctaggcagtctggcctcctacgcttcattttctaatttatgcagtcgatgcaagagttttccgtaaaccgtggagcgctccacgagggtatctgcatgaacactgaggacagcaggctcagttgcggtgccttcctccacgaagtcagttttccattatctgagaaatccagagtagagagacgctgtgacacgtaacttggtaatgtcttaataaccacccaggtaaccgttttgcacctgaggaacggaggctgagaaaggcaaagcggtttgtcagaggtcgcacagctagtgaaagtgcacgtgtcctttgactctcaaaggtgtcccttctccctcgtgtaatggacatatgtgattttctctgtcccgcatcccttcctatgggacctcacttctctattccctgtggttttttttgggctggccaccgtaggattccatctctggcaacagcggtccaaagggtgagcgttttcactgagcagaatcaattacagtctttccctggaactaatatatgaatgtgcgagagaaaaatttgttttctgctggtgctgctaaattaggatgtcatagctgggagctgccagcagccatgttcccaagtgcacgagggaagctcatttttgagggctgggggctcttttgaagtaggaaaaaatgggactgatatgaaggagcaaaccagaaatgagagatttagagaacagaccctaccaactttgtttaaacccagggtcgtgctgtgcctggggccagttatactcctgagtttcccagttaaggaagctaacaagttcattttttttgcttaagctagcatgaattcagttcctgtcacttgtctccaaaaacaggcctgactaataagtttggcacggtggtatttatttatccctcaaagaataatggaaattgggtgctggccacagctatcacttcttaagtgttccacttcccagaatgagtcatagcaagtgtgagtcccgtgaaaatctaattcttcctcaatattattgcttttatacacagaaaacaattcaacaggcccaagttagagattggacagataacacttgaccttgggatatgat

SEQ ID NO: 40246 - DNA, 2300 bp, Homo sapien
ccattttcctgcctcagcctcccgaatagctgggactacaggcgcctgccaccgcacccggctaatttttttgtatttttagtagagacagggtttcactgtgttagccaggatggtctcgatctcctgacctcgtgatccgcccgcctcggcctcccaaagtgctgggattacaggcgtgagccaccgcgcccggccatgactgcttatcttgcagtgaaggtttagtgaaggttctccagcttccttttccgccagctctgatctatttcctggagctaccttgagacagatagaaggtaaagggcattttccctgggagggaagatctggagggtgttaactggatgacaatagctggatactgccagtttccgggtagtcatcttgatgcaaggcaggtgaaccccaaagaggggtttagcccgtgagggttcttggctttgctcaggaaagaattcaagggtgagctagtagtagggtagaagataacagctttactgaagtggcaatgttacaactccagcagcgttacagcccctcaactgctcctgcagagcagggctaccccataaggcagtgtgctgagagtagcagctcaggctgcagtcagatttacacctactttcaattacatgtaacagattaaggggtggtttatgcagaaatgtctaggagaagggtggtaacttttgggtcattgagtcattgccatggaaaggggcagtcattctggggtgttgccatggcaatgatacactgacatggtgggcgtgtctttcccaccagtgaagtgtctttcccacttcactgatgggaaagctgcttcctctctgtccctcttttagttagtgctcagtttggtccagtgtccaagccccacctctggagtcgagtcctgctatctacctccatttgcccctgaattacacaaagagatcagggtagaaagaagcccttggcaacaggagttctgagttccagtcttggttcggatctaggaaatttttccacctttccttccttaaaataccagttttattcaggaataatttagataaaacacaatttaccaactttaagtgcacatttcaatgaatgttgacaattgtatatagccttgtgaccaccacaacaatcaaaatataaaacagttccatcatccccccaaatttcctcttgcccctttctcgtcaatcccctccttctgaccctgtcccctggtaacctctgatctgctcactgccgttacagttttgtcatttctggaatttcacagaaatggaatcattacagtatgtctggcttttttcacatagctaatactttatgtatttttattttaaatttatttgagagacagggtctcattctgtcgcccaggttgaatgcagtggtgagatcacagctcactgcagctttgaacttctgtgttcaagtgatccacccacctcagcctctccagcagctgagaatacaggactgcaccaccatgcctggctaatttttctaatttttgaagagatgcgggttgttgaggggggtgtctcactatgttgcccaggctggtctcaaactcctggcctcaagtgatctcctaccttggcctcccaaagtgttgggattacaatggtgggccactgtgccgggtccaccagagcgaatacttctgaggttcctcccaggtagtgactgcatcagaagtttatttctttttattgagtagcgttccattgcatgggtatattgcaatttggttattcactttcctgttcacagatattgtgattattttctggttggctgtgatgcacgtagaagtcttagtgtgggcatctgttttaatttctcttgggtaatacctaggagtgggactgttgtgtggtcgatgtatggtgcacactgaaatccttccagctttctgaacctcaagtttccccacccttagagaagacagcaggacgagcacagggttaggtgagctccattccaggaacggagaggcgtgggaggccctacaatgtaggcctgtgtgtgcaggaggcaggagggcggggtgtttatgcagcaggagcctgtgcgttcagggggcttgagatgtcgggttctgtggacacaggcaggaagcttaagaggctctgctgagcagggacctggggaagaggtgagagccctgcagccgggcagcgctccgaggctgcgctggcagaagcagcaaccgcggcaaagtcgtcggggaacccactgcagccctcgccgggcggcgaggccatagccagttcccagctggacccgtggag

SEQ ID NO: 40247 - DNA, 2300 bp, Homo sapien
ttggagaccagtctgggggacatagcaagatcctgtctctacaaaaataaaaactaaaaaattagcctgggaggattgcttgagcccaggagttcaaagctgtagtgagccactacactgcagcctgggcaacaaagccatccctgtctcttaaaaaaaaaaaaaaagtaatgttgcagtgtcagacatggagctctatgtgctcactgtgaacacagacagtgtggatggtgtgactcaggttcttttgggaggacagtagtctgatgatgaggtgcaggacaagaggaggcccagaagatgttggttgagaggcaagaagaaagagaccttcttttcagggatgaaaatattcaaatccaacagggctaaaggagatgctctctgtgatcccatctctctttcattccatgttgtaaccaccaatacgaagtctttaatgagcgggaacttcatagagagacacagcactcccaacattgttaaaactggtctctttctggatgaacccgttttgaaaccataaaagctaactggtaatgcatggtaatttagtattgcatctaagtacctcctccaggccaccccctcaccgcctctgcccccaaggctttgtttattcatttaggtacaacccggtcatgtggaaaaaatccctaggctggaattcaaacaacctaggttctaatttcagcttgcccacttactgatccattttaacccaaggaaagcaacaacttctatgagcttcatttttttctttttaaactagagatatacaaatgctgcctatttaaaaactataaaacaggtcgggcacggtggctcacgcctgtaatcccagcactccaggatgccgaggcgggcagatcacctgaggtcaggagttcgaaaccagcctggccaacatggtgaaaccccgtctctactaaaaatacaaaaaaattagccgggcatggtgacgcatgcttgtaatccccgctactcaggaggctgaggcaggagaatcgcttgaacccgagaggcggaggttgcagtaacctgagatcgcaccaatgcactccagcctgggcaataagagcaaaactccgttccccccaaaaataaaaataaaacctgtaaaacacaacagaaacacagggtttgtacatttaagtggaaggggagtgcattcttatttattttgagaaaaaaagatagtaaggaaagtctctttttgctgttgttttgctttttgttgttgttgactgctgcctataagacctgctttacattgaccaaaggacctctgttccggaattttgaactttttggtatcctccagcacttgttcataactctataacagctgttacccgtgtgagccttccattaaatatttgtatattgcaccttccagtcttcctctttagatttcttttttatctttgtattctcattttgcttcgtattacaagacaggcgctcaataaatttaatgaattggacgggattctaagagttcctaaatttagttattcttattagggcatgccatctgctggttccctggtgtatctgtcagtcagcctgaattctataatccaataaattgaaatttgcattgaagcatttgtgtgtctctgtgttgggcaattcctcctggccccatccttccacttcctgttgcaggtgctattctttcattgaaccagtctcgaattctttttcctccaaccctctgtttacctgttggccactcttaaaacctggcacagtggagcctgcatttcgcagctccggagtgaccaggacaatgtgactgggcgtgctccgtaggtagggctgatttgggacacactacgtcttgaatgaaggttttcaacgctacttgtttcaggattcgacgcgtcttcattctagggttatattgagacattgcagtccctcccacgctcttggccgccacacttgttaattttatccccgtgcccaattttgtagccagccctcctggatctcgcggccaatcaggagcccacacattgttgcctaagagaccccggatgccagcgacgggatttatagacggtgattgggctgctggaagctgggaggggtgagggactggagggagtcggagaaaaagctgacctaatgaaactgtggcaacgtcagcgcttgaggcttgaagagggagacaagctaaaagaggtgagagctgtgggcagtgcatgaaaaagatggagactctctctttggaaagctccagggcctcccatgagctttatcagtgctcttggggatttcattgtgccctc

SEQ ID NO: 40248 - DNA, 2300 bp, Homo sapien
actgtctgtgttcacagtgagcacatagagctccatgtctgacactgcaacattactttttttttttttttaagagacagggatggctttgttgcccaggctgcagtgtagtggctcactacagctttgaactcctgggctcaagcaatcctcccaggctaattttttagtttttatttttgtagagacaggatcttgctatgtcccccagactggtctccaactcctggctcaagtgatcctctctcctcggctttccaaaatgctgggattacaggtctgaaccacctcactcagccccaaatattaattacttttaagagggatatttcaaacataaagaaagatttggacactttcataagaaacacccttgattctccacgaagattttttttaaatagtacatttgtatgtatttcacagatacagtagaagcttcttttgtctcattcccaggtttcatccccctccctgcctgcctagaggcagtcattgtcacaaaattggtgtgcagcgtttctgtccattttcatgcttttattatatgtacgtttgccctcataaacattgtatagtattgctagtcttttttttctaaagaggcatcatcacttacatatcttgtggtttgttttttttttttcactcaatgttctttttctgcaatttagtcatgctgatacagtggcgatcatttctacgtcattcccacctcccgatgttgagctattatgatgtgtctcattcctgacagtctttacaggatggtgtgtaaattgaataaaaatgcacctcgcagcacatctccagaggttccccagctacaagggatctgacacacacagatttcccccacgctatctgccccctcactcactctccacagaggcaccgctggctccagaggatacactgccctgcctagaatcaacctaagaatcaatattattttaaacattgtttactgcacaagtatttacttattagagaaactgtaactgtcatttcagatctcatttatcaggcctgttcacacagttcaccttctgatgtgaaactctaggtctaagttcaacattcgtcaacatttacttaacacgtatcaagcgcctttctaaaaaaaattgtaaaacacacataacataaatgcaccactgtaaacatttttaagtgtacaattctaatagtccattcacatcgttcaatttctttaagttctatgtgctaccgacagaacaaaatgatgcccatgaaatccaggttgacgaggaacgaaaaagaagagaaagaaaagacaggttaaacggtgcagtgaaaagaaagacagccctaggttgggacgagtccaggccctgttgttaaaacgctgcatggctttaggtaaatcatctaacctttgggggcgttcttttcctcgtctgaaaaatgagaggttcggtttagattatctttaagaattctttcagctctaaagcagcttatgtagaaaaggagaggagaaacatttcctaaggagcaaaaattggggcgcgcaccagtaacgaccagcgccacctgtttcctaaggtcttggccaagaggctatgaactatcccgggcgagtagcctattctgtccgctacgctgtttcgcgtggagctctgcagcaggccagagctcctgcaccccattccaccctcagcatccggggatctgcctcttgagcaccccaaatccccaggtccggaggtcggcacctctggttctcagaccaggtgtaggtggtcctgcaatcacacctccgcgctgtgtcatcaggggacggagtgcattgcgaggagggccccgagtgcatctcagatgagcgcctccagggctgggaacgagcacgccggagcaagggagctccaggcgtcactcagggcgagaggcagagaacaacgaggcgcgccgggccaggcccgcaagcccaggatccggcagggagctttcggccgagcgtactcagtgcgcctgccccgtgcgtgcgcgcgcgctcgtgagctcgctctccgggccgcgcgccccggtgctcgcgaaagctcgctgtcgctgggaggcgcgcgccggcgttcctcggccgctccgggtacctgagggacgcgcggccgcccgcggcaggcggtgcagcccccccaccccttggagccaggcgccggggtctgaggtgagccccgcgaagcgtgtgggcccctgggccggggcagcgggagaaggagcggcgagtgtggagcccgaggaggcgccgcgcggctgcctgctgctccgcctcagcccgc

SEQ ID NO: 40249 - DNA, 2300 bp, Homo sapien
cagatgaatatgctgcataagtaataaactacaaagactgaacttacatggatgttttaatactacaatcaaataaaactttcaacagttacttgacatatttagtgatatgcataattgttactgcgctgcatggtaattaagataaatatgtttttaactgtggttaataccagttttcttttttttttctgatggagtttcgctcttgttgcccaggcctggagtgcaatggcatgatctcagctgactgcaacctctgcctcccaggttcaagcgattcttctgcctcagcctcccaagtagctgggactacaggcgcctgccaccacgcctggctaattttttgtatttttagtagagacagggtttcactatgttggccaggctggtcttgaactcctgacctcgtgatccgcctgcctcggcctcccaaagtgctgggattacaagcgtgagccactgcgccctgcccagtatctgttttctataggcagatctcaacatttgtggggagaaaaagaaatatggcaggccaagaatctgtttcagaaatttctgatgtagaacatgaggcgctttagggctttttgagcagggtttgcttttaccttagtttcctaattctagggaccatagacttttcttttcccttctgttagtcaagaccatctactagagggagaaattgggaagattcagtcactgttttactttctccaaatagttatctgcctagtaactgaagcttgggacatggagttcccagtcattgatagttaatgcacagaggacagtttctttccccacttaagccaaagcagttccaggtcccacaatctaagttatcataggtgctagtatttaagttgtcctattagtctgggtctttgagaatttctgaacctgaatttctcttttcctaacctaggctctccacaacaaacataagactatccaatgcatatgaaacaaattgaaataaaagcaaagttaacatcgttactaaaccaaatcaaaatgtgatagcttagaatatacttttttcataccagacctgccttccactccacccacaccctctcagctgaaattgagaatcacacatatttttgcccctggaaaagtacatacaagtcagaaattctaaagctctgtggaaacaataactgggaattattcttatttttcctgtgactttttagggatgatttctattctctgtgcagcatggctgtgtgtaatgaccgttcgttgatgaaatatttcttagtgctacatctgtgttattaaatttttgtactgtctaaaaaataatataatattgtgaagatttcctaatattttagaaccttctatatgtcagttcagtattggttgatagaggtagcatttgtataaactaattcaatgattaaaatgtctaacgcttcatactgctttaccatttataaagtacttttgcatacattatcttatgattcactcatatcatccctgtgagctaggtggtattggaatcattttcaagaagaaaaattctaggtacatagaagttaagtggtatgtttatattcacacagctagcaagaggcttgaatctgtatcttttgacttacttttcagaccactttcacagatgccttctgctacatcagttaatacaaaaatatactattaaagattaaaacacatgcaattttagttcaataatttaggttataagcgtaatatttattatttaaataaaatttaggacaatagcataataatttttcaaaatgaatcaattatatattgtgacggatgaaaaactgccattatacatgagaagttgaaccatgtgttatataagcaactgagggatgaaattaaatttgcatttaaatgctgtttaaggatcattttagtgtagctatagcataaatgataaagtagaaaaatgatatctttataaagtacccacatattgttaactattaggtcagtataatatctctcatcaaagatttttaatgtcaagtccataatactttgagaggaaatgactaatttctcccattttttaaaataatacttttcagatatttcagttgaaggaagaaatagctcttctcctaagatggaatctgtggtttgggaatgtggttgatcaacttgatatgttggccaaatgtgccccatgtaataaaatgaaaagaagagacaagatgatgtcattttcccatattgtgaaaccaaaaacaaacgccttttgtgagaccaagctaacaaacctctgacggtgcgaagagtattta

SEQ ID NO: 40250 - DNA, 2300 bp, Homo sapien
tgttgttgttccctagatggagacttgctctattgcccaggctggagtgcagtggtgcgatctcggctccctgcaacctctgcctcccgggttcaagtgattctcctgcctcagcctcctgagtagctgggattataggcacgcgccaccacgcccagctaatttttgtatttttggtagagacagggtttcaccatgttggccaggctggtcttgaactgctgacctcgtgatccacctgcctgggcctcccaaaatgctgggattataggtatgagtcacggcgcctggccagcttcatcatctttaaaagcaagtaagtcaaagttaagggcagcaatgtgttaagttactccaacgtaaaagactgagtcgaacaggtagcaggtaactgcacgtcctctctcgccagtgtggagatgaaccaaggcctggtagttcttccctgtcttctgtggtgtctcctcccacactgccaagcccctgcctgctgtggccgcgtacctttggaggagagccaagtagaggaactgttaaaaaaaaaaaaaaaattatgatacccaggcaacactcactccattttcatttcctgcaatacttctgatttttaaactttgcctcctcctgtcttgacttcaacaaattggtaacagtaagggttgcatatgtacacatatgatggcggtaagacttggaaagcatttgtttataataatcaagaggaaaggagaagaaaagtgaataggagacgggagagcaagagaaagaggataggaaaaggaggatccgagtcgggactagtttgggggtggagagatgaagagtgtgctctaggaaacaggttgctatgggtttttaaaggtttgttttgcaaacgttatccttagcccaagctgtcccccgtgggcatcagtcttcagcattttctcagcctccttgctggagcactgggcctgggctccagcagaaagggcgagtggataaggtcggcagctgcgagcctgtctctggggtgcagttcttcttaaggcagccgaccacccaagcgcagggccaggagccagctctacccggcttctccaggtcctgtgtgtttggggttccctggcgaggaaaccctggagtagaagccctgtgttctgggtattaaaaacattaaaaaaaatacgttaagacaaatttgatcgtagctcatactgcagttacaggttttaaaagctggtttctaagttaagcaggtgaccaggtagggtgcttgctcccacccccatcccctgttccattatccaaggggtcttatcctgacttctcaagtgtggaaacacacagtcacgtgttccttgggactgtggaaaacgtgcactttggggctcacaggggctggcttttcagcattgacacggtgttcttctttcctgtcttgttttggtgatcatcccacacgactagattaacctgttgtttttgcaaagccccaggattttcctaagcgtccaagccgcccggccttgtctttgttatgaaatagtcaaagggcttcaaaactgcaggcagttgccgcgcacggcgcccgtccttggaggccttttctctgagaatggagttttagattcagggatttatgacttgactttcccggggccggcgcccctgcggaagcggcggtggctcgggagtcagacccggttcccacgccgccgggagcatcctccccgccatctgcggtcgggtcttctcgacagggcccggcggcctttgcaggacgcgagttggggggctccgaaggcggccggcgcgcccccccgcgcctcccacaatccccggcgcccggccccgcgcccctgacccgggtgtcaccgcggagctgcgggaggcctcggcggtcttcggacgcggtcgggaaagtggcgagcgcgcgcccgcgtccgcgcccccgctcgcgaacgccggcttcggccatttccggcgcggcgcccttcggcaagttccgcagtcgcctgtcggaaatggctgccggccggcagggggagcggcggatcaggcgcggcctggaaggcgggcggccggcagccagaacggcttctgggacgccgactttcgcgcaggcggcggcggcggcggcggcgggtccctgagctggaagccggtaggactgctggccgcgcgtgagcccgaggagcgggggccgcgcccggaagggctcatgggagggtgccggggctggccccgagcgctggggacgcggcgggagggaccgggtccgccgtgccccggggaggctgctgctgcccggcggcggg

SEQ ID NO: 40251 - DNA, 2300 bp, Homo sapien
cttacttctctccaaactgttcccttaaaatctttttactccgaggtcaaaactcttgaggcctaatcactgaaagatcccaactacacaccaagtattaacagggttttcccccactagaaaagcgagaagtggagggatacagacatacgcctgtcaatcattttttaggtaggtatgcccctcacatctctggacattaagcacgtttccggaagtctgaagagccacaattctgactcttccagaaagcacttaggctcgattctctcttgctcgtgagttcttatgattcctccggctccccacaagcaaacgaatgggaaattcccacaggataaggtatttttaacacatcaaataacagtttaagaaaacggtttttctttcatcacaaaatatttcaaagtccctctgctaaatagcaagtcgctgagaaggcttcgcttcgctccagactctgtgccccgcagttactatcccagcacacaggtcacagcgatagtcactgtatcagaatgcaggactcactgccgaacaaaatacagaaaactgcagagtctgcatggctgcaacacacaaagcctttaaaaacaaaagaaagcacggggagctctgccagtaaaaatgaagctacctaaattggacaaagaataggacaaagtgacaagaaatgctaaagacgactcttaagtaaatcacatatgggggaaataatggacatgttgtggtgttctgcgcttcctcctccaccaaaggagtcgaaccaagaggacttgatgaagcttttagagtttttaaaaagggaagaaaaatccaggttgcggggaagggcgggggtggggtggtgcgggtggcgggggaggggcaaaatccacaaaatttaagtcttctgagagccaaacagattttattaataaaaggagccgaagctctcgctcaatgtggggaagagaaagcagcacccatcagcagccgggcagccctggctcgcctccgaggggctcggaataggtgctgtccccgtcgctgggctcggagctccgccgcgcacacacgccccgcgcacccctgtccggtccagcccgtgcagcgcgaggccggctctaggggagctgggcctgggagccagggtcctgcagcacctggaccctcggacaggaagcggctcctctgactgtggctcctgaaaggaggcgagcccggcaaaaagagccagcggggagggcagcaggcgactgcgtgtagaagcggggggcagatgtgggaaggtgtgctcgggaaggggtgggggtagtccggagctgcgcctccgccgacagaagatgctccgggccagcagccagagaaacgccgcgggtcacagagggtggagggcttcagggagcagaggaagcccaacagctgcagccgagcgtccaaaaaaaggtggaggcgggtcccgagcagcccaaactgggacgagagagggcgtgtgggggcggggagggggtgccccagcccagggacccgttagccctcccggctgccggccgagggcctggcggcctctccccgggcccccgagccaccgggcaggcctactccgctcggaggctgcatgcctcccgccgccgggcagcagcagcctccccggggcacggcggacccggtccctcccgccgcgtccccagcgctcggggccagccccggcaccctcccatgagcccttccgggcgcggcccccgctcctcgggctcacgcgcggccagcagtcctaccggcttccagctcagggacccgccgccgccgccgccgccgcctgcgcgaaagtcggcgtcccagaagccgttctggctgccggccgcccgccttccaggccgcgcctgatccgccgctccccctgccggccggcagccatttccgacaggcgactgcggaacttgccgaagggcgccgcgccggaaatggccgaagccggcgttcgcgagcgggggcgcggacgcgggcgcgcgctcgccactttcccgaccgcgtccgaagaccgccgaggcctcccgcagctccgcggtgacacccgggtcaggggcgcggggccgggcgccggggattgtgggaggcgcgggggggcgcgccggccgccttcggagccccccaactcgcgtcctgcaaaggccgccgggccctgtcgagaagacccgaccgcagatggcggggaggatgctcccggcggcgtgggaaccgggtctgactcccgagccaccgccgcttccgcaggggcgccggccccgggaaagtcaagtcataaatccctgaatcta

SEQ ID NO: 40252 - DNA, 2300 bp, Homo sapien
tccctcctctcattctttgctgttagctgattctaatatcctcttttctttctttcttttttttttttttttttttgagatggtatttcactcttgttgcctgggctggagtgcaatggtgcgatctcggctcactgcaacctccacctcccgggttcaggcgattctcctgcctcagcctcctgagtagctgggattacagttgcgtgccaccacacccagctaattttgtatttttagtagagatggggttttgccatgttggccaggctggtctcaaactcctgacctcaggagatccgctcgcctcggcctctcaaagtgctgggattacaggtgtgagccaccatgcccagcctaatatccccttgtctttagaaattgttattataatttattgacagattaaaatttaatgtccaatgttacgatgaaataaaatgttacttgaaaaaatgttagaatgtttaaaggaatctttattctgaaacataattaaaattatgtttataaaaatggtaaaaaggagagaagactattacacctttaatagttaaacatctttgacagaggtagaagctagagaaagtggttgtgcctctgtgaagtcctactcattttatgctacgtgtacccttgtttgtttatatcttatctcttagggtaagggaagttccatgaggtcaaggattatacaccctagattctcccacagttatacttagcatgtcttagccctgttaagagtatggtgaatattttttggaagaattaaaaaaagaaaccgggaatattccctggcatagaatattatgatttgtttctagctgtgttgaatttgagggaaagcaagtggcaagcctctgcagccagtggcagtgaagcttggtgagagagcagggctgggagtgttgctgagggactgagtcgctacaagcgtcctcccatccactgcactttgtatcacagcaacgtggtgcattgccgtctccgtgcacctatctccattttagaagattaggaaaccaaggtctgatagcaaatctgtcagcaaagaaggagaacgaatgcctctcatttctaagtatagtgttctttctaaaagagcaagttactatttatattttaagaaagagcacatgatgtctgctaatggaagataaatgagaagcaaactgggaaatacattttgtctcaggattactgcatctactactggataaagatcaaaagagttctcttcaaccctttcaactctacatttaacaaattgagcttttcagagtctttttttgtaaagtatttccaaagaagacttataggttaggaataaacataaactacccaggttggctaggaaggtatttctgttcatctaaagatgatgcccaggtgtggaacaggataagaaaagaccatggacatctttgtcccatgaatttagttggtcatcgtgttacagggctataatgccgctctagatccagttaaataagaagtggggaggggttgtaaactgcagctttttggggcacttatccatttattaccccaagtaaaagacctataccaaacagcaaacaacatctctgcattgtcattataatgttctttgagacacagccagtgttccagccattgttccatctaagatttaagcattttctagaaatgtatggtggcaggggtgttgaacataacttcttcaagactgacatggttctctttcttttgcaggcctgattgttggcaaaggcatcataagaagctggcatttatttctgttctaacctattactgtataactgtgaatagacactatgcatatttgttggtcagcaaaaccaagaaacaagagctatggcatttgaaaaagtctgtctgattccagggtgtttttcctgggtttcatcatcaggtacctcctccctttcatctcagcaagaatgtggcaccttttatcgtttgataaagattaaggacatgttctttggtcaacagccagaacttaaaatctgctggaatagggtcagagaccatttcagctgcagctgaggaaaatgaaatgttcattttatttggtgccttgtctggggagcacactaactcttctggaaacgtgtcagtgaaacagagatcgttttgtggaatagcaacccatggttatggcgagtgacccgacgtgatctggggggcaggctgcagaggactcatgacaggctataccatgctgcggaatgggggcgcggggaacggaggtcagacctgcatgctgcgctggtccaaccgcatccgcctca

SEQ ID NO: 40253 - DNA, 2300 bp, Homo sapien
gggccccacaaagccagaccctgtctctaaataaataaataataactttggtttacttttctatcttcttcttaggttgcatgcttctgtagggcaacggctatgacttttaattctgcattattaaatgtgtaacacactgacccaggggtaagttgctattctcaaggtttagtgacccgcatccttccccttatataaacagatttatacggggacaatttcggaattgaatccacttttaatactttctctgacttcgcagaaaacagctggctttgcagaatatatgcctgtagcacaatgattatcaagatgagggtaggtgtgttgtgtggtttggcaaagcatgttcagataattatataaatggtaaaaaataaactttttttttttttgagacagagtctcgcgctgttgcaaggctggagtgcagtggcgcgatcttggcttactgcaacctctgcctcccgggttcaagcgattctcctgcctcaagtaaagcttgacaataacttggctgcacaaatatgggttttaaaaggttgagaaacagtgtttcacacctgcctttctacactatgttattaactaattgaatcgagttggaataaactagttagacttgtgtgcacaatgagtcaaatggctcaaatcaaaggtctgaggagcctccatgaaccaggtgcttgagctgtgtgatgttaagacttcaggtataccgagcacgcttcattcagccttggctcatgaagtccctacagtcttagaatggaataccatataacacttctctgcccatctaaatcccatgcagggtttaagactcaacttctccacactctgacctcgtcctgaattccaagggcagtgaggagtctatataacaggatatttaataagtgattacgttctgctggatgttttttactgtctgcttaaatctagccagtctcaacaacagtagggagacaggatactcaagcgccaatcgaatggaaacggattgttaacagcctattataaccctcacgtgggaaccaggacgtccaaacctggttaacagagcccacagagttcatgggcgaaggactgtgacagtcaacctcttgtctgaacaaaaagacccactaacgagtgaaaaaagacctcctgggagggatggggtgggggagagggaattcaaaccttctcaacaacaaaaagcagctttccttagcccactccactttccagctcaataattgctacccctcccgtgcgacgattccctgcccaacgtaggaaaaaaagaggtccaaaaggttatagcatcacctttgccctctgacctaggagcgaagactcaccagtttcataatggacttttggtggttcaatagcagtcactgaactcctcaaacccaggaagcgtcttccggtgcaatctccgccacctgccagccgagagcatcgcgggacttgcagtctttcatcctcacgtcccttccaggggaataatgggaaatgtagtctcccctccaggcatcatgggaactgtggtcgcctttccttttcctccctttcctctccgaacgcctccttccgtcagctcaaattcatcccagccgccaatgcatcctccctctccaccccagcatgatatcatgtcttccttacgggcctggggcccatggtgttctgggatgtgtagtcccgacggctccgactcccctttccctcctcccaaagggaaggcggatgggcacggggcttgccggaagttgtagttcccttggccctctaggcgccgggctccgcaatttttctcaggggaggcaggaactacaactcccagggacgcccggcggcagcaggtgggagaggggctgttgatatcaatatggcggttgtcagccagacaaagacagtcagtctgatgtgattgagacaagggaggtttttcagggggagactgggagataggggcctcccctcccccttctcctcttcctgcgccggcctcaacccctccccagtcccctcccgacgggcgccccacgcggaagacacccctccccctcccgccttccctcctccctatctcagcccttcgtactgggacgttggggagggggctgtgccgggcggagagaactcagcgaggattctgaggtgagtcgagcggttttgaagccggactacctcaagtctctttcctcacttctttctcttcacttaaaacaatttttttggaggggttttggggaggaagtgagcggacgctggggatgggtctcgtaagcggccggattgagagg

SEQ ID NO: 40254 - DNA, 2300 bp, Homo sapien
cagaaagagaaatgttgtacgaagccaagaaagaaaggaaggacttaaggaaggaaggaaggagggaggataggaaggaaggaagagggaagccagaggtttctgtacctgcaggataccagagaaatgagctagtcacatcactctaccttatatgatacatgggtgattttttttaagcttcagcgtaaataaaaacagtaatcactttataccattcaactttacatagtgttatctttaatgccaactgcattcttccctttactcacccaatgcttcttcactgttccattccaccagctttcaggcaaatgcaagacagaacagggtggagtagaagaaaaatacaagcagcgcctttcggcgcaccccctctcccgcaaataatttccaacagttcctcctgctacgaaaataagtcgccctatctccagatacataacagacattccgtctccttagtagacacacacagacgcgtacacaatccagcactcccgacccccaccccaggccccccgaatcttcagcaattattcatctaattcacacgaagacaagatacctctacctactgtttcggggtgaaggtgggtggaggacgcctttcaaagtagccccaatagtgtaaccaaaacacggttccggaataaaatattaagaaacacttttcctttcccacctatctaccgacttgaggatgcaaaaaatccatctccacatcacaccatctctacagttctcgtggctggagtttggggtggagattcgtccaggggagggggcggaggcgagtggcagagtgtgagcgggcgacgggacacaagcgagttgttgagcccggccgcctcgcaccacgtcgccagcccaaacgcccagcaccaggacctcacgcccgcccctcagcccaggcccagagcgagcgaggactcgcgctgtctaacttcccatctacagacaccgctccaagacgagcagagcacacaagtacacgtcacacagtttaaacacacttacacaccccaaacaaaccaacacacctgcaaatcacctcacagtttccagaactccacaccggagaccccacctccaggattcaaaccttccgctcatcgtagaggaaaccagaagagttggggggcagtcgacgcctttccaggaccggaccccacgaactgccccaccccacagcccgcgtctgggtcacccactcggaagccccctgcttcctccctcctctcaatccggccgcttacgagacccatccccagcgtccgctcacttcctccccaaaacccctccaaaaaaattgttttaagtgaagagaaagaagtgaggaaagagacttgaggtagtccggcttcaaaaccgctcgactcacctcagaatcctcgctgagttctctccgcccggcacagccccctccccaacgtcccagtacgaagggctgagatagggaggagggaaggcgggagggggaggggtgtcttccgcgtggggcgcccgtcgggaggggactggggaggggttgaggccggcgcaggaagaggagaagggggaggggaggcccctatctcccagtctccccctgaaaaacctcccttgtctcaatcacatcagactgactgtctttgtctggctgacaaccgccatattgatatcaacagcccctctcccacctgctgccgccgggcgtccctgggagttgtagttcctgcctcccctgagaaaaattgcggagcccggcgcctagagggccaagggaactacaacttccggcaagccccgtgcccatccgccttccctttgggaggagggaaaggggagtcggagccgtcgggactacacatcccagaacaccatgggccccaggcccgtaaggaagacatgatatcatgctggggtggagagggaggatgcattggcggctgggatgaatttgagctgacggaaggaggcgttcggagaggaaagggaggaaaaggaaaggcgaccacagttcccatgatgcctggaggggagactacatttcccattattcccctggaagggacgtgaggatgaaagactgcaagtcccgcgatgctctcggctggcaggtggcggagattgcaccggaagacgcttcctgggtttgaggagttcagtgactgctattgaaccaccaaaagtccattatgaaactggtgagtcttcgctcctaggtcagagggcaaaggtgatgctataaccttttggacctctttttttcctacgttgggcagggaatcgtcgcacgggaggggtagcaattattg

SEQ ID NO: 40255 - DNA, 2300 bp, Homo sapien
tatggaaattgtgtatatgataaaggcagcatttcacatcggaggagaagacagatattcagtaaaaacatacgacatctagctgtccatttgggatgaaataaagccccaattttttatacttgttaagtcaataaaaattctagatggagcaaggattttaaatgtagaaaactattactaggacccctaggttcatcagtaattagaatagttttatctaaatggctttaaatgagacttaaaggagtagaatagcctgtgtgccaaatcatatgtttccagttaagtcctgcaatgtattgtaaaggagaatgatgtgtgcttttggagtcaataagatctaggcttaaatctttttcctactgtttactcagattttttgtgaagtacaaaactacactgagctttagtttcctcaacaatcaatccatcaacataaaatgaaatgaataaagaacatctaccatggggagttgctgtgagaattggatgagattatgttatgtgaaattcgtacccagttcctgcctagaagtgactgttaataaagttttcatgtagaaggacaaagaaacagtgagaccttcaatagctataggacactggcccagagcagatgtttgtttgagaaagatgaagaaatttcttgacatctgtttccatctgcaaacacttattgagagcctactgcatgccatgcattatatttggcactagaacaataaatatcaaaatagaagagattacaactttaaaaaatcttgaatggaaaactcaggtcttataagaaaggaattcaaggccgagcatggtggctcacacctgtaatcccagcactttgggaggccgaggcgggcgaatcacctgaggtcaggagtttgagatcagcctggccaacatgttgaaaccccatctctactaaaaatataaaagtagccaggcttggtggcaggtgcctgtaatcccagctactcaggaggttgaggcaggagaatcgcttgcacccaggaggtggaggttgcagtgagccaagactgcgccactgcactccagcctggttgacaagagcaaaactctgtatccaaaacaacaacaacaacaacaacaaagggattcaagcagtgagaatttttatagtatttgactactcccttaatattgttactcaccctaagaaaacattttctgatgtgctgtagtatcttgtgctagttaaaggaaacatgtaaaagtaatttcctaagaaaaatgaatagcattgtttggctacaaccatgaaagatctatttctcagggtagctattaagagagaatgcattaccagagatggaaaacttaggaaattgctaagtagtgaatgaaatggtgcttatttttttttttaatgtacctctgttttccacttaagtatttttgctggttattagcatttgcttggacttagcttagcaaatcatttgttctcactaaatgaggttgtagagaattcctaggtctgtttagctaatatttggtaaataatataatacaaactatttttttcagtaattttccattaatactctaatgtagagtaatacacttgagatgggcaaaacacttctgagttatcacgtagcctgggcttattgcactccatgtacctaatctattgttctggtattatttacataactaaaattttggttctgatatttaccaaaattgaggaaaatgtaaattgtatgccatatgaaattaggttttatgttacacctatgttcacctactaatacatttagtatctgtaccaatccatttgccatggcacaatcattctagcatgggacataccttcattttcaatacagaagcttatgtagaaatattgcatcttctgagcattctgtataatatgtgctttggtagatactgtcaataaagagacttctttttatctctttttttttagtttgctggaaaccatgtctcattatacagatgaacccagatttaccatagagcagatagatctgcttcagcgacttcggcgtactggaatgactaaacatgaaattctccatgccttggaaactttggaccgtcttgatcaagagcatagtgacaagtttggaagaaggtccagctatggaggaagttcatatgggaatagtactaacaatgtcccagcatcttcctctacagctacagcttccacacagacgcagcattcgggaatgtccccgtcacctagcaacagttatgatacttccccacagccttgcactaccaatcaaaatgggagggagaataatgag

SEQ ID NO: 40256 - DNA, 2300 bp, Homo sapien
taggcacgcggatcactgaacctcttttttgtcattcttcctatgacatttgtggcagaactttttagttgattctgttcacatgaaatgtgacaagcatttttacaccatgagacagtttactacccacatgccacacccattgtctgtctcatcagccagccccgtaactgcacccagaggggtgcagctgcaggggagctgtgcctttctcctctcctgacactcctttcacgtggcaggtttgcaggttggttggccctggtctggacagctgtgtccgtgcctgctcggctgccctccagttggtcggtgtggctggcgtgggcatgtaccccccgactcgcacttgagaagtcttgggatgccggctccctcgactccattttcattttaagtaagagtggctctgtatagccataattaactctcaaattcacattggtgtgctgtgatcaaatgaaggttggactgaatcttttcaaactgtaaccatggtaattgaggggggtggcatagaatgaatatataaaaatataatggcaattgttctgaatgactgagtgtcctcctgacatgtaattagctgttttagcaggatgtagattggcatggtcataattaaaagaatttctgtcttttatgtgattggaaatggcagcgctcccatcccctgttccctcttagcactaatgctcccaagaacatttggaacagcagctccataaactaaaataatgacatggtgctcgtgttctcccctaagtgaaacagcagaatttggagttgtttcagcttcaaaatggaagcctttgattattgttccccatttgacttctaagttctttgaaacttcactcaacatccagttccaacttgctccacctctggcagaaaccacagtcaggaccccagaagaagcccctctgaccggcccccactgcattccagcccatggtctggccagctccgggcccttgcttgcctaactcgaggatgttgctgcttgctgggctctctgggatcttcagatttcccttggttgcttgatatttccattgccgtcactatcagaaagcatttcccaaacagaagtttacagaaaattgaatcgaggtttcctcattgaatcctaagactcaaagcagacaacatgacaggacacatataactaacacaggctttaaacaggtggaggcgtgaatggagtactattcacgacattctaaagctactggagcacgggacacgtgtctgtacgctcctctcacaccccttactcggcagctgccccactcccgccgttgccgttgccctgagtcttccccactgttctgctgtgccagtgtgagcatctccccggcactcaagtccatgttctctccctcccgctcttcctcctgtctcttccatgctccctgttgcacgggacatcatgtgggcttgatgccgtacacagtccctgaccatggccccctactcttctccagaagtgtcacactagacaggagctgctgagtcaccaactcacctttccctagaatgtgggtttgttttttctcccccatcacttgcagaggtcttttttcaattatatgatcaagaatgagtctacaagaataccagcaccagacatagtgccaaatggccttttgtaagctgtttcgtgcccttgaggctcgcacttgtgctgggtgagcccaggaccgttagccttttcttttctaggtctggacactccggggttggttaggctagccactggggagaatacagctctggccttttttcatattttgctgcttctctttgtacagatctttccccctccacataccaaaaggaatcctaacctagttgaaatgctagttgcaattcagtttcatgagaatgctgaagtaggctgctgatttaaaattttcctcttccctgaaaatacacacacctagagaatttagggaaaggctcttagggcttgggaatcttatcttttcattccccacaaaatacctacaaagaaatgtctagtattccctcagtattcctcctcgtataggctctgaaagcaacctcattcccacccagcccttgcacaccggcattcaagatccatgcatgcagttgttgaaactgttttctttgggatcctatctttatgacaactggaatgattgtagatttatgacctcaaagagtagagcattccttttcctattttcccagctgctaaaatatgactgtctccattagaatttagaatccgtcttaagcttagagatggtaagagctgactggatgag

SEQ ID NO: 40257 - DNA, 2300 bp, Homo sapien
gaaagagcaacataaggccccaggcacaggcacacagcaagatcaccaggcgctgcaccacccagggtctcagtcctagcatcccccagcccctgcgggcacccagaaccttccatccacctgaggaggcacagttgaggcccccactttacccgggtacagaagaaacaaagcttccagaggcccagggaggtcaccagccctgtgtcgtgcaaaaagcattcatcgccctgcccctggggaaggggccaccgggctcctggctcctcagggctgtcactggcagggctcaaaaggggccgggcacccccagaaaagttcgccctaaggcagcggctcagctggcccaggatttccggttctcagggttcttgtggctcctgtcggccttggccagggcagctgtcagcgaggccaggttggtggcggagcccgagagggtggcgctccggcgggcctcgggggcacccagccggagtcctgtgctgcgccgccgcacagggcccgtggccctgcggacccggctgggcctgaccagcagcccgtagccagggttacacctgaagtactgcttcccgccgatggaaccgtcattcttacctgcgggggaaggagagggtgatatggagggcagccgagctgcagacggccccctgcacctcccttacctctgcagaggccatgtgcccacactgccacccccccgcacaggccctacacagccagcactcggacactggccattgtctggcagggactggctaaatgaatgtggccagggcctggggtgaccgcctcccaggacagtgagcagtggtgaccaaggatgcacagccccagtcctgcagcctcaggtaggaggtgacaggccctgggggccctggggagtgccttgtggaagcataggtgcaggccagccactaaggcacaaccggcccgcctcgtgcgggaacagacccttctccatctggacccaggcctgggctgggtggcgggagaatggttcttttgctgaatctatgaaatggaaactggcaaaactgccaaatgagggcgagtcagaggccagcgagatgtgtccggatggggtgaggaagagcctcctggaacggcaaaggggagatgctctaaggtgaaggatgagaaagcagagcccagggagtgcagagggcaggggagaccggaacaaaagcgggaacagccatggcgatggggggatgggtacaggatctttgtagccaaaatcatcaggaattttccatgtcgtctccagggactagccctgcccccagcctcacccctgcaggcccagccgctcccgcagcttcagccaagccgctgcctcccggcccctccctctcctgcccggaccctgtcccctcccaggccggccacgttcctgcttccccagacccccggcaccaccctggagcccggagtgcccggtacccacctgagggcaggtcgagctccacgccgacccacgtgccctcttggaagtcggcaggccccacgtatctcaccacgcccgttttgtgggcgcccacggtgacgaactcgccctctcggagccactccgggacctcgtcagcttcctcggaatcagaggccagggcctgtcccccggcgcccggggccggcgcattcccctcggcccccggggagcagccggggtccccagccagcatgcgcgagaaggagcgcaactccgaggcccgcaccctccggacgcggaacggggagccgggcgccggggcctcgaggtcggggcgctcccgaccggggctcacgagctgctgggggccagggggctcctcggcggggacggccgtgggcggtggggggtggctgatgggcgcctcgggctcggcctcaggggcggtgggcatggaccccggcggggccgcagcgtccaggccggggcccagggcgtccgacagggtcgcggtggagacgctgtgggagaagtacccgctagaggcttcactcagggggctggggggcccgtcctgtgcctccggagccggggtgaccgctgtgacagctatgacaggcggtggggaaggcactttggcaggtttgtcgcagatcttcaaggccggggcccccatcgtctgcaccagcacgtcagggcccatctccggctgagcctgcagcaggacggggaagcaggggctgagaacagaaaactttccaacacgaaccaagcaggcagctttgacttggaaaagagcatgaggccaggggcagtggctcagcctgtaaccccagtgcttatggagggcaagacggaagatcgc

SEQ ID NO: 40258 - DNA, 2300 bp, Homo sapien
ccatggagggctgatcttagtgttcagtcacctgatggtgatatccccgggtatacaaggccgcagcttcccagacagatcatgaaatttgaatgcaaaaattaacaaaacattcaagtatgtaaatcagcgtatgattcatggggatgccagcgctcctccgctgaagtatttcagagcttacgttctcgatgatcacgtgttgctctctcccttgttctccttgcttcctaatcaatcctgaccatcacaccatttttaaaaaggataccaagtgctgagagagttcctagggaaaagtggcattctctgaggtgcgcaggacccagatcacttagggcttattgatttttatgattagtacttaggtcgctgctaaaagcagatgggtttccaatacatttctgaaacctaagaggcccttcctccacaatccatcttcaagagcagtggagaactcactgtccccatttcgctgatcaggcaattagtaaagaaaacttgccaggcgcgttggctcacgcctgtaatctcagcactttgggaggccgaggcgggcggatcacctgaggtcaggagttcgagaccagtctgaccaacatggaggaaacaccccctccatctctactaaaaatacaaaattagccgggcatggtggcgcatgcctgtaatccgaactactcaggagtctaaggcaggagaatcgcttgaacccaggaggtggaggttgcggtgagccgagattgcgccaatgaaactcagtctcaaaaaaaaaaaacctcgagttaatcattaggattattcatctgtgcagcactagctcaaactcatattgcacacgattattaaactccagtggtaaagaagtcagtgattatcaggggatcaaagggaacttaaagcatttaaaagatttacatctcatctcttatcagttttagtacaagcaacatttggggtttatttcttccctagatagggctgaagttaaaagtgctttgatggtatcactatttttatggctcaccatgaattttggaatggtcttttaatctatcaactgatgaaatgtctttaatgggaatttacaaataagttgagaatacaataaaatttgataattcagagacttccatcattgagaatttgtaattatttgacttgggtttgactgtaatttatctttaatatctatttaaaatgagagatttggtaatatttactgttatgcactatatgtgagtcagtggaaacacagtctgggagtagagagaagagacaccctctgactatagagttgttcgtgggtttctgtggagaactgagtgaaaaagggtatcttgaggcaaaagagcagaagtggtctcaaagcagaaccgaagggagaattgcagaaggaatacgtctgtattctgtgggaggcaacaggatgcagagtagaaaacatgttaggacagagcttaatgggagactgtaaactgcagtatggaggggctgtccaaatgtgtgtgggggggtatgattattattgttggagaaattaataaaataagcaggatgacaagtagaagaaaagtgctgatcgggcatggtggctcacacctgtaatgccagtactttgggagaccaaggaaggaggattgcttgatgctgggagtttgagtatgggcaacatagtgacatcccgtctctacaaaagtagtaaaaagattagcctcatgtggtggcatgtagctgcagtccccactgctatggaggctgaggcgggagaattgcttgagtctaagagttagaggttacatgcgctatgatggcgcacccctgcactccagcctgggtgacagaaactctgtctcttaaaatagaaaaaaaaagtgctgatgtaatcaagcttatattcaaaggagctttagtaatatataacagttttttttcttgagtatctgtaatttttttttgtttggttaattgaataacttgaaacaaaattgccaattttgtctttactagggccggtgggaaagtcagcaggatgtatcccaaaccacagtttccagaggaatagctcctgcccccgccctctctgtttctccccaaaataaccattctccagatccaggtaagttatcttttcacttgtcaattactgtcagaaatctgagcatctttcagaaagtttaaattagaatttcctgccaggcagccactgttctgctagataatgtccatcgagttgtttcatttctcctcttaacaggttgagttccattggctctggaatgttggattgatcttgcatt

SEQ ID NO: 40259 - DNA, 2300 bp, Homo sapien
ctccatctctaccaaaaaatgaaatataaaaattagctaggtgtcgtggtgcgtacctgtaattccatctaggtgagaggctgaagcaggaaaatcgcttgagcccaggagtttgaggctgcagtgagctatgatcacaccactgcactccagtctgggcaaacagagcgagatcctgtctctaaaaaaacccaaaaaaccttactgccttaaccactcttaagtggttaggtggcgttaagtacatttacattgttgtgcaaccatcaccaccattcatttccgcagctgaaatcttcccaagccgaatctctgcacccattgaatactaactcctcatacccccttctcctagcccttagtaacctccagtctactttctatctccatgaatttgactaccatgtgtatctcatatatgtagaaccatgcagtggttgttcttttgtgtctggcttatttcacctagcataatgttttcaaggcccatcatccatgttgcagcatgtttcagaatttcctttcttttaaaggtatttttagaccggacacagtggcttatgcctgtaatcccagcactttgggagactgaggtgggtggatcacctgaggtcaggagttcgagaccagcctggtcaacatggcaaaactacgtctctactaaaaatatgaaaattagccaggattggtggcacatgcctgtaatcccagctactgtcgaggttgaggcatgagagtcgcttgaagccaggaggtggaggttgcagtgagccgagatcatgccactgtactccagcctgggtgacagagctagatccatctcaaaaaaaaaaaagtatttttatactttttgacaacattgcttgtattgaagatactcaataacaggatggttggtaaaagggcaagtcttaccagctttctgtatttactcatctgtaaaatggttctgagttctattactatcatttaaacacatctaagcaggggtcacaaacccacaaggtccaggcgcatgtgtggtaaagccacctggaggggggccgtggtgaagtggagagacgggtctctgataaaggtggctgctgctatttagttccaatccactctgtccaatatgtaatgtaggcccagtactgcatgcacaaatctgatttcacactctgttacccaagctggtctcaaactcctggcctcaagcaatcctcctgcctcagcatcctaaaatgctgggattccaggtgtgagcccctgcacctggccacaaatctgatttttatgtgttggccaacactgttgggccaaacagaacatgtttgcgtgctggctctggcacccaggccacctgttagaatgtctgccagggctaataaaaagctaattttagtgtggcctcattcattaattcatgcaattaatgtttatgggtctctactaaaggctaggttacacatatgttaatcttatttaaaaatgtacctattttactaggtattagtatcatatccacttttcatattaaagacaagcccagagcggtcaaataacttgcccctggtcacacagtgggaagcgctgaggtgggctttgaactcagatggttttcagagcccaaggtcctgtctcaaaggagggggactcacaggacaatgttaacccgtggacctatggacactcccagaaaacgtgatttgcaacttgtcgtgaaggacgagctcagcaaacaaggccggacgtcaatccaggcagaggaaataacttgagccagggatcaaacactaagattggcaggaaatgagcaggaagaggtagcggggtccctgacgccatctattcaattgtttttcagaagaggtatcagctcttgaaggcttacttctcaatactggctgcgagagcaagaatggtgtgtaatttacaaaagccgtcattgctgtaggtaagttgtagcaaacgactcgcgcccgagcattcccgcccccgccttcgctgcggccccgcccacgacgaccctggggaactacaagtcccgccatacagcggggagcgcccggagctcgcgccggccccgcccccagcccggtccccacccccggctccgcccccggccccctcccgccgggtcaaccccgaagagtcgccggtggccgcggcagacggaagccgaacgagttcctcggcggctgcaggatgggggactccaaagtgaaagtggcggtgcggatacgacccatgaaccggcgaggtgagagccgagccctcctgggccgccggggcggaggcggcaggtgcctggcgcg

SEQ ID NO: 40260 - DNA, 2300 bp, Homo sapien
gagccagcggccgcgctccattcaagctccggggagggggtgggaggaggggcccggagggggcggggagtcagcgcggggggcgggggacagcgcggggggcgggggacggcgcggggcccggaatggaacggggcggggcctggcggggtagtacctagcgccccctcccccgggagcgcggaggagcattaataaacctctaagccgaggagaaaactctggctggggcagtgcgctgagcgccggaggagcgtaggcagggcagcgctggcgccagtggcgacaggagccgcgcgaccggcaaaaatacacgggaggccgtcgccgaaaagagtccgcggtcctctctcgtaaacacactctcctccaccggcgcctccccctccgctctgcgcgccgcccggctgggcgcccgaggccgctccgactgctatgtgaccgcgaggctgcgggaggaaggggacagggaagaagaggctctcccgcgggagcccttgaggaccaagtttgcggccacttctgcaggcgtcccttcttagctctcgcccgcccctttctgcagcctaggcggcccgggttctcttctcttcctcgcgcgcccagccgcctcggttcccggcgaccatggtgacgatggaggagctgcgggagatggactgcagtgtgctcaaaaggctgatgaaccgggacgagaatggcggcggcgcgggcggcagcggcagccacggcaccctggggctgccgagcggcggcaagtgcctgctgctggactgcagaccgttcctggcgcacagcgcgggctacatcctaggttcggtcaacgtgcgctgtaacaccatcgtgcggcggcgggctaagggctccgtgagcctggagcagatcctgcccgccgaggaggaggtacgcgcccgcttgcgctccggcctctactcggcggtcatcgtctacgacgagcgcagcccgcgcgccgagagcctccgcgaggacagcaccgtgtcgctggtggtgcaggcgctgcgccgcaacgccgagcgcaccgacatctgcctgctcaaaggtaaacgagggctccgggcgctagctggagtcggggagatggagggggtcttggcggcctgcgccttattggcacgggaaggagtccccggcgtgattcgtggttgcggggatccccgcgcgcccctttgtgtgtgttggtgtgtaggggtttgcaaggtttctgtgcaagtgcgaggttcaagtcctcagggaaagtgcggacgggtttctccggtcacctgcaattccgcaccgtcctagcgaggccccgtttattgacattaacggtcctagcctcgaggatgaagcgactcctctgcgcggtccatcttgagtcccgggaacagtttccaagtaccacggggcgcgtggggacaagataggcctgttggtttggcgtgctggggccctacactgagccggaccgggagaatcccagaggtggagaaaaggtgaagaggggtgggcgccgaggtacaattggccttgccagtttcactgaaaacaagaccctggcaaatgcagaaagggagattgggttgcacacactgtgtagagcgatctgtatctgcgttcccgctgcccaactccaagctcagcttggaaggtggccaatccccgtcccgggctagatccaggctctgggagcgggaggctgaaggactgggtatctgggggacgccgggcggaaccggtcctctagcgcctgcaaatccgggcagcggagaatgatcaccttttgttcagcccggattttcgactatctgatggcggcgcgtgccggattttagcgagccctggcgaaactctcggcggcgagactgtcttgtcacatttggtagtcggaaatcctggaaaaatcgcgtgctgtccgagtccctggagggacctggcgcccgccacacctgcagggcagggtgggtccgcggccctcgggctagggagcgggcagggcgcgtggggtccgggcgccccccgccgcgctgcgcctccgcctcccgccgccgcattccgcgcattcttccgcgcgggtagggtctgcgcttccgagcccggtaggcagttcagacccccccacacccatcaaagagccgctcctcccccccgcaggcgccttcgccgcctccctcccttcctttcctttccgctcctcttccgacctgtccacccgggaggaagggagctggaaagggggcggaaacctctcccctccaaaaagcacaacaaaactgttcagtgcggaggagccgggttcgccc

SEQ ID NO: 40261 - DNA, 2300 bp, Homo sapien
agcgagttattagatagacccccacagtcccattcagcagaatgggaaactggactcagacaccttttgccctccccacagggaggccacgccgtgcggctttgaccactgatctcccacccggagtgcccgacgcccagggtcctgccaccgggcagcctcggtcagtccacagttgtggctccttccagggcctggactagggtgagcacaagccttgagcgcaacatttaagaagggcgccgaaaagtcagtaatcaaaagaaatatcttgatgcaatgcctctttaaaagaaaaaaaaatgcaaaaaatccatgatgaataaaatactaaattttaaaaagagaaaggatccgtgcagtgccatcgtaagccattttggagcccggagcaaaaggaaatatcaccttgcccaagcggtgcccctacagctcatccgagtagggcccgggggtcgaggcattcggggcccagtgggggacgaggccagtcgaaggtctcggaagtggaggctccgccgagctccggtcggggagtgcagggatggcccccgggaccggaggtgagagctcgggaaagccgctccgcccggaacaaaggcatggggagagggtgagcttgggcgggagagacccggcgggtaccggtgccctcgctgcctgggtcgggcttccacgcgcgccccggaatggaatacgctactctgcagcctccgaaactgcgagcgagtcctgtaactcccttgctctgtgattaattctcactaacaagacttggcaagatgtcgggcgaatgatttttggcttctgcacggtccccaccgcgtgcgtgcacaaacccccagccaaaagccgcctctgggaaattaaatgcaaaagagaaatggggatggggagggctgctacgtgaccaggaaaaagggatgcccagaaacatgaatcggacccagagctgctgaagtcctttcaaaaggtcattctttgcgggtacattttccagggtccagctccgcaacaaatgtggaccctgtcatttcctgaaaggataattcacaactatgcaagatagggtgaagacgtttcccaaacccgaaaaccttgtttttcccccgaccagggttaaataaacatcttttaggaagcgtggacaggagcgcagcctgctctcctccctcggaacaccattccggcaattaatgcctccctttgggtagtaaagcaacaaaccccacacctcactccgatcctgggcttcgggcgggaggactttctctttcatcttccaagcagggggttgcccacgttcttggggaagctataaaactgatttaatggctttagatgaaaatcgatcacgctaatgcatacgctaacgtctcaggaatcgcatattcagaaaggactggccgggccgaaagcgcacggggagtctggggctaggaggtgtcaggccccgctgggtgggcagcagcgctccggtcccctctccacttgggtaaccgggaaaaacctacggggctgtcacgcggggaagcgcgaaggtgccaagggatgaaagctcaaacccgagccctggcctcctcagccggctatttcctttggcgccgcccgcctagcggcggggtgcagcggcggcacaggtgccggtgtcgggctggaggcgcggcgcaggctgggcccgcgggtagacggcgaaaggcgccgcgcgctccattcacaaagtccgggcgctgcccgccgctggcggcgggtcggaggccgcctccctcttcctctcggcctcggttttatgaatgggcctgatggcgagcacccggcgccctgtttactccgctctttgtgacgtcgagttcccgtgaccgggagccagcggccgcgctccattcaagctccggggagggggtgggaggaggggcccggagggggcggggagtcagcgcggggggcgggggacagcgcggggggcgggggacggcgcggggcccggaatggaacggggcggggcctggcggggtagtacctagcgccccctcccccgggagcgcggaggagcattaataaacctctaagccgaggagaaaactctggctggggcagtgcgctgagcgccggaggagcgtaggcagggcagcgctggcgccagtggcgacaggagccgcgcgaccggcaaaaatacacgggaggccgtcgccgaaaagagtccgcggtcctctctcgtaaacacactctcctccaccggcgcctccccctccgctctgcgcgccgcccggctgggcgcccgaggccgctccgactgctat

SEQ ID NO: 40262 - DNA, 2300 bp, Homo sapien
atttttagtagagacggggtttcaccgtgttagccaggatggtctcgatctcctgacctcgtgatccgcccgcctcggcctccctgtttcctctttccattccttcaagggagtatcctgggtcactgtagtcaccctgggaataaatttgtagtccaaaaggactagcctctgtccatgagaagcgcaatctcatagggaacccagaaaggccaatgggcaattgctagtcaaagcttctggtgctatgacagtgctagggtttgtggagtagaagggatagatccctgcctcaggtctgggggctcaagaagggcttcccagaggaagtagcctcaggactttggagttagattggaaatgctggtgcatcttttgcttgggagagactttgagtctaggagccaaggaaggccaagggggtggcccaggggaaatagaatggacagtaggctgcttgacattgcctttaagctctagacaagaaaggaagggagggagggaagaaggcttccttttgccttgccgtgactcaaccataagtctcccttcaaaaaccattctagttcatgaccactcagcatattcaaggacaaggggtgcctttggttcactcctgcattatgactcttgacatatgacaagcagctgggcaaggctcagacccagccaaaacatcttctgtcacaaagccaaaaagaactgcatgagctttttaaaaaatcactactgacaaatcccacaaccagtctcagtgctgaaaggtgagtgaactcaggaatgggagtcaggaaacagcttttgatttaatgtagtgtgtggtcttagccactcatttgactgacttgggccttattgcctcatttaacttataggattaataatacctgccctacttactcaacaagtttgttgggaggataagatcacataataaatatgaaaggtttaaggcatataaaaataaagcccatgactgtgtccagtgttctttcaatgtgttcatgtgcttctgctttggagttaggtattgctcttatccaccactgaatgtctgggctgtcctgtcttttaccctcaactgtcaggcattggtccccctgcccgcattcaccttcccatgacacttgatcaaaagctgctactcatatggccatggctgagccattccaagcactgaatcatgtcatcacttagcatcttcaaagtattcatatggccctttcactttaagacctttaagcccatattccccaagtctattcagagtccaacaccagtggagtgtgccccctacagtggctcagagaggaagccttcatctctggacaccatagtcctgggtttgcccactgtgtctaacagcagtctcccaacctgagcatgtctttcttcttcctgaagatgatcttctggtgcacctaccacaagtgcttggggctgcttcagcaagaatgatggaagcatcaccccacttctgctatactctcttgtctgtccttggggagggttatgccaactggctcattaacataatcagtatagttttgactgtgccctgaccagctaggctaactgcctagctcatatcaagtactcagcaggtgcttgtcaaataaacaattagatctcatcatgggctgagttatgtcctcccaaaattcatatgttgaagtcctaacctccagtacctcagaatatagttgtgtttggagataaggtcttggtattagtctgttctcacattgctataaagaactacctgagactgggtacttatgaaacaaagagatttaattgactcacagttcagcaggctgtacagaaagcatggctagggagtcctcaggaaatgtacagtcacggtggaaggcaaaggggaagtaggcacatcttcccatggcagagcaggagagagagaaagagagagagacagagagagagagagaagaggggaggtgctatacactttcaaacaatcatatctcatgagaattctatcacaagacagcactagggggatggtgctaaaccattagaaaccacccccatgatccaatcacctcccaccaggccccacctccatcactgcgaattataattcgacatgagatttgggagatgacacaaaaccaaaccatatcagtctttaaagagttaagttaaaataagctctttaaagtgggccctaatccagtatgactggtgttcttataagaagaggagatttggtcacagacatggttgcatgcagaataaagacttttcgaggacacactgagaaggcagccatctgcaaa

SEQ ID NO: 40263 - DNA, 2300 bp, Homo sapien
ccatgatctgattagggtcactctgggagctgttttcagactgcagcgcctgtaaacataaatgtaaggaccccagaaataggggcgtcaaggctggagatggcaatcataatcagggagaggagccattggggaagctgaatctccagaggcaagagcaggacccacggagtccagtctcctttacccacacagtaattctcctacaccaccaaccttggaggatggggtttggactcttggcagctgcgcataaggtgggctctcagtaaggcttgtggataaatggaagaagaaagagaaaacaaaaaggatcctactgatggaggctgctggtcaggacagcgatgggcaggcccaggagggagacaggttgcaaacacaggttccctgtgcagaggggagagcagcctgcagagctcccatgtaggggagagcagagcccttgaccccacaggggtccaggtgcctgttctgatcatctccccaacatgcatgcttcattctgtcatctggacccctggggacttcctcttggctgctcattatggttttacttctctttaattcagctttagagctgtaaggagagacatggcataattaatgagttgagcttttagtttttgtcccagctgccaaggctaccgaggtaaagatgcttttgcagtttttttctattgttaaatattggtttactcttcaaattttcccccactttccaatatctatagaatgtacttatgtatgtcctttagggtttgccatctgtcaaaaagcaagtacagatgaggaaggagaggaagcaaagatcagctagggcacattgtggttggaaaatatgccagctgtgattcaattctaaatttactacagattcattgcagaatccaaatcaccttttcataaaatggagaaatattatcttctaatctaacacagagagatcccgtaaacacccagagagcagtcgctgccttcctgttatgaaggcttatgttttctacactattggtcatctatctccaagggcttctggctgtccaagaaactgtgatggagccaaaaacactttccaccagagtccccactatgatggtcacaacatttacttactggttaagactgcaacttccagattgcaactgactgctggtctgtggaatgatttatatatatatatatatatatatatatatatatatatatatattttttttttttttttttttgagatggggtctcaccctgtcacccaggctggagtgtgcagtggtgcaatcttggctcactgcaacctccacctcccagattcaagtgattctcctgcctcagcctcccaagtagctggaattacaggcatctgccaccaggcccagctaactttttgtatttttagtagagatggggctccaccatgttgtccaggctggtctctaactcctgacctcaggtgatccacccacctcagcctcccaaagtgctgggattacaagcatgagccactgtgcccagctgatgattagtatttttatgtgttcttaaacagatctgtattaatttgctatggctggcacaaaaaaattccacagactgggtggcttcaacaacagaaaatatatttactcacaattgcagtggctggaagtccaagatcaaggagtctgcaggactggtttctgctgaggactctttccttgttttgcagatggctgccttctcagtgtgtcctcgaaaagtctttattctgcatgcaaccatgtctgtgaccaaatctcctcttcttataagaacaccagtcatactggattagggcccactttaaagagcttattttaacttaactctttaaagactgatatggtttggttttgtgtcatctcccaaatctcatgtcgaattataattcgcagtgatggaggtggggcctggtgggaggtgattggatcatgggggtggtttctaatggtttagcaccatccccctagtgctgtcttgtgatagaattctcatgagatatgattgtttgaaagtgtatagcacctcccctcttctctctctctctctgtctctctctctttctctctctcctgctctgccatgggaagatgtgcctacttcccctttgccttccaccgtgactgtacatttcctgaggactccctagccatgctttctgtacagcctgctgaactgtgagtcaattaaatctctttgtttcataagtacccagtctcaggtagttctttatagcaatgtgagaacagactaataccaagaccttatctccaaacacaact

SEQ ID NO: 40264 - DNA, 2300 bp, Homo sapien
ggttctattttgatatatagtctggctgttgtctatttgtatattcagtttctcagcaaattgacagccagtgagtctatcattcactctccctctgcctccatattagggctctccaagaaacagaaccaataggaaattggttctgttatatgtgtagaaagagatttattataaggaattggataacatgattatggaggctggcaagtccaaattctgctgggtgcagatatgggagagccaacattccagttccagtctgaaagcagtctactatagaatcaggaagaactcatattgcagatggagtctgaaggcagtccgctggaaaattccctcttgcttggggacactagtgtttttgttctattcaggcattcagctgattggatgaggaccacccacaactgctttactcaaagtccaccaatttagatgggaatctcatctaaaacaccctcacagaaacacccactgtaatgtttgacctgacatctgggcaccacgtggcccagcaagttgatccataaaattaactatcacatccccaaaccctcactcatgaatctcaaggtgagccagtgacttttacttcctctcaagttggacccttgctccatggttacacatcaaggtggtagaaagtctctattctccttagcatctctagaagctaatgcagagccatctctgtgtttatggcaggacttgtgagtagaaatgccttctggagcaccctcattccaattggatgtgagaagaggaaaactcattcaggcatacagaaggacaaagctctcaaattggaggggctgtggcattccacatgccaccccttgaaaagagttttagtatggtcttccaaaccactctattgcctcatttcatctctccaggagggtctgggcccatcttgacagtagcaaggtaggtgtttggaaacctgtcaggatccctcagattccttcaataggggagtctcccagcaccccgagggatcaaagtggtgagcaaaattgcacagttcttttctatcctgcttcactggaacggacaagcaaaggactgagaatcttcaagcaggcaggcagctaaggttgcagggtagcatattatctacaacaagatcatctcattttaaattcgttctttgactcttttaccaggttttttttaatttttcttgtcagtaaagcccataaaatgtagagtcttatcaatagtattcaaagcagatttaaaatgtaattacccttttctccctgctagtacaacccagcctgaatcatctcatctgatttaagaaataatcttgttaagctgaaaaatgaaactctcccagttttttcctcctccctttgtcccttttttcatttttccttcccttttctatttattcactctgagctctctatccaaaaggcatttgttaagcactatgccaataattggtggtataaagatgaatgagaaccatccttgcttttgagatgatcactgtctagtgggggaggtagaaataaaaacaaatctttataaagcatcatggtaaaaatggattcaaactaaatagttctggggaaattgaggcagggatctcaagaaaggtcacattctgcaggttcttgaaagatgagttggagtcttctaagcatacacagggctctaggtggggaaagtgtccagggagtgagacaatatgaggatgataagaataggacttcgaggtgaatccaagacaatgtctacccgggtccatgctgttggactcctttattgcatccatttcctacacaatcaagcgagaatttttattctctttttctatattctcagaaatccacccccactgccttccattgcttgcccaacacttgggctgatgtctttgtcctctgaagcatctttccgatgcatggcagcctctctccttgggcatggctgaccttggcctcatccagctctccatcctagctcggggctgagggccatgagcaattctctgatgaattcgtatgacccagaaagagctgcagcaggagccagctccgtgtctgaggtttaagtgaaatatcgagctgtgattcaccattactcagaacctcgtcagttcataaatttaaagcaactccatttcctttgcttttgaacaatccaaactagatggtggatatacattggaacaatcaggtaggataacaagcttagacctgggcaggtttgtttcccattaggctgataaaggaaagcttatgcttttgtatacctatgtaaaataggcatgctgacgtcctttg

SEQ ID NO: 40265 - DNA, 2300 bp, Homo sapien
caaagaaaccaggaatgttaaagcagacagggttgctacatcagaaaaaaagaagagggaagagttcagtagcctccttaatcatctgccatggagtcagcagctcaggtagtgatcaaggaagcccaaatctagtcttcaggcactcaggagtgggcagttattctaccagctttggctctacgtttctggttccggttaagagtaatgcatcaaaccaatggaccaccaggaccaagggataagcttcaaaaagtacagttctgctcttaagcacttcctccctacaggacccagcccagagacataggcggaggtaatgctgctgctaggtgctttgagccattttgtgctccctcctacctgcccctccttttgccccaaattctagtcccacctgctttgtcatctactacctgcctatggtagttccctctctggtcttcagtgtcctcattggtaaaatgaacgtaatatatatatcccttctgtaatcccatatattcatgcagtgatgtaaatgatgggaaagggctttgaacaatgtggtaagttaaagaggctggggcactgactttctcccactttcccaagtcccacttcagaactgctctcctagggcccaacctcataactcttttctagccctttgataaacatttgcctactgaggggcaaaactacatgacatcccaagaacagagactaatactgtagcccatttcttctctttatttcccatgattttttttttttttaaggagtctcattctgtcgcctaggctggagtgcagtggtgcaatctcagctgattgcaacctctgcctcctgggttcaaacaattctcctgcctcagtcacctgagtagctgggattacaggcacctgccaccacacctggctaatttttatattttttgtggagatggggtttcgccatgttggccaggctggtctcaaactcctgacctcaggtgatctgcccatcccagcctcccaaagtgctaggattacaggcgtgagccactacacccagcccccatgattactcttaaacctagaaactgggaccgttttcctggttggtggagcctattcactagatcaaaagggaggggcataatgagtttcacaatgggcattcagttatggggtgatgcaaggagtgggtgtgtgagataaatgctgaataggcctggggcacattttgactcctgtggacaagtgagtaactagagctctcatgtgaaaagatgtcaagacagctatcttgaatttctccatctcaaccccagccttcacttttttccattccttcctgctctcatcatccagccctttctctcattttttcccaattctcaggctgcaccctactctcctgttccatccaactttttgtttcgtccctacctgtcaacatcatccctgcccactaccctaccttaaggattgccctgcccagctgtcttctgttggttttaacctgtgcatttgccaccactatattcatcagggtcccaatttccactactgccttctttttcaccctacctttcctcctaggcctagtttctagtcctctgtattctagtctccacccccattccagtcaccactaactagtcctgttgggggctcacaaacctcatcctagacacatggtttccctactactgtgacagttcttgggccaggagtgtggactcctggaagcctaacatggtgggcatagggaatgcaagacaatggcaaaccaacagtcagcctcaacagtctgctccttccctctcctgcatgagcagccagacttcattagcctctacatttggaactggcttctccattgaaacttgtctgtaaccacatagcaaactgcaggacaagtagcagagaaggtggaggagaaaagtggaaagcgtataatcaggaggaaaataattggccaaaatcaggtctaatcatgtgtccaatacttcctgagcctgccccttgacagtgagccctttcctggcagtatgcaggggcgattctagtaaccaggctgggttctgagaagctggggcagggcagtacagggacactgttgcctggagacagcagaggacaccattgcctggagatgacagaaggctgaggatggagagaggcactgatagaggccagaccagacaagcagtgccaagtccatagtgggacaccaaagggaggaggcaatcccagatgaggtccatcccagaaccagaccttgcagggacctcaaggagctatgaacatagaaaccctatacatgatatcact

SEQ ID NO: 40266 - DNA, 2300 bp, Homo sapien
gttagaacagtgtggagttggggagaggatctgggaatatggcttcctctcaagtagctttcaccctgtagtgtgtattccaggcatctcccattccagagctgccatttcccgttttttgtttttttttttttgtttttttttagggattctgttatgtacatcaggttgattctcagtttccccctttgctgttctggcatttgtctttcacttaggtctagtcatctaccactagtccatttactttctccttccaaaattctgctgtcatctcctctttcgttttacctgaccacagtcattcacatcatcaaaacaatgtatttattatagttttagtagaattttgggaggctgcaaattctgctaatctgacaggttgaatatagggaattgggtactcacaaaatggtagaaagcgatgcctattacatctgccacattgaaaaatagattgttcatgtcaagcttcatgacagccaggaagctgattagaggatactatcagtttgaaaactcatggtctccatgcctgtgtttactagctgaaggacagagcactgtataagtctagggtctgctttccagattttgctcgagtccctctggttggcagaactgaaattgcttttggcaactatagctgcaagaggttttgggattccttttgctttgcaggaaggcatacctgtttgagggtgaagtggatgttgactgagccaatccacagcatcttccatcaataatccacaacatgataaataggaagactttgtccttattttccaataatgcatagaaattcattttttttttttttttgagatggagtttcattcttgttgcctaggctggagtgcaatggtgtgatcttggctcactgcaacctcctcctcccaggttcaagcgattctcctgcctcaccctcccaagtagctgggattacaggcatgtgccaccactcccggctaattttgtatatttagtagagatggggtttcgccgtgttggctaggctggtctcgaactcctgagctcaggtgatccacgtgcctcggcctcccaaagtgctgggattacaggtgtgagccaccacacccaacctaaaaatttcatttttgcacatgaatgccagacataattttattgttttgactcctcctttcaaagtctcttgtcagtatgttttaaattttttagtttgtgaaatagtttaaatagttttgatttttaaaattatgaaatacctaaagtatttaaacatacagaagtgtacaatgaacctacacatagtcatcacccagttttattgaatctttatattttgccatatttgctacaaatcccccactcccagtaataaaacattaggaatagagctaaaatctcttttctttctctctccctagactagatacttatttgaatttggtgttaaatccttcccatacatgttttcatgttgttattatatacatatatagacattaacagtatgtagtactgttttgccttttttaaaggtttatgtaaagctgtcatacaaaacattctgcaacttgtattttgtttaaaatgtttttgccatctatctagtttgatacatgaattctagttcactcattttaactgctatgtaatattccactgtaataggtcagaatgtgttaatttcttcacctgttgatggacatttaaagcattaaatgtgcttcaggaacatgcttatattcttgccattttaattaaccactattattattacacagtagtacaatgtttcaggttaatgaactttttgttcttttgatttagcaaaaatgatgtacaacttgtgctgtagaagcatctggcctgaaatgcagggagatcttaaaagtgtgacctgaattttgttcagaaggcctgaatgttgttgggatagttttgagaaatagattcatcctctcttagccatcctcagaaggcaagaaaggcatttcctatgacgagagtttcgttaggatgaacctttctttctctgacacgatacttactttgtgttcctctgttttcttgctgtttcagacagaatgttgctgcgggatgtaaaagctcttaccctccactatgaccgctataccacctcccgcaggctggatcccatcccacagttgaaatgtgttggaggcacagctggttgtgattcttataccccaaaagtcatacagtgtcagaacaaaggctgggatgggtatgatgtacaggtaatatccactacagtaatggcagtctaaatggggtttttattcagtaaa

SEQ ID NO: 40267 - DNA, 2300 bp, Homo sapien
tggggagcttcctgctgtgtcatttcacggtggtaggcaaaagagaaagggagctgaactcatcccttttatcgggaacccactccccaataactaacccactcctgtgataatagcattaagagctctgccctcataacctaatcaccccttaagagtcccccctctcaacactattgctttggggaataagtttccaacacatgagctttgggggacacattcaaacaatagcatcatgacattaaatgctatctttatatttacaacataactaccaaatttaccttagttttgaacttcagacttttacagtttatctatttatttgacacgtctacctggatgcctaatagtcacctcaaacttaacatgttgagcatagattctctattatctcttatttcagtccttggtcccagcattggttggttccatgccgaggccccactgctctgccatctcttattccactcttcccctaacttactttgcttcagttatggccttgtttgcctcttgtcccccaaattttgttttattcactgctgtatccccaatactgataacagtgcctggcaggtactgttaggtactaataggtgctcaatataataatctggtaaacataaagtgtttttttgagttctgtgagccattctagcaaattatggaactcaagatggggggttatgaaaaccccaatttatttgttgagagggagtctctctccatggtccaggtgcagtggggcagtcttgactcactgcaactttcgcctcccaggttcaagcgattctcttgcctcagcctcccaaatagctgggattacaggtgtgcaccaccacgcccagctatttttcctatttttagtagaggtggggttttgccatgctggccaggctggtcttaaagtcctgacctcaggcgattcacctgccttggccttccaaaatgctgggattacaggcatgagccaccacgcccggcctggaaaccctaatttatagctggttggtcagaagcataggtcacaacctgagacttgtgattgatgtctgaagttggggccatcttgtgggactgaactctttataggatctgaccaaataactcttcctcgaaacacaaagttagggcttttgcatccactgttccccagatgggaagatgagtcccctgatctttgtacggctagttctttctcatcattcaggtcccaagcttcaaaaaccacttcctcagcaaggccctccctgaagttgtgtccccaggctccattatatcaccctgtttttcatcaatgttattacctatcattacctattatttttgttgtttaattggtatgtcgtttgtcctattctatttcaatgagtacagggatcttgtctgtaccatccatgcctaaaacagtgcctggtgcgtattaggtattcaacatatattcattgaatgaatgaatgaatgaatgaatgaatgaatgaatgaaagaaacccaagcctgctagacctcaaaagcccagagaactgttttctctggctggttcttcattcagacgatattttctcctcttgacattttatagtcttccggcctccatgcgcaaggaaccatgtaaaggttctgagccttgaaaccagacaatgtatttccctgttacttttcgcttgaatcttctctgtatttagcaaccagtcatagaacactaaccatgtaccaagcgctatgctaagtgctgaacacatagagctgaataaagcacagaactacccttggtacaattattgaggttttaataatacataatttgactacatttcttagatttcgcgtcgtgacgttttcagcctctcaaactgcatcgcctacgcacagaagcttcccgaatctcagacgagacacaacaaagctgcgcgctgccctcgccccgcccgcgggcgcggcggcgacaggccctcggccccgcccacaccgcggcgccacgcctccaacccgcctccagccgtgcctccccaggcccttggccccgcccacaccgcctcgccccgccccaagccgcgctgtgctccaggggcgggggcccacggcggccactcactgagccccacgggccgcagcggcagtgacgtagggttggcgcacggatccgttgcggctgcagctctgcagtcgggccgttccttcgccgccgccaggggtagcggtgtagctgcgcagcgtcgcgcgcgctaccgcacccaggttcggcccgtaggcgtctggcagcccggcgccatcttcatcgagcgccatggcc

SEQ ID NO: 40268 - DNA, 2300 bp, Homo sapien
tacagtcaaagggggttgttctctggcaggcaggggctggggtcaccaggtgctcagtgaggaagcttttgagccagcatgagccaggagaaggaatttcacaaggtaatgtcatcagttaaggcaggaaccggccatctggatgtgtacgtgcaggtcacaggggatatgatggcttagcttgggctcagaggcctgacatttatttgtttgtttggagacagagtcttgctttgttgcccaggcagtggcacaatcagagctcactgcagcctcgacctcctaggctcaagcaatcctcctacttcagcctcccaagtagctggaactacaggcacacaccaagcctggctaatttttttttcgtttttgtagagatggagtctcactatgttgccagggctggtcttcaactcctgggccaaagcgatcctcctgtcttagcctcccaatgtgctgggatcacatgcctgagtcaccacaccagacttcaaagtggcatattttagagtgacatattctgatcccctttactagcaattatcattattgcaattttacattttttgtgtgtctgtcttcctcaccagtctgcaaacagtacctggttttgcacatctcagcgtctaaccctgtgcctaacacatagtaaatgttctataaataattgtaggatgtgtaaataaaggtgttgaacctgggctttcacttttttttccttgccttgttactaccaaaaagacagccacccaagggactggatttctattaaatccaccctttactgagccctgctgctcctatctctggaggtgggtcctcaccagaaccctagtcctgtataggaaaccaaggagccaagtgcagaccacccaactaaccttaattataggactggggatggagggatggagggagagaggaaaaggcgcagtaaaataatgtgcgcagtggctcacacctgttgtcgtaaccgagcgagttatagagaaacaccacactttgagactaattcaggagtcctttattgccggcgaccgagagacgactacagctcaaaattctctcggccctgaagaaggggctagatttctttttataccttggtctaaatagggaaggggtagtctagctgaagcaatttttacagaagcagaacaggcaaagagttaaaagataaatggttatagaaacagttacaggaaaataaacagttccaggtgcatggggcttaaattatcacaaagagataaacgcaggggctttgggtaccatcaaccgagcgcgttcccaggagctgctggtacagcttgcctcagtatcttatcagtaagcacattcctggatgtgcttggtgtcagtctgcaccagttatgtccttaagggagggggacaaggtgctgcaagcgaagaaaccaaaatggagtctgtcccgctctctcagctaagagcgagtcaatcaggttaaaacaaggtagggtatcaagctgtaatcccagcgctttgggaggccgaggagggcagatccttgagctcaggagaccagcttgggcaacaagatgagagtctcacaccccgccctgtctctacaaaaaacaaaacaaaacaaaacaaaaaaaagccaggcatggtggctcatgtctgtggtcccagttactgcgaggccgacgtgagagaatcacttgagccctggagatcgaggctgcagtagccgtgatcacactccagcctgggcgaaagagaccctgtctcaaaaaacaaacaaaacaatgtgaaattaagccaaaagccatcacacgtgcatccaaaggacggccgctacccgcgaccccttcccaacgcacgcgggaggttgcgggatcagggacaggggcttcagcagggagcccccagaccggccctgacaggaattcaagacctggcgcctgctcattcccccagtcggggcggcggcggcaagcctcggccggcggcgatctgcacacccgcggagaagagaggcagggggtcgaccccacagcccagcccggcgcgtcccccgcgcccccgcgcgagcccgagtcgccggcggaagtgctgcgtcgcgcacttccgggtgttgtctggccgccgtagcgcgtcttgggtctcccggctgccgctgctgccgccgccgcctcgggtcgtggagccaggagcgacgtcaccgccatggcaggcatcaaaggtgggcctgggttgcaggacgcgggagggctggggccggcgggggaagatgggccgggggtcccacgcggcccccgcacttcccctccgggctc

SEQ ID NO: 40269 - DNA, 2300 bp, Homo sapien
tatcacttcattcatgtggcttcaatgtagcacttggcatgcagcaaattcaagttttgctttttggaaacttgcgtaattttttcccccaaatttttgatccaacgtgggttgctgtcaaccagtcacagatgtcaaacccacagatacaaagggccaactgtattttgttatagcagccagaaagaactaagacagtcaaggagggtttccctgagtgtgatggtcagttttttgtgtcaacttggttaggctacattcccaagtcattagtcaaacactaatctagatgctgctgtaaaggtatttttgtggatgtgattaaagcccatcatcagttcactttaaggaagagagattatcctagctaatctgggtgggcctgattcaatcagttgaaggccataagagctgagatgggcttccctgaagaaattcctcctgtgaacaacagcctcaccccttgcatgagagttccagcttagtgtacagattttggacttgcttagctggggctccacaatcatgtaagccaattccttacaataagccttttgatatccatctactactagttctgtttctctggttggaaactgagtatgtgacatccgagacataaagggtcagaaggtgttagggtgggggcaagtggaagcggttgggggtggagagtcagctttgcttttttggagaatgagggtgtgatcgaacacatagaaagagaaagagagaagtaggcaggggctggatgtagctcagagataggttatggaaagcagtttggattttagattttaagaggaaggggaaataactgaatttggctcttatttttaatttttttccattaaaaaaatacattatagaaaaaatatatagagacgggatcatgctgtgttgaccaggctggtctccaactcctggcctcaagcgatcctcccatctcggccccccaaagtgctgggattaccggtttgagccacgcgcctggcctcaatttgtcttttaaaggatgattttgactacaagagaactacttggatcagggttgggggtgggagatgaggaggtgtgatttcagaggccaagtacagaatgagtgaacaactgggagagacacatcggctgagattagagagatggtccggtagacaaaagtgtaagcatgagacccgaggtaggacaagcagaacttgcagatctattacagatgtaggggtgaggagtgccagggtgactcttgagtgtctggcttgagcagctaggcaaatggtgtggatcaaaaaagcagcaggttgcagggaggacggcagtgttaatcgaaagtcatgttctgtaagttttaggttcgatacgactctgagcggagatgtcaattagtcaaccgaatgtcaggtgtgaagatcggcacagagggcagaaccagagacattcattagagagcaaacaggtagagggcacttaacctataggaaggatgcactcatatagagcgagaaaagggccagaaggagccctaatgagtagagaaagacaggctgaaaaggacatcggcgaggtcagagaaatacctttagggtgtaattacgcctacgcgagtgggtaaaatgagggcataatgacgcggactggattgcaataaacagcttttattcttttatcagagacacgatctagctttttagcccaggccggagtgcggtggcatcctcacagctcgctgcagcttcactgggctcaggcgatcctctcgagtagctggggtacaggcgcaggccaccgtgacaggctttttttttttttttttttttttttttttgaagagagggtctcactatgttacccaggctagtctcgcagtctggcactcctggcctcaagcgatcctcctgcctcggcctctcggcctcccaaagtgctggcctgtgcccagtcaatggctgttccaaattagggtctacccatctctatgcagggctaaagtccgcgggcggccccgcaccgctaccaaaagtacagtcctgtgcgcccagacgcgacgcaaacaagagtcgcaagcttccgggtccccgccccaccccggctccgcccctcccccaaccctgccaggctctccaatcgcatgtggaattatcgctctacccaggcggtggtgtcgatctacgttccaattggggccgtaccatggcggagaagactcaaaagaggtgggtttgctgcttgagaaaagccttttctcagctttccgtaggggtggaacctgttcctggtcgccaatggtggcgactcagaaggtg

SEQ ID NO: 40270 - DNA, 2300 bp, Homo sapien
ttatatgtcagtctcatgtgaattttgtgtgtgtggttctgcccccaagtttgtcagtttagcctatgagtttctaaatattctgatgaaacatagtttctgattcttcaggatagagaaccaaagcccggacagattattgcaaacttcactctttggggcttctgcatagccaggctgtcagccttcttctagtggcactctatctcacttgagactacactcaaactgcatcccaaatattctagacaaataagctaagtggtaaggagaacccagacatccatgtgacatgaggtagtaactgggcagggaaaagagagaaaccattttatcaaatcatcttattgcaatctggcactagctcttcgggcaagatgatggatcttcaccagttgaacagtgtaaggtctagaaacagtgatgaaacttcacttcatccataagcacacactgtagtagttatgtatgctgtgtaacaaattacccccaaaactaaaacaacacacatcttattagctcactcagtttctgagaatcaagaatctgtgtgtggcttagctgatgctggggctgcagtattcatttccaagatggcacactaacatggttgttgcccgaaggcctcagttcatcatcacatgagcctctctacaaggctacctgggtgttctcttgacatggcagttggctttctccataatgagtgatcccagagaggatggaagccacaaggcctttcatgacccagtctctgaagttgcacacgatcatttccaatgaatttgatttgttagaagtgagtcactaagtccattctacactgaagggatggggaattaagctgtaccttttgaaggcaatagcatcaaagagttcatgctcatatttttattttttattttatttatttatttatttatttatttattttgagacagagtcttgctctgtcacccgggctgcagtgcagtggcacgatctcagcccactgcagcctctgcctcccaggttctaatgattctcctgcctcagcctcctgagtaactgggactacaggtgtgtgccaccatgcctggctaattttcgtatttttaatagacagggtttcaccattttgcccaggctggtctcgaactcctgacctcgggtgatccacctgcctcagcctcccaaagtgctgggattacaggcgtgagccactgtgcccagcccatgctcatatttttaaactccagcatgtatgtacacatccatttacatctgggtttctcccagtgcactatcagcatctctttagagagtctccacactgggaggaagatgactttgggaaggactgctgtatattaattgccatggcacatgacgtcatcaaaggtcatcttacccacttgaagccccattatgtagtgttttctgacatcaaatgtgtggtttttccaacaccagcaaccgattctccaacaccaactgaatgtccagcaattcagaacagttctggtgctatctggagttagcccagaccccacactcccataaaactacacccacttcatttgccagcatcaaatagggtacccaaactacccatacttctgcccaccccaactccaaattagggtattcccatgatccttcaggctcaataattctctagaatgactcagagaactcaggaaagtgtgtatttactactgcagatgtattacaagggtacaactcaggaacagctgaaagcaagaagtaccaaggccatgggatgggatggaatggcacagggtttccattccttctttgagcacgtcagcctcccagcacagcaccagcctggaagctttccaaatctaatcattcaggagtttttatgatccggtctgtagcccctctaacctccctggagtttgtgggtcagggctgagagttctgatcctctagccctatgttctcattagcatacaaaagacagtacattccggccaggcatggtgactcatgcctgcaatcccagcactttgggagattgaggtgggcagataacttgacgtcaggagttcaagaccagcctggctgacatggtgaaaccccatctctactaaaaatacaaaaattagccaggcatggtggtgggcacctgtaatcccaactacttgggaggctgaggcagaattgtttgaactcgggaggcagaggttgcagtgagccaagatggcaccactgcactccccctgagagcaagactccgtctcaagaaaaaaaaaaaaaaaaacccagtaatttccaagggtctgagaagctct

SEQ ID NO: 40271 - DNA, 2300 bp, Homo sapien
cttctctgaattcaacatcattcaatacgaaagtccacagattatcacagaatctgtacatatttagaaagctcctgaaattgactctgttcctaaccctctgagccaatgctgaatttatagccttatcaaactgaagtagaacttgtaggtggtctgttgagactgtatgagctcatctaggctcacctgaagactgtttcccaaagcggtatttctgtataactgatatgccatggcttaggaaaaattgctcaaactgcctttctttttctttttagcttttttgtttgtctgtttgtttttgagacagagtcttgctctgttgccaatgcttaagggcagtggcacgatctcggctcactgcagcctctgcctcccaggttcaagcaattctcccgcctcagcctccagagtaactgggattaaaggcatgtgctaccatgcccagttatttttttatttttattttttgtatttttagtagagacagagtttcaccatgttggccaggctggtctccaactcctggcctcaagtgatttgcccaccttggcctcccaaaatattgggactacagtgtgagccaccacatctggccttctttttctttttccttgagacggggtcttgctctgttgcccaggctgcagtgcagtggcacaattatagcttactgcagcctcgacctcctgggttcaagcaatcctcccatctcagcctcctcaatagctgggaccacaggcacacactaccatgcctggactcattctatcttattttatttttttcctgagatgaggtttccctatgttgcccaggctggtcttaaattcttgggctcaagcaatcctcctgccttggcctctcaaagtgctgggattataggcatgagccactatgcctggccaaaaaattgcctttgttattcaaacttgcattgatgtactgtggggaaagggctttctgctgcagagcagacagcagccaccaggagcccagcagtatgttcctacttccccaaccacagaaacccagatgaatacgattttgatagaaatggaaggaaagacattagaggtgtggggacaacataagtaaagaagcaagatggccaggcacagtggctcacgcctgtaatcccaacattttgggaggccgaggcgggcagatgacctgaggtcgggagttcgagaccagcctgaccaacatggtgaaaccctgtctctactaaaaatacaaaattagccgggcatggtggcgcatgtctgtaatcccagctacttgggagactgaggcaggagaatcacttgaacctgggaggtggaggttgcagtgagctgagatcgcaccactgcactctggcctatgcaacggaagagtgaaactctgtcaaaaaaaaaaaaaaaaaaaaaaagaagcaagatgacagaaaagcgtacaaggtatgactgtggaaaactgaatgaaccaatccaactagagctgaagatctgtgtgagaaagttaaagtagggctggaaagatggttggattcaggttatggaaggtgcagagggccatgctacagtctatggattttatcttataagcaaaggaaagttactgtaaagttttcaagccagcagcatgagctaaacaacttgtggtgtgtagagcagattaagcacagaagccagtcaggagattattacaagttcctgaactagtgtgacaatgataatgaaggaataaatgcagacatgtgaaggaagaactgacaggtctttcttggaaggtcagatggaatgagtgagggacaagaagaatccaagatggctccagggtttgtggtctcgatgcctggagaatgggagtggcatatgaatgtcaggagacattagacttcattaaaattaaaaactttaaaattaaattaaaaatttttgtgcatcaaaggacattatcaagagaatgaaaagatgatccacggaacaggaaaatatttgcaaagcatatatctgataagggtttaatatccagagtatacataaaaatctcttataactcaacaacaggaagacacacaacccaatttgaaaataaggaaagcggccaggcgcggtggctcacgcctgtaatcccagcactttgggaggctgagacgggtgggtcacctgaggtcaggagttaacagtctggccaacatgttaaaaccctgtctttacaaaaaaatcaaaaattagctgggcatggtggcctgcacctgcaaccctagctactcagaagactaagacaggagaatcacttgaatccaggag

SEQ ID NO: 40272 - DNA, 2300 bp, Homo sapien
tgcaaacaaatgcagtagtgcggtgctctcctgagctacagaaggaaaggcctggtagttaagataaaacacaagtcaaatttattagaatgatccacagtcagcaatggtgatcttcttgctggtcttgccattcctgtacccgaagcactccatggcttccatgatattcatgccttctttcaccttgccaaagaccacatgcttgccatccaaccagtcaatcttgcagtgcagatgaaaaactgggaactgcttgtgttgggtccagcatttgccatggacaagatgccagaacccgtatgcttcagaatgaagttctcaccttcaaatttctccttgtagatagacttgccaccagtgctattgtggcttgtgaagttcatacataccctgacacagaacccctggaataattctgtaaaagcagaaaccctgataaccaaattctttctcttcagtgctcagagcatggatattttctgctgtctttggaacttcgcaaacaactcaaaggagatgcagctcaaagtctcgccgtcaatggcgatgtcaaagaccatggtggggttgactgtgacttgtggcatagggctctgggtggccccagcatctgcaaagcattcttgtttttgacgagcttaacaattttaagaagcactgataaggtatttttcagaatttctctccattagaatttttatgatgtttttcttgagactgacgttataagtttcagggagaaagaccagagacagaaagcgccattttcatcacgtcatatcaaagatatatactgtcagccaggcgcagtgactcacacctgtaatcccagcactttgggaggccgaggcaggtagatcacctgaggtcaggagttgaagaccagcctggctaacatggtgagaccccatctgtactaaaaatacaaaaatcagccaggcgtggtcgtgggtgcctgtaatcccagctacttgggaggctgaggcaggagaatcactagaacctgggaggcagaggttgtagtgagccaagatcgcgccactgcactccagcctgggcaacacagcaagactctgtgtcaaaacaaaaaaacaaacaaacaaacaaacaaaaacacacagagagataacatgattctgtggtgcaaactaacttttgaaaattctatactcctggctgggcacggtggctcacacctgtaatcccagcactttgggaggccaacatgggcagattacctgaggtcaggagtttgagaccagcctggccaacatggtgaaaccctgtctctactaaaaatacaaaaattatccgggcgtggtggcacatgcctgtaatcccagctactcaggaggctgaggcaggagaattgcttgagcctgggaggcagaggttacagtgagccgaaatcgtgccactgcactccaacctggctgacagagtgagactctgtctcaaaaaaaaagaaaaaaaaaattctatattcctctttcggagatccacaactcataattgtatattcaaggctctgagaagtcctgttataaggaaacactcttattattgcttaatctggagttcctcagaccacaaaactttttttggttgccacaaaatatctattaacatattttagaactagtgttctgaagaacatagttgggaaatgtggattcactcattttctagataaaggaacttgcattaagtgagttaagtgatttgtgccaagttacaggactacttagtaacacaactgggtctaaaacccaggtttcctaaattcctgatggtccagtatttttgcatcataccatgtcgtcacctatgaggcaggtcctaaggctgttgaaaaacaataggaaatggcttttaaaagtaattttattgactggctgtagtggctcatccctgtaatcccagcactttgggaggccaaggtgggaggattgcttgagctcaggagtttgagatcagcctgggtaacatggtgaagcctcgtctctacaaaaaatacaaatattagccaggcgtggtagcatatgcctgtagtcccggctactcaagaagctgaggtgtcgagaaacttcctgccgccgcgttcgcacctcgctgctccagcatctagggcatattccaaccttccagcctgcgacctgcagagaaaaaaaaattacttattttcttgccccgtacataccttgaagtgagcaaaaaaattaaattttaaccatgagggaaatcgtgcacatccaggctggtcagcgtggcaaccagatcggtgccaagttctggga

SEQ ID NO: 40273 - DNA, 2300 bp, Homo sapien
tgctccatgacaggcaagaatggccaaagacacagtgctagcatcatgggccaccacggggtcctaagaccaccactcagctattattgctcgggaagacattgccccctcgtggttcctcatgtaattgagggaagctggcagtgcaaagagctgccagttaaggcaatcaatacatccaaacacgtgcaaagtttccacattcactgtagccttatctcttctgaatgtcttgggttgcagtttcaagagttggtttattttcatccaggatacatgtttgttccccttagagagaaatcacattatgacagcaattaaaaaaacatgttttccttatggaaatcttcctgtttcaaaatctccaaacccccaagataaatccaatatgtaaatccaagtatcactactgtttttctcctcataatgcccttaaagcaaatattttccttgctttctataatcggaaagaggattctgagagtatcttggctccataccactttatttttttgtcttttctttttttcccctctgtggagaacagagtctcactatgttgcccaggcaggtcttgaactcctgggctcaagcaatcctctttcctctatctccttaagtgctgagattccaagtgtgagccaccataccactttaaactccctaaagggagggtccttatctgcaactcccacagccacccccgccctatccccagcagcacttaaaccaagtataaagaatgtctggtgggggtggggagaaacagttaagcaaatactgtagttggaaactgttaccggtgcaagacaggagcagcaggctgggatggagaattcctgggaggaagaagtggggcagaacccactgatatatggagttccacatttatacctttgtagcagtcaaatctaagagtttaacacggtggctccacgttgtaatcccatcagtttgggaggccaaaagcaggaggatcacttgaggccaggagctcgagctcagcctgagcaacaaagtgagaccctcatttttctaaaaaaaaaaaaaaccaaaaaaccataagcttaaatgatcgagtattggaaacgctttctaaggccctggaaaaatagaagttttcttaataataatgttagcttccatgtattgtaaacctaaacgaagcaagaataaatgctgggtgctgtatatagctctatcaacctataatcacctcgaaaactcgaggagacacattcagctgctcccatttcacggatgaggaaacaagtacgcaatcctgaagctggtgcaaagcccaggccccctttctttttcaagcgtgcttccagcctctgaagttcctccgtacggacccccagctctgcctgcaataaggaatattcactttgccaacaaatatttattgagtgcctgctatataccccttagcccgtttaaatagccgtgggattaaaaagataaatagggcaggatttttttttttcttccaggaaggagctttctgaagggtgagggagaggccaggtaaacaatcccagaacagtctggtgagagttgggagaggagtcggggggccgcgggacgctcaggaagcgaagcggggaaggctccgggcgcgtcgcaggacccgcgctggagatgggtttgaagccctgtcctgaaaaagccggcccggagtgggctgtccccggtgtccctcgagttctcatgctgtcattcaagcagcagaggaagaaccgggtctggctcgggaagggtgggcttagggccaggggtgcaaatccctcggtaaaagccggcaaactaaaagtcgcacacatcccaggtcccggtccaggccccggcggggcagggtccccgaagtcccggggcgcgcagacgccggggcccccgggggccaagggaacggcgggacccgacctccctgccctcggcctcccgggccctcgccctccgaccagccgctgagtcgggggctggggtcgccgcttccgcccgcggcccgctgcccctccccggcgcgcgccatccggccgccggcccctcctcccgcggggggctccgtcccgcgccccgtccctccgggctgcagccggcagcccacgtccagggagggcggagggaggaggagaggcgcggagaggagggaggggagaggggagggaggaaggcgagagaaagggagctgcttccatcccggacttcccagagcctgcctggagcgcgtactcagcggctctcgggtcccagcgtcccagccgcggcccgcgctcctccgccccgctcctcctcct

SEQ ID NO: 40274 - DNA, 2300 bp, Homo sapien
ctcaagcaatcctctttcctctatctccttaagtgctgagattccaagtgtgagccaccataccactttaaactccctaaagggagggtccttatctgcaactcccacagccacccccgccctatccccagcagcacttaaaccaagtataaagaatgtctggtgggggtggggagaaacagttaagcaaatactgtagttggaaactgttaccggtgcaagacaggagcagcaggctgggatggagaattcctgggaggaagaagtggggcagaacccactgatatatggagttccacatttatacctttgtagcagtcaaatctaagagtttaacacggtggctccacgttgtaatcccatcagtttgggaggccaaaagcaggaggatcacttgaggccaggagctcgagctcagcctgagcaacaaagtgagaccctcatttttctaaaaaaaaaaaaaaccaaaaaaccataagcttaaatgatcgagtattggaaacgctttctaaggccctggaaaaatagaagttttcttaataataatgttagcttccatgtattgtaaacctaaacgaagcaagaataaatgctgggtgctgtatatagctctatcaacctataatcacctcgaaaactcgaggagacacattcagctgctcccatttcacggatgaggaaacaagtacgcaatcctgaagctggtgcaaagcccaggccccctttctttttcaagcgtgcttccagcctctgaagttcctccgtacggacccccagctctgcctgcaataaggaatattcactttgccaacaaatatttattgagtgcctgctatataccccttagcccgtttaaatagccgtgggattaaaaagataaatagggcaggatttttttttttcttccaggaaggagctttctgaagggtgagggagaggccaggtaaacaatcccagaacagtctggtgagagttgggagaggagtcggggggccgcgggacgctcaggaagcgaagcggggaaggctccgggcgcgtcgcaggacccgcgctggagatgggtttgaagccctgtcctgaaaaagccggcccggagtgggctgtccccggtgtccctcgagttctcatgctgtcattcaagcagcagaggaagaaccgggtctggctcgggaagggtgggcttagggccaggggtgcaaatccctcggtaaaagccggcaaactaaaagtcgcacacatcccaggtcccggtccaggccccggcggggcagggtccccgaagtcccggggcgcgcagacgccggggcccccgggggccaagggaacggcgggacccgacctccctgccctcggcctcccgggccctcgccctccgaccagccgctgagtcgggggctggggtcgccgcttccgcccgcggcccgctgcccctccccggcgcgcgccatccggccgccggcccctcctcccgcggggggctccgtcccgcgccccgtccctccgggctgcagccggcagcccacgtccagggagggcggagggaggaggagaggcgcggagaggagggaggggagaggggagggaggaaggcgagagaaagggagctgcttccatcccggacttcccagagcctgcctggagcgcgtactcagcggctctcgggtcccagcgtcccagccgcggcccgcgctcctccgccccgctcctcctcctcctcttcctcctcctcctcctctctaggcacccccgtcccctccttccagcggctgcagcccccagccccaactctccgcgcttactcctgggacgcgcgtcctcgccccatcctttgcttccttccttccttccttcttccttcctcccctggctcccgccctccctctccaggtcgccctcccggggcccgattgtctcggtgccccgctcccggcccgcgccctgccccgtctctcccttgcacttcctgagtcgcccgccgccgccgtcgcagactcgccgcgggagccccagcccaacccgagcccgacagccactgccccggctccagctccagccccacagcccgcggcgcccgcccgagggagccccggcgcccggggaaggctccagtgggctagcgcgccctcgcccagccccgcgccccagccctgcccggcccggcgaggaaggaccgggaagatgaacaacggcggcaaagccgagaaggagaacaccccgagcgaggccaaccttcaggaggaggaggtactgggcggctcggtgtggtggcgggggcgacgcgggacccagtgcgggcggcc

SEQ ID NO: 40275 - DNA, 2300 bp, Homo sapien
agggaaagggtcagtgcagtggttttgtgtaatgccgggcacattaatggcactcacctaatactctatttattttacctgtggctttcagggttagaaagaaaaaaacaaaaaagaggttaagagtttttcaagaacaaaatataaaccaaaaataggaaattaaggcaaaattacctggatcattcaggccaccttagtttcttttcctcaatttctgacattataaacccccctctcttcacggtcttaactgttttgtacacgacatctctcttggacaacttgggttctgaaatcttcctacgtgtccccttactttttacataacaagtgttttgctaaaaagaccgatactttctagagccacatgccattcctacctgaaaaggaacgctgtcagataacaggacaagtaagaggcagcaactgtactgcaatggcccgcgattatacagcgattattatacacaacctcacaaggacggaggagcgtccaggaacagggcaggcaatcccttggtcctggcagctgttaagaggggtcaagcagaaaaatgtgacttttctatacttaattttaatgtgggtatgatttttaggacattgaacctcttttgctacctaccaaaaggaaaaaaaaaagttttctcaactgggtgaataaagaaagatggtttcatataatattctaaccctgagaagcaaacagattgcacatctagctgaaacagaaagatttctgaagcgatgattatcttgatatggtaagtgaattagttaaatatggtaattcctaaaaaagcacacttgtcattatttttaaatttttttaagtggtagggaaaataaatagcaaagcagccagtaaagttcaagaaaaaaaatcagaacacaccattcaactctccatcgctttgaaaaaagaaatgccagtagcattcctacaattgtaattagaaaacatgcaagtaaacaactcttcaaatagtcttttataataaaatagaaaatgtcctcgggtgaaaaagcaatttttggctgactgcaattcatttaggttttcactaccatacaactgggtgacgagtaaaatctcctatttattttgcattgtttggcatagtctcgctcctctaccttctccatctaaatagttaccattttccaagtggacaatgtgcagagaagttgtatgtattaatgaattcctctgcaattttggtttcactatcagaattgaagtttgcacacaacatagtgtctcaacaatgatctcaacattctaacgctttagaatccgtttaccttctgtgttcacctatatcaggatccaatacctgtgtgaatcttttcgggtcatatttagacgtgcactttcctgcatctacacacactctcaagttcctctagaatgtttaagaactcaactgtgtgggatgttaagaagtacgccagaaataatttcttggactccagataacgtacctgcaaaaagagtcatttggtaggataccacaaatatcctactgaattctgaaacgtttgttcctgagtccgactccccttctgaccacatctactcaattttgtttccaccgaaggaacgctccgcagtcacaaaactttcatcatgattacggacgcaccacctaaaatgcatgctcagaagtcaaagtcctatgaaaataccctcgatgagcatttggtgaattgctgcgtttttaaccctcttactctgctcccctcagctgcacggcccctaaaatcacaagcgttcaccgcccaggctcggggtctttgactcagcagagaagaatgtggctgatgagttatctattaatccaaaaaacctcggctagaaagatatttcaccaagaacttttaacacggaaagggagggggcagggaatagaggtatcttttaacgagaactttcccccgagtttcttccttaaactgctccccccccgaccctgaatccatacacaatttccagccccggccctaagtcctgaccctccgagtcccgattatctgaggtcacccaggagtcagctctcggttccacttataaatcccgggcaaacaaagctgagcattatacttacaaaagtctccgaaaagtccttggagttacgcaatttggggcccgcagacgcgcgtggacacaaaaacacacgctcccgagatccaccctccccgggccacactgtggggctgcgtccggggcacgggccatgcctgaaccttcttccaccgccgcgccccgggcccgcgccccgccggccgcccgcact

SEQ ID NO: 40276 - DNA, 2300 bp, Homo sapien
cagcaatggctactagaaggacgaacaattgccctcctttggaagtacggctaatagaagccctagatccgaataagatccgaataagaatatgtaatggaccaggcgcagtgcctcacgcctgtcatcccagcactttgggaggctgaggcaggcggatcacttgatgccagaagtttgagaccagcccagccaacatggtgaaaccccgtctctactaaaaatacaaaaattacccaagcatggtggtgggcgcctgtaatcccagctactagggaggctgaggcaggagaatcgcttgaacccgggaggcagaggttgcagtgagccaagatcatgccactgtactctggcctgggcgacagagcaagactgtcgaaaaaaaaaaaaaaaaagagtatgtaatgtctcccgtggatgaatcatttgttctgagctaagcttgggccatgggccagactccttcctcggagcctgtggggagcaggtgaggaaggagtatggataatggtgcccgttactcctgcacgcgggggagtctagtctcccagcccatctaaagttagactagctcagtgcggatctattatttcagctccttctagtctcttggatcaagtcctttccaagatggcccataatccaagctgtgtaatcttaggcaaatgtaaattagaattggaaacagtggtgctgatgagctaatataaacatttttaaaccagaacaagtcaaaaaggccaaatgaaaggcgcataccattcattggcagaggcccacatggctctctccgttcggcggggagggctttcttccccatcttgctttcccagcacggaaagaacagaagacgagcaggagtgatgccgtccttccaaatcctcaaaggccagcactcccagaggtccttcaaggatttttcatttatctacttggacttcttagtgctaaagagaaatcagtgactagactagatatgtaaataagaactttattctctagacaaacatttgttgtgtctgctgtgtccaagatacaaaaatgaaaaaacaggcctgtgcccctcaggagcttaagttctaatggcagagaactgtggacacatgtacaggagagggagttactgctcatgatcctgcaagaccagcttgctgtgaggagagccaagctgagggcatgtacaggccatgtgcatgctgttcctgtggcataagcaaggccatcaggagagggggggtcagaaggggacagggtgttactggtgttttaatttgctccgcctcttgctgatggatggtgttgagtttagtgatgcagacacagcctgtggccagagttttgctgatggttcagccatgtgctagagagcccagaatacagaatcacgattgaaaattgtcagtttcccagatacactgagaacaggcgagcatgagcaacgctgctgtcactccttacatgcagtgagagtgaggcagctttctttgatggatattcaaagagttgaactgttcttgaaagggaagaaccagcgtttgggagccaagtggggtgtagggggacgtcttctttcaggactcttgaaattttcctggccatggaccgggaccagagcccagaaattataagcacatgtagttacagcctccccagattggagaaggaaatgcaagagagaacgtgacggaatttggagctatttttcccttctcttctgttttgggtggaatggccttgcctgtctttggctgtgagcttgagtcatcctcagtagagtcccaggtgctggtgcccaggtggagcttagagcttaacaaggaggaaaggcactggggctccagaggcccagacagctgcggtggctcctgctgtcacgctggcctccccttagaagaaagccacctgtccatgtcatgctatcacactgcggtgcacccaccaaccagtatgaggctgtgaggtctgcacatcacacctaaggctactaacgccgtaactgtccgtcatacctaaggctaatacggtgagcagctgcagcgtcctggggaggagatgggtaataggtaatcaaatagacataatagtttgggtggtgatagtattcagggaataaataataaggccaggtaagcagctcagtgttgtggtacggccagcacttctggtgccttctgcttcaagttagcaaagcaggcagggtccgcctgagaaggtaacatctcagcaaagacctagaacttcaccagctttatacggggtttctttttcagaacacattccactttagtgaggcttggaaa

SEQ ID NO: 40277 - DNA, 2300 bp, Homo sapien
tttattgagcaccttctttgtgaaagatttaattctgtaaagattctctaattgttagatttctaagtctcaagggaagagatagtgaatatgtgtcaaagttttatttaacgcaagaaatgtagacctgccaagtgagaacagagactattcagagcttgctatagcaataggggcagcgaccacacttgagtttggcagagactcaaaagcaatcgggaagaggggagactttacagtggaggaaaaaagggatgcttctgatgtgttctgatttagggatgttggcaggggaagctggaagttgtctaacttgaagcaggaaacttaacaggattggtttgggaagaatatttggctttctctggctgatactggtgtctgaggacagagaggttaaaatagaaaagttggcagccttcttgagaaaattctgaccattttgagctgattgctgtagaggttatggtttggcttatgtgagttagagtgttattatcatatgcggtttagccattgtccatatgtataagtctctcactcattaataagggagccagcagaatcataaaacggatttctaccagttctgaaaaatgatatttatataatcgttggggaaaggaatgctgaaataaaactgctcagttgatacaaaaccggttaatttttctcagaaaaatgcaaccttaacctttggaattttatctatctatctatctatctatctatctatctatctatctatctatctatatacacactgaattccctgcccctttttcccctaacacctcatcagtttcctaccaattgatgtttgatttcatccttttgtaaatcttctgggccctaatcaattgttattcaaacaaagttacatttcctgtgggtgtcagatgatcaagtaggcttattacaaaattctctagaatgaaactaataaaagtcacaaaatattatcttttgacttttttccaagttttgaataaaattttaggtattttctcacttaattttcaccacagtccaatgcaagtaactcattgtagtagtacaatgattatccccatttccccgatgagaaaactgagccacagtttcagtaacttgaagagtaaccagtaattcaacgacagccacagaatggctgagcactggctgtactgccgctttaggttataagagtgagggaaggcctgccacgctgcaggtttcgggcaatgaaattattttttccactgctttatttccacccatttatctggcttctaaatccaaaatccttttctaagacagttcacaggggtggagggaagaggctgggctgtgctccacatcaggctgcctttgctagctgtgttgtcttgagcaagtcatttattaattagcttcctggccctctgttcttcgcttgtaaaagagctggaaccgcgttctcggtgtgcaggtgctggtgtgtggcgctggggtaaactcacaaaataaccgttgaggccgggcgcggtggctcacgcctgtaatcccagcactttgggaagacgaggcgggcaaatcgcttgaattcaggagttcgagaccagcctgggcaacattgtgagaccctattaatacaaacaacaacaacaataataaccaaaaatagtccgtcgtggtggcactcgcctgtgatcccagctactccggaggctgaggtgggagaatggcttgagcccaggagcggaggttgcagtgagccgagatcgcgccactgccctccagcctgggtgaccgagtgagatcacgtctctaataagaaaaagacaaaaaacacaaagtaaccattgaaagatagcgtcgtcggctgggttcaccacatcccagcgcacgccggagcaggctgtagcagttttaataaagtgtctataaagaaagctgccttccatcttcagtggcgccgcctcccacttcagtccccttctcggccccaccccagcccttccctcgttgtcatggaggccccaggacgccagagcgggatagttccgctcccgcggcaccagaggcggggcacgcaatgacgcatgcgctcgcttggctgccctggcgccgcggtggctgccgggactgagctcctagcacccgatcgggaagtggcgggcggagtcccgggtccagtcgccgcctcagctaccgccgctgccgccgccgccgccgccaccgccagtggtgagaccccgacctggcgggtcagcgctgggcgtgcgtgcgggcaggcgggggcgctgacgagaagcaggaagagggtgcagtgccggcgt

SEQ ID NO: 40278 - DNA, 2300 bp, Homo sapien
gtggactcaaaagtggggagcctctctccctggtaaggggagggcaccactgggatgacttttgccatctcctgcaatggatcgtctgatgttgggtcgaacagaacttcaggagttgatttccctcggtgggtggagcgggatccttccttgactatctgtccctttgctactagcactgctgctgcctgccctcttacccactgtggtaaccaagtgtctatgtatggaaactggtctgagtgtcctgacttaccagttaccttgtgccataccttagaaacaagggacctgtccaggcttccttctgatggccaacccacttctaatgttggccaatctatttcacacaaagttctaagtttccctggtgtcatagtaaccccatagtcgccattaaatcccttcttaaaatttttcaacatagttcctagaggagtaggcttattttgtgtctgacccgtgtttcctcaagacaaaacaccaagctcacaccaaacgcacaccacaaaacaaagaatgggtaaaaagggcacacacgcactttttcagttttcaccaaaccagaatcaaaaccaaaatcagagtatccagtaatccaagccaggtcaaaccaaaaccaaagtgtcaagcaattcaagtcaagtcaaaaacaaaaaccaaagtgccagtacaggcacgccgtgggtgatcaggccatgcttccactcaaatggagtgggcaagttccgaagaccagtcttaccaagtttcaaatgtccggactccaagtgcctgttccttcccggtgttcagccactgcgttgatactccacgggggcctgccacgcactgctctgactaggcgttccaccggggcaattgcctacccaggagcgctcgcaggatccgcgtcgctcaagctggcgggagttccccgcagggatgctccacagggcaggcctaagccccctaaggggctgcctcgactgtccgtcaattacctcgcttcccagtcagggaaccaagaaatatagcaggatgagtcacagacaaaactcctcagacaccagattaaagcaggaagaggttttttattcggccaggagcgttggcagactcgcgtcttgagagccgagctctccgaaaaagaaattcctagcccttttaagggcttacaactctaaggggtctacgtgaaaaaatcataatagatcaagtaagcgtgggaaacgtgactgggggctatatacatcagctaacagaacaaaaagttttacagtgctttctcatacaatgtctggaatttacagataacaccaatagttttggtcaggggttaataatattattattatcttagccaccagggccaggtggtggtgccaaggtcgtctagctatttatcttacttctgtttctttccaactttttgctttctcccttttctcctgtcttataaactagggaaaaggggaggttggggagaaactgagaaggacaacaggagaagtggtgacctcataccataatcctagcattttgggaggccgaggtgagagaatcgcttgaggccaagagttccctaccagtcctggtaacatagtgagaccctatttctaaaaaaaaaataaaaataataaaaaaaataaaaaaaaaaattaaataaataaataaataaattagctgggcgctgtggcgggcacctgtagttcccagctaccgggaaggctgaggagggaggatcgctgcttgagcacagtaggtggaggctgcagtgagcagagatcgcatcactgcacccctgcctgggggagagtgagacccagtctcaaagaaaaagcaagaacaaacaaaagtggtctctggaacaaacctggacaaacaacccttcgaatagaggcaaatttctcttcctggagaagccgtgccactggcaactccccagggggccagctcgggaaaagccagctgaaacgagaggacgttcaccgttcctcgcctcgatccaccggacttcagaaggctacacgcggcaggcgccgctcgggatccaggggccggggtgagaacggaggcggagaaacccctcaggctccgccaccggggcggggaactgggaggcggccccgcctctgggcatcctcctgggtcttgcctagcggcgggcgcatgcttagtcaccgtgaggctgcgcttgcccggggcccgcgcccccctaccccggggaccgcccccgggccgcccgccccacttggcgcgccacttccgcgtgcatggccctgctgccccgagccctgagcgccggcgcgggaccgagc

SEQ ID NO: 40279 - DNA, 2300 bp, Homo sapien
agatacagactgtagaactttctttcctgtcttcctccttatgcatgatgaacacaagatacagacaactatgggaacatctgaactagtcaatataattaattattttatggtatgtcatgctgtaatttatattacctcacccttactgatcttcagattgtgccctaatattttgcacctttgcttggaggataaagttcttagcctatatacaaaggaaagcctctgcggccctagcaacaatctacctctaaaagccttcattcagctttattttatttttagagacagggtctcactatatcgcccaggctggagtgcactggcatgatctcagctcactgcagacttgacctcctgggctcaagtgattctcccacctcagcctcttgagtagctgggagcacaggctacgccatcacgcgcagctattttttttttttagacaggtttagctatgttgcccagaggggtctcgaactcctgagctgaagcaatctgcctccttccgcctcccaaagtgctgagaatacaggagtgagctaccgcgcccggcctcaagctctaaactgcagcaataatcactggtagttcctttgcactcaggttcctaaacttgaaatcccacccttcccggacatccttgcccagattcctaacctttgaacacaacgtaggcgtgacttccttttggaaagccttttgcaagccttctgggtatggttctgcaacaccctgtgtatatctctatcatagcactcaggaactgcattatgtttatttgcttacagggctatctttcccagtttttttttttcttctccatagaaccacaaagtcggataagctgagtttcttgaggacaaattcagtaacttgtaaatatttgaatatccaagagttgtagagtaccaaactgtggagctcaataaatttcagatgaactaaactgaatagtcaggtgggatgctagatggatgggtcaggaaaaagaattttcttttttcttgcaaagtgttgggattacaggcgtgagccaccgcgcttagccaggaaatataatttctttctttcttttttttttttttttgagacggggtctcattctgtcgcccaggctggagtgcagtggtgcaaactcggctcaaagcaacctccgcatgcgggttcaagcaattctcctgcctcagcctcccgaatagctggaattacaggcgaccgccaccacacccggctaatttttgtatttttagtagagacggggtttcaccatatttgccaggctggtctggaactcctgaccttgtgatccgcccgcctcggcctcccaaagtgctgagattacaggcgtgagccaccgcgcctggccaggaaagataatttccaagtacgaaatgttgtagattgggaggacctcagtagcttgggagaagtgcacagtggtgagttataggacggcaatgaggtcatggaactatgaagtcaaggttaacaataacgcgtgcaggcaaaactgaaaaggggcggaacaaggggtagcgggtctccaggacctggcattaggacgtgcgtgttagggggcaggtatttggagccaggccccactttcgagttgtctttccgcaggaaccagagactgcggacggggccaggaaccaggaaccgttagggagataaggaaggtgttatagcccacattcatcctatacggccacaaggccggggggcccaggctgcctcctcacagcatcagctttttcttcggcttcatttccctctggaaagcgctttctcacagacgctgcaaagaccgaaggggcagcccctgccctgctaccctccagggagccaccgctctagagcccaggctcctctggacatcatgtgacttgggggacgacttgcctttcttctgaaacacggctacagactataactttaaaacacggggcttagctccccctcaataacgacacggccgtcagtatttaccacgttattgaccctctcccagccggcccgcggcaagaagagttccacttccttcccggaaaacgcggccggaaggggcgggctttccgcctgcaccaggcgcttccgccaccatggcttcacgtggggttgttggcattttcttcctctctgctgtcccccttgtgtgtctggagctccggcgtgggatcccggatataggtaagtgtgactttttcccttcgacagtcacagctgggtaattttcacaggaatgttgcatagaacgaccgcctcttcggctgcgtggcttcggagcagctttg

SEQ ID NO: 40280 - DNA, 2300 bp, Homo sapien
ttttgtgttttgttcaactggtttgctgctatttacaagctgttgagagcaggagctcttccagccttatttccaacaatataatctatttctgttgctaggagaatttatagctttccaaacagacaatgaatggtctttcactcatttgtctactggcacacgcacaaaaaaattccttagaccttctttcctcttctccaggcaacttcaagcttttgccttgagagaaggttgaaaattcagttcaattaccgcttttctaaagctttctgtaattgttccctaggaggggtaaggcaactaacatatcgctcccataccgtactattgggcaggcacttttaaaacttaatcttcacaaaggtaggccttttattgattttaacagatgaagaatttgaggcttacggaggtttgatgattgcccaaggacatagctagggggttagcaaacacaagaacccttgctttctgatacaggatgttaccttccacttgggttcagccgcagtagtatgtacctttaatagacacagtatgatcatttagcacatgctattcaaggtatctggcagctagcagctgctcatgttacctaactgaatttaggtcctccctcaagtacggcaaagccaaacactgacattggggtttgtagtgaaagtgaggcatttattgcattgcaccaagcaagaagaatcaggcagctcatgcttaagaccccaactccctgatggtttacaggtaaggggttttttgtgtgcttttttttttttttttgaaacagagtttcactcttgtcacccatgctggagtgcaatggcgagatttcggctcactgcaacctccacctcccgatttcaagtgattcatctgcctcagcctcccaagtagccgggattacaggcgcccaccaccatgcccagctagtttttgtatttttagtagagaaggggtttcaccatgttggcaggctggtctccaactcctggcctcggcctcccaaagtgctgggattacaggcatgagccactgcgcccagcccaggtaaggatttttaaaggcagggaggcagaggttacaggcaaagtcataaatcaatacatggaggctatacgtgggtttgatctaaaaagccaggatatctgaagcagggacccacaggtcatagatggattcaaagattttctgatttgcaattggttaaggaggcaaagctttgtgaattcttccaggctcctcaggaagaaatttagaacaaagataggtagtttgagatctccatgccagtggacaccattttccatttggtgaggtccaggtttctgaaaaacaactcagggacatatgtcgtctttagtttctatagggaagcaaacattttgtgaatctaacgtccttggctactgtcttaagctattattaccttcttgcttatcaggttgctcattgacttattgaggaagttaggtgcctggaatgtcccttcagggaactcaagattttcctttatttccatgcttggggaggggggtgcctagatggcccctaagaggggtccctgttctgtctctcaataaatatttgttgaatgaacaaatcattacaactcagtacacattgcagaaaatatagccaagagctctggagctggaagggccacagattatcctacagaacaatcatttcacttttctaatgtcgaaagggaggattcgagatgttaggggctacaggtgaggctggaaataattaatttactccatcaatattgaatgcctgctattgagtgctagactctggggagacaatgttaagggaagcccaagttttccaactccctgtccagagcgctgcaaagtactgcaggaagctaaagtgaggacaaagttcccagagatcaggatatttaaagggagaaccagcagagcttggtctggggcagggtggggaaaagagggaccctggcctcctcggaccgtttctccgccaagccacgcgagggcgctgttctgctcctagggcgccgtgtcccggcggcgccgcctgctcgccttttcccggcggaaatgcccgagcgatgacggaaacccggagggaggggagagaaagagcgagagaaggggaaagacaagtcgggagaggccggtaggcgtgaggcgggcctgaagcggcagcgggcggccttcgtccggcgagagctaggccgaggacccgcgccgcgctccccggcacctcaccgcgtccttcaccgactcccgcggcgcgcggccgggcggggaagggcgggcgggggt

SEQ ID NO: 40281 - DNA, 2300 bp, Homo sapien
tgagtaagaatgggtttgctttgaatgattacatataacatatcgatgaatactgtcagcttgttttccaggaaatttgtacgaatttatacttccatgaaccatattaaaaagtgcttacatttgtatagtattaatcattctttcaaatttttgccagtttaaaaagttttttttaatggatcttactgtttatttagtggggttggggcatctttttgtgtttgttgacaattttacctatttttttcctttgagtattgtttatcatgcattttgacctattaaaataatttatatgtaattgacatcatgttttacttttatgttttctgattttcagtcatgctttaaaagtactttcctatgccaagattataaaaacatccattcatttttttttctagtacttttatggagttttttaaatagcaaattttattttggtgtaggtgtaggaatctacatttccattttcttctccattatactccccactctaaagaactacatctcttcatatgtggtcatatttccatgatagcttactgtaagtaataaaatcacaaatggtagtagaatttagaaatcttcaacatagctctcttactgtgaaaaagaaccttatggtacttgtcagtgacatgataacttcatatgttttatagatgtcacaagcaatttctcatcattaattcctgttttaggaaaggtatttttagggtgttacttagctatgaatgtttggtgaacatttatgagaaattattatttacttgttaaatatgcattttgtaaattcattattacatgaggtttcttaggaaattttagaaataatttttataaattattttaaaagtttgcttttattttccaggtttttatttgcatatattatttgcaggaacattcatttcactgcaaaagacgaatagtagtttgctttggctcctgggaaagattttatggaactttttgggttttcctttccctgtttttccacctcacacccctttcctttccttttttttctcccatggtagagggagaagcaaggtaatggtagatagagggagattattttgccttcttatatgtacatgctattattaaacatctgaatatagaaaattaatataagagagctgttatctattgggaaaatgtttttattcctatttagttttattcttccccacctctgcccccagcccccgagatggagtcttgctctgttgcccaggctggagtgcagtggcgcaatctcggctcgctgcaacctccacctcccaggttcaagcaattctcctacctcagcctcctgagtagctgggattacaggtgcccaccaccacacctggctaattttttttttgtattttagcagggtttcaccctgttggccaggctggtctcgaactcctgacctcatgatctgtccaccttggcttctcaaagtaatggaattataagcgtgagccaccgtgcccagcccctatttagtttttttctattatttgtcattttttttctattatttgtcagaattaaacttttatggcaaatactctttattaaggtttctagacgaggagaatttcatgctacgtcatttatattttatttatttgttaatcatccccttctctctttgctttttccgttgaaaacacattttaatcatcattaggttattagctgaactttcaattaaaattactggacacaatgtacctgtattaatagttgtctatagaaacactttttttcaaatttgtcttccttattatttccacagaaaggacatgctctctgaataactgtacagtggccaaaagatttggaaaaggaaaagatgctactgtcacctttgtgcatttcaagaaacctgtagatccatttgttcaagaaaactgtttatgcaatgcactaaattcagagataaatcctttcatctcaaatatttctaactcctatggaaatgtacaaaatggaaacatttctatacctgaaacatacagtggacagacagagcacagtttagcagaaattagagacacttctcaagtacttgcacatgattcagacatttcacttatgcccagtgatgccaaagacagtgttaatggtgaccttttgttaaattggacaagtcttaaaaatattttaagtggtcttaatgcttcttttcctcttcacaacaatactggctcaagcacagtcactacttcaaaatccatcaaagacccaagactgatgaggagagaagaaagtatgggagaacagagtagtactgc

SEQ ID NO: 40282 - DNA, 2300 bp, Homo sapien
ttatgacattatatttttaaggtttaattaggtaataagatttgatcctttgatggtatattcagttattcaacggacaatatacgtctacttgtacttttataagtaaatatttatatataccggaggtcaatttctgtttctgtggtaactgccctacaggtaagcttagcagcttttaatgaagtagaattgaaatacttttgggggaaagtcacacttctatttaagtatatgtatcttttttcgggattatgtcatagtgcaatgtaaatcttagttatggtatttagaatgtcagaatgtcacattttgtgctgatttgcatacttcaatagtctggagcagttgaagcagctaaactatttagctctgggaaggttggaattcccgtaagaattatagtgatctatgtgtaacataacatgagaatcagacttcctgaagtatcaactactagaggtattactaataacaacgggccaaaaaagaggaaaaacttcttcaaaggataatggatcagtacttttagccaatttgtgattttaaattttgcctgatggagttcaatttcactctagtcgaggcattcttgttcttcaccactggcctttctgccatccattctcttttctttatggctgttgcaaattttcctcatctcttcttcatacttgataaaattctccccaaaccttgtccaagctttgaatggaacagtaatagtattacggtaaggtggtctcacctcacttaccttcaggaaaattccatatttattagagcccacatcaaagtagaaccttttattgtccactctgaaagaagtcccctctgggagttcaagcgggtcatcgtctccacctcttcgttcttctatgtctccttcgccatagtcttcaatcagctgaaccaaggcatcacgaaactcaatcattccttgtgctgggaggacaatagtctgttcttggcccaaactgtggccaaaataacctatcatgccagtcccccgcatcatggtttgtctaatccgtaggaagcgaccccgctgattttcctttaggtctaggtaatatttcctattgtccctctcgatatagtctgttttcaggacactgtgaggatgctcttcggaccccaccgagactggtggggagggtgccgagtgcttctgcctccttctggagccttgctctttgctgtggccatgctcttgccggtggcctttcaggcccaggtgggcatagtgctcgatgaagtcccctagacagtccttcagctccgctgccacagacagggagagggtcagtttactctttctgatgttgtcctgccggcctctccctatccagacttcggctatctttaggaagcggccccgggagctttgcttcacgtctaggtaaaacctctttttctggatgtccactcgtttggaggccagctcctggatttcggctgcgcccccggcctgattaggggtggctgaggccgcgtagtgggggtagtgggagtgctgggcctggggatagagtctactcttgcttaggccagagccccctacattcttgcctccgcggccgcggccgccgccgcctccccttcgcctggctctttccatcttcagctgcaagtaacaaacagacacacgggatggggtgggggaggggtgttgagaacaatcgcagacgcccctcggcctgaccgccccgccgccgcccgcgacccccacgccgggcccggctcccccggcgccgcagcgcggggctccagccactgccggccggttggcggccgccgctccggctctgcccgcgctccccgcatccctccgccgcccccggggccgctcccgcacgccgccgccgcccgtcccgcgctccgcggccccaggtctccagccggcgggcactcacatcatctctgccatcaccgccgccgccgatgcccttcacgaccaccgccgccgccaccgccagctctcggcccctctgctgcagccgccgcagccgccgccccccgcctcctcccccgccgccgccgctcgcactgccccccgccggagcagccgggcaggggcatcgcccgcggcgcccaccgcagccgcccctcctgcggccgctgcgggggccgccgcctgacttcggacaccggccccgcacccgccaggaggggagggaaggggaggcggggagagcgacggcggggggcgggcggtggaccccgcctcccccggcacagcctgctgaggggaagagggggtctccgctcttcctcagtgcactctctgactgaagccc

SEQ ID NO: 40283 - DNA, 2300 bp, Homo sapien
tctgaagacaaactaaaaaccattgtattgcacactttaaatgagtgaatcatatgatatattaattatatctcaataaagctgtttaaaaaagaattctgagtggaattggccagatacaaaaaagactaagatggcaaattttatgatatcttactccaattttttagaaacataattcagatcacgtttccctaacaactctccaacagcttcccatctccctcagaatgaaagccccaattttcaatatagcccataaagtcctacacattctggcccctttccctttctggcctgacctctgacctcctctccgctctgctccagctcactaggcctcttaagttgctctctgaacataaagaggcaggttcccccagggcctttgtactttcttctcctccagagaacgtcaaggtaagttctctcacttccttgagctctggactcaaaaattcccttctcagcgaggacgtccctgaccacttattgtaaaactgcagctccctacagccccccacccacaacacacacacacactcttcatccccctttcctttttaatctctattttcaccttctgtcatcctataattttactttttgcctgtctctttccactaaaatgtaagctccaaaaggagagagatgtttgtctgttttgttcattgttggtatctctagtgcctagagcagtccttaataaacatttgttggattaataaagggagaccactgtgggggaaaaaaaataaaagaaaataaaattttagctgaagaatgcaagcccctttaaattatcaggcccagagaggcattagaatgaaaaaacagtcccgtctcactcccggtctgagctggataattatctcttaaagcccacctgctatatgggctctagactggaaccaagaagccataaaatgccatatgctggacacgataactcataccctatgagttacagtgtacagccaatcactaagcaatggtatctctgtaaaccaataacaattcctgaccaactttgtctcagcccactcttccccttcgcctttaaaaacctgcttgtaaccaaggctgaaggagcactccccaaggcaactgggaaatgagtcctgggcagctgtcctcattttggctgaagtaaacactttaaattataattttgtgccccagcctcttccttttaggtagacaccactattcaatgacatcaagatctgaactgtcctacttatcccaatatcccacccctaaaaagaaatgtaccgaaccataaaaagcctgaagtactccgacttacagactcctgtattagcatcctaagaattatattaccctcttcaatagggagtagtatttttcatatcaaacctagcctgagaacaactgagattcaactaggaaaaaaagaaaagaaaatccattaaagactgagtgatttgaactcaaaaatatccatcatcacttgctaaatcatagacagcaggttatttccctcgactttgctgtgcagacctgtagtggctcaatttctgccataataaaggccgtactagaaagagcaatcctaactaagcgcgcaaggtaaacatcaagctggggccgtcaggggcggggaaacactttctgaatggcggaagctccgagagacgcctttcccagctgctccagaggggaaaggaaaagggagaaagtctgtttttccagaatctcccaaacacagcccaggggcctgctccgcgggcctaagcgcctccacgtgtctcagaagcctagcactatagataccccggggcacggagctgggaaaacgggaataggaagacactttaccccgagaagatccagtccaacaggtcttcttcagccggatgactgtggagcgccaccacaagcagggcctgcaacccaggcatccaggctagacaccaaatcagcaaactttattcccgcgctgccgagtacaagccggcgcctccccggcgcacacagtacacatcagctccgggagacctacccgacccgcccctccagcgccgtccccgcccccgttcctgccccacccctttccccgcccccggcccggctcgcctttctcgcggcgctgcaaccctcccaccacagcccatccagccccgcccagcgcgccgcggtgcgcatgcgtggaggccctcgctgccgctgagcacctcgggaagtgtagtctcttcgcaggtgcggctgggcagctagagtcctgcatcccggtggaatccggagaagtgagaacattcccgccgcccggtcctcat

SEQ ID NO: 40284 - DNA, 2300 bp, Homo sapien
caggcccaggttaagtctgctggaggaagagaccacattctttatgagatgagatgtttcagcagaagccatgggagactagatagcccccagcagagccatcaatgaggtcaacagaagaactccaccctagctgaacccagtccaaattgccaacttgcagaatcttgggctaaatgaaccaacaggtcaccaaatgttgaagtggtttgtcatatagtgacagataactgatacaaatctggaaggtagagaggaagaaagtgttctaggccagagttgtacctcccaaaaagtcgagtcagaaatatgggaggccaggctaaagaaaagtaaagaaattagtaggattggatgtttgaaccactttctttcagtaaatcgctagaagcaccatgcagggttcaagtgaacgtatactggaggccagacctgcccaactatgctgctaaatggtgatcttctcctgaagcgctccatcagggtatgagtaacagggaactccccttgccaagacacacagggagtgtgatgaccctgtccctccaaactgcactttgagagaatggaaccttgttttgtagccaactatattatgccaagaacaaaaagatctttgtagcttatcatctgtttttatgttttatataaaaatctaaagcttctatgacatactttcaagaaactgctagaggcaacacgtagaatcccagagtaaagatattatgaagttagagtactttaaaattcttcagttctcacagtgtggatctatcgcccattgaataacaactttaactgttttatgaggtcactgaatatatttttcactataaaagaacatgagagaaaatatttaccttgaaatgctaaaaatgtgttccctttctgtggaatggcatttgttgaaaggaatatcccgggagaggatggattcttgttttagacatagctctttaaatttggcaggacatgtgggggtagggggacagatgggggtggagttgggggagcttggtattcaggtggcacaataccaggtggaggttaaatacctacaactccttatgcctgggatcttttgttccaatagccatagaagcttctttcatttcactttttatttttattttttgcaaaacccattagttgacaaagtgccataaactttgtacaaaatggcctcgttcagcaaatattttattcaaactatgctcctatcagcagtaccacacatgtcataaagtcatggtgaagcaggaatttcagtaaaagaaaaggcgggggtcatgaagaccgaaggatcaaaggagcatggagtagaggaggcgtcacatctgaagtgcacactgtgtgtgcgcgctgcaaggagagagagcgttataaagttgttgttttaatcgctgcttgtcgcctgcgaacatgttgctcccttttaagtgtcaagcaacgggttcacccaaaacttttctgcaccgaggacccgcacgcccggggtcccacctgcccctctctgcctgcctcccaccggcgcctgggcatcctgcgccggctacaggtccttgctcactgaagcgtcacctctcactccccagtaagcctccgcagcccactcggactgcagcctgtttgccgcccgtcctcccattgcagcactcggggcgacagagagggaggaggcgcgcggggacggggacgcccaggaggacccactcgcgggtcccgctccgctccggcagcagcatggggaaaggacgcgcgggccgagttggcaccacaggtaaacaggctggcgaggcgcaggacgctgtcgccgccgcggccacccagcgatttccaggcacgcaactccgcctccagggctctctccctcgcgctctctcccagccgcttgctcgcagccccagcagccgccgcagcatcacttcacacaaaggactgtcacccgcggagcagctcctccacctccacgtcctcctccggtgacagcagccccgacagcagggctcgggcgcggcggcggcgcggggggtggggggacctgtcactccctgtaactgaggcggcggcagcggtttttttgccttttctattttgccttttttttttttgcccttatacctcttcgcctttctgtggttccatccacttcttccccctcctcctcccataaacaactctcctacccctgcacccccaataaataaataaaaggaggagggcaaggggggaggaggaggagtggtgctgcgaggggaaggaaaagggaggcagcgcgagagagccgggcagagtccgaa

SEQ ID NO: 40285 - DNA, 2300 bp, Homo sapien
tctcaggcagttcctgttacattctgtgatcctgcctaatacagtaatttgattccagttgaaaacttccattacatacatgtcttgaatcgggagagttagagccttatactttgttcctctgcaaaactgtaagagcatcactgctgtattaaagggaagtgagtggaaagttgcaaagtgagcctttgagttcaagaaaacagatgaaaatgagcccaagccttggaactacagttctaagttttgagtggtggacagagtgggaaaccacgtagcatgcaaaggggagcggaagggcagaggaaggaagcaaggctacagtgtttggctgtgttctaatgtgctctggcatggagttatcgtgagtggaactaatattacataacactatgtatattttggaagatggctgggaaatagcctttggagccaatggagatttattaaataaaaattacctcaagcttgatttttcatctttaccaagcaccatagtaaattggcatctctgagactcctgcgggagccagaaagctggaatcaaaaattcagaaacatgaaatcaagaaagaactgaaaatctgaatggaaagccagtcacaaaagaataagaagtaaaatattctttaattatgtattatctcctacagatcaaaaggaactttccaccatttcattgaacctgtgagtgaaaatgatcccaaaagtatagagaaaataaagaacagtaagcaaattaattcagtttatatactgtcttttaacctgtttagaaagaatttgagaattgtttgatcctgattatataaaaaagatatatctgtatctatgtctacgtatatattaatacatacaaataaaatttctagaaggaagagtacacaattaacagtggttacttctgaagaatgggaatgggatgttggaggagacagatctgtcacttttcattttatatttctctggtgagatcaagggagcatcttactttgtaaatattaaaaatgctgaaatatgtaggttaaaatgtaattaatctacattcctatttttcagaattaatctgacttaccatctggtcatttttgcttgcttacattttttcttttgcaaaactcattatgttgttttgctaaaaacaattaaaacaatgcatcaaactagtaagaaaaaaaaagtctcaaaccacagagaaagactcacaattaccattagatacataaaattctatgatatatttctttgtacatttctggatcaaataatggcaagatggatgaactgatggatagatggatatatagacatgcatcgatgtaggcagacagtaagatcatagtataattgatattttaatttaacagaaggttaaaactgaaattttgcttttagaggaactattgacctcaaataaatgttttattttcaccttaagacgtatctttttctaaaagatccaaagttaacttgaaaaacatggaagtcgatttttttttttttttttattttaacctatcaagctcaattgactccctctcataaaagtggaggcacagtggctcacgcctgtaatccccgcactctgggaggccgaggcgggcggatcacgaggtcaggagatcgagaccatcctggctaacaaggtgaaatcccgtctctagtaaaaaatacaaaaaattagccgggcctggtggcgggcgcctgtagtcccagctactcggggctgaggcaggagaatggcgtgaacccgggaggcggagcttgcagtgagccgagatcccgccgctgcattacggcctggccgagagagcgagactccgtctaaaaaaaaaaaaaaaaaaagtgaagatattgccacaggtctcaggtcctctttccctgcttcactttctattagttttatcagttaggtttacatttactaagtttagagcatatacaatctttttttctttttttttttttgagacggagtctcgctctgtcgcccaggctggagtgcagcggcaggatctcgactcactgcaagctccgcctaccagattcacgccattctcctgcctcagaccccggagtagccgggactacaggcgcctgtgcaatctctatggtaaccacatttcccagttgactactaccggtaataaaatcaaatggattcagtgctcacaactcttcagtctttgggctactttccattcttgaatttttagctgaattcatctctttggctggattttgtggtaaagtagttttttgcttattttttcccccaagaagggcttacatgggtcttt

SEQ ID NO: 40286 - DNA, 2300 bp, Homo sapien
ctcttcaggttcattcaaatgaaaatgtatcacaaaatcgtaggctcttcccctatctcactgaaaaattactctaaaaatgaccagtaagctgttttgttgaagcaaaacatccagaccctaaacaaaagtagcagaattacaacatttccatagaaatggattttgagcttcttttttttaattggggaaaatcttattttttaaaaaagaatcccagaatacatctttgctttcagtccttcaattctaacataatgccatgttagagaatatgtggtagtgtatactaagcccttatgctgtctcacatccttgggacaaaatatctgttttgaaaggacttctctgaattttgctatttcctgcttactgagcagtggccccctcctgggaaaacagagttatttcagccagtgttcagactccatcttgcatacgtctctgtggaatattaatagtgctactgagatatattcatcatcttttctctgcttttgctgtctttatagcccagtgaaatttatatttggtgtttgtaggaaggctatcagaagctacttggacatcaaacttttaaactataaataatgatggcaagactgctaggatatctttccacagttaaacccattcaacagagtttcgttcttatgacagtgcaaattaaactagaataaaattagtgtgattttaggacagttttaaagtgaacatatttccctccctcccttcccatctacatatcaaggagacactccagactgcacttttatttaaattgcggccatcagaaaataccgtgagaaggtagtgtgtaggtaatggttcagttagcattgaccccagaaaatggaaaaccaagagcaagtcacttttaaagtgaagcaatagattttgaatatggattgttccaactcaccacttcccgaccacaacacaagagtatttcactgtaaattaagagtctaagttaaccacagctgtggtataactctgagaatgttttctctacatgtagacaattctggatccttccgtggtgcccgttaccctggtctttaacttttgtcctttgcaggggaggggtcaatgccttcttatttccttgctctttagaattctccaccagagggaggacaagggaaggagtaggtttcacgcgcagttctgagtaaagtttgaatctgagaaaccccacattcacgaattaaggatctccagttctgtgtctttattctacccctccctgcctgcttttccactcggcagaactgagtgactttcagcggctgcagtaattttaattattctgagtcgtgctccgaactatgttttttatcagttcctctgaaaattaagttgtagtaagagacgtagtttaagggcacccccttagaagaggccaggttattttttaaggaaaagctgaagatttctaacaggcacttactaaacacacacacacacacacacacacacacacacacacgcacacggcgcagacccagcaggagagcgcaacctagcatctttaaggttcgcttagcccttcctgtgcacctggaaggaagccttatcttaaactcccttccacctagagtttattttcgcctgcgtgcgacagggcttttgtacttaagtgagttaaggaatgaaccccgaactcttctgggaaagccaccaacgttccccccgcacccctcccagggttcctgaccacggagactctgcttggggcacaggtgtgggagtcgcaaacttttctctgcgccgtccttttccgcgtggaatgggacggagcagccctcccaggcgctgcctggctgcggaggggagcgggcagcgagagcctcgggtctccgcctgggttcccgggtctccggggcgctggcctcggtctccgcgcagcgtccagcgacccctgtcgggggttcccggcagccgcgccgccaccccccgcccggccagcgcgggaggaaaaggggctgcgcccgggagcgccgagcccaggctcctcccggtggcgtgtccgcgcctcggggtgggggtgtggtggggaagagggagggggcgaggccaggggagggtgcgaaggaggcgcctgcctccaacctgcgggcgggaggtgggtggctgcggggcaattgaaaaagagccggcgaggagttccccgaaacttgttggaactccgggctcgcgcggaggccaggagctgagcggcggcggctgccggacgatgggagcgtgagcaggacggtgataacctctccccgatcgggttgcgagggcgccgggca

SEQ ID NO: 40287 - DNA, 2300 bp, Homo sapien
gcttggtattttctcctatctgcctgacttgaggccacctgaaccccattttggtctttgaaatttagctgaccttggccttggatgaaatgctggtgtattgagtataatagttttggtttaggtcaaaattggggaattcagtgccgtatatttcaactgggtgctttttgaagaaatcataaattaccctagtttagcataaacacctgctgatattgtttctgaatatttacatgaatattgatcattgagatcttactatctttcaatttgaatgctttaaatgcttcaatagatgttttctacaccgtgaaattgtatgtcctttgctagaatctttgtaagagaggtctcactgctttgaagtcaaataaacctagaaaataagcataggaattatttttaaacaccatttactgtgcagattatagagagatgaactcaaggataactcatgttgctcataaacttgtcatagtcatggttacatttatgcaaattggcacaggcttttgttgttgttagttatagtactgcaaacacagtttaagatgttaagaccctttaaatcatgtataattatggactaatttcatcttgaaggaagaagtgataatattcttatctcctgccgtttaaagctgaaacatacctcaaagtagtggagattgtgccctacaaaatataatgtgcttaaagcggattttctcaggacttgaattctaaattttactgcttcagggactcatatgatggctatgtagtatagatttagagagagttttacagactcctattgacataagtgaacaaaatggttccttggaaaccgtttagatgtccaatcacagtaagtgtggattacaggttcagatgcatattgtgtgcagtgatgtgcagcacagtgcttggggaagcctgtggtctgtattaagaacagtgcatttcttctagtgttttaatgactgttgttttaaaagaaaaaaacagtcagcattgaaactactgaaaggtaaagctcctgaaacctaacccaaaaggcatgctctcatagaaaactcttcttagtactttcagtgcggtgatagctgaggacatgtggtatatattacagtgccagggaatccaaacctctgcagtgtggagtcaccatgaaaggctaatctaaaaatgaagtggtagctttgctcgcatcataactctgttacttactggtgcttcctattagcttgacattattagtcttctttgggtgagatagaataaatggaaattcaaaggggaccacagcaggggatatatgggctgccaacccctcccctagcactcccttcctccagcctgtactcagcatttctccctgggcatgacaaacaaagtcttacatagtcattgcaaaaagggctaaaggcagagctgtccatggttaggaaaaaaatgttcaaactgttggttgaaaatcaggtaataacagtcctcttagtgaacaaaacttattagagggctagggaaggaatgctatctctcagcagcaggcaggaagaaattgctgttgaaaagcttacctctctagggaggaatcagatagcagacttcaagcctcaggtccaacccataaggtcccacctacaccaccccccaccccatccccatcccagctttgttagattgctagcatcgatcgctggctttctctgacccaacagtgggtgaaggaaagagactgaaagctggcaaggtgggggtggaagaagactgggacagcttttgtagagaaagaaagaaaaaggaggaaaacgggtgggggccatggggactaggcttaactgatgcctgcctgcctctctttgatttgatggcctttattccttctaattggataaaataggaagtcactggcagtcctgtgtggctggggatactgattttactcagaccagcctgcagctctagagtgtgggtagagagcggggagtgggggttgggagagggggaggaaagagagagaggagagaggacgggcttggatgaagaagggaaagaaagagaaagagactgaagcagagaagagccgcagaggaagaaagtgaatgagcactcaagaaggacaaagaggagtagtcgggggtggggtggaggcagggcggggaagggagtgaccgcccctcctggctgcactcttgcctccggagccctctgatcctgtttgcagtgatgctccgagggcaggcacctgctgctctgtaatgattcagcccctttcagccgtcgtcgcgttaacacaacaggatgctgtt

SEQ ID NO: 40288 - DNA, 2300 bp, Homo sapien
tttctaggaacttgtaactaaatgatatgccagctaacactgttaagaggattagctcagtgtggtcttgttagaatgaaactctaattaggtatctgggaatcctgtgttagacaaacaatcatactgataagttgttttaaggaaatatggtctcttcagaatatgttctccaaaatcacatgaattttaaaggcaatagattgacataaccattggcaagactatgatgaatggagtcagatgaagcaaaatgctgggtagcaggaccttgagaaatgccctttataaaatgtacttgtgcttcttctaatcaatggctcagctctgcctccatctcaagttctcagtcccagaccttgctttcctgaactacatctttttgatccataagcagaacaggatcactgcacaggaaagcagttggggccagagatgagctttgtctgccacactgcctgctctagtgttgagtgtttactcagcagctgtgttcccgcagtcaactgagaattcatcaaagctttgctttcagctcttctctgggtccaaatgagtataactcccccttctgagtagaaattctttttaaatgtcattggttaacttttaaatagtttttctttttttttttttttttttttttgaggaagtctcgctctttcgcccaggctgcaatgcaatggcacaatcttggctcactgcaacctctgcctcctgggttcaagcaattctcctgcctcagccccctgagtagctgggattacaggtgcaggccaccacgcccagcaaatttttgtatttttagtaaatacagggtttcaccatgttggccaggctggtctcaaactcttgacctcaggcgatccacctacctcggcctcccaaagtgctgggattacaggcatgagccactgcacccgaccaacttttaaatagctttaaactgtgacccagattaccttatgtgttgcatcattactggatgggggctcttcatctgccccttccagccagttatcctctcctgtcttttttttttttttttttttttggagatgtagtcttgctttgttgtccaggctggagtgtagtgacacgatctcagctcactgcaacctccgtatcccgggttcaagcaattctccctgcctcagcctcctgagtagctgggattacaggcgcctgccaccacacccagctaatttttttgtatctgtagtagagactgggttttgccatgttggccaggctggtctcaaactcctgacctcaggtgatctgcccaccttggcctcccaaagtctcctgcctttgaacaatgtatttgctgtgcattttccaagaattgatgttcattatataaaatatatctcacaacagataacaaaagaatttttataactatcattgatcctgtagacgtcttcatctagttcacgcacgtaatgggtcatagaattcttgcaggatccacagtttacgggcccactgtatcatgtatttcctaagacaaattggaaagctgggtcgttaggaccaaggcaagttgtttagtcacccaaattactctcctgcaaccaactcattgtcaagaacctagtaggtgtgccctgctggcctagagaatgcaaatgctgagccctgggctctcagcctgaccacggagaaacaagttaatgcactcttctgggaatggtgcatctgaaaacttacaaatatttaactgtctccaataatgaattgacctggaacaattccttattcaataaaaaaagtgctgagttttaatgaaaaataatgaagccatctactaaaatgttaatccatgcaaagcacctggaagagggcccggcacgtagtaagtgcctgtacttattctccacttgaccccttagcaagactccctcccccgccagtcattctcccatcttctctggcctgctgtcttcccagaaaataggacttctacataggactacatcacccaaattcccttgcgagccagcttcagttaggggccagccaatgggaggaagtgtcagggaaccagtaggcgggagaagaaagggtagggaacttccttcctgccccctccgagttttgcctctctcactggcagcaacccagcgcttccattgctgacctctaccgacctctacctgtggtccttcctctactgcagcagagacactgttttcttcctttgttcttccaaccccatgtaagttaatgccttgcctctcttgctggtacctgggtgcttcaacatgccattttttggttccttaatgctgccc

SEQ ID NO: 40289 - DNA, 2300 bp, Homo sapien
attttggcataaatatatattcggtattttcttttccagtgggtattggaagatgaattttttcccgtttccttatatttattttaaaaaaactcaagggtctacaaaattatccatgtcaagaatacttcagaaattgtatattacctattgtgttattgtcttagttcttctttctcagttattgaaataagttctccctgattggatctccacccatgcagccaggaaacaatcgcttaccacatccatcacttctgtctgcacatcatcatgtttcagaggtttttcaattaatcccgtggatgctagggtcactcataattgtaatcctgttaggccttctttatttctccatgagcttgttaattcctgtccatcctgcagtggtctgtaacatagtgctattatcagctctttcgtctttaaaagcctcttgtctaccattttgactaagattgattaactgcactttgctgaaatcaatcattttggattaaaaaaatctatcttctacatttcttctggctacttttgcatggtttcacttttttttttttttttttttgcagttaatcaacctgctgacctggttgctttccttttttggcttcctttctcttgctcttttctttttaaagaactgtctttatctctttatttctcctatttacttgtaggtaacacttttcaggaagaaaagcccattgcaagaggcagtggaataaattctcctttagaacctggccagacacgactcctgtttcctttttcgtaaaatgagaaatgatagtccccctctttggtgatcctctccctcagtagtttctggggtgaaagctttgtgactgactgccaggcactttgcagtgacactgtaacatgcttcatgtgtgtgtgtgtgtgtgtgtatgacacacacacacacatatattttgagacagagtcttgctctgtcacccaggctggagtgcagtggctcaatcttcacctcccgggttcaagtgattctcctgcctcagcttcccaggtagctgggattacaggcaatgtgccaccatgcccagctaatttttgtatttttagcagagacagggtttcaccatgttggccaggctggtctcgaactcctgacctcaagtgatccacctgccttggcctcccaaagtgctgggattacaggcgtgagccaccgtgcccggccacatgcttcttattcatagcctcagactcctctgtattctaatcttaccaggtagacccaaacttagcaacatcttttggaaatactaattaatatctcattttcttctcctaggtactgactttaacatagatagcttacctctgcctcggaaagcccatcatgactgggctgtttttcatgaagagtccccgaaaaacaattataagctctttcataaaccagtgatcaccttgttcaactacactgccacgttcagcaggcattcccacttgccactaactacccaatacttggagagcattgaagtcctgaagtcactccgatacctagttcctttgcagtccaaaaacaagcttagaaaaagacttgctccgctggtgtatgtacagtcagactgtgacccaccatcagacagggacagctatgttcgcgagctgatgacttacatcgaggtcgattcctatggtgaatgtttacgaaacaaagacctccctcagcagctgaaaaatccagcctctatggatgccgatggcttttataggatcattgcacagtataagtttatcctagcttttgagaatgcagtttgtgatgactacatcactgagaagttctggaggccactgaaactgggggtagtccctgtatattacggatcccccagcatcacagactggcttccaagtaacaaaagtgctattcttgtatcagaattttctcaccccagggaactggcaagttacatcagacgactggattctgatgacagattgtatgaggcctatgtagaatggaagctgaagggtgagatctctaaccagcgacttctgacagctctcagggaacggaaatggggagtgcaagacgtcaaccaggacaattacatcgatgcatttgagtgtatggtgtgcaccaaggtgtgggctaatatcaggcttcaggaaaaggtaagcaaatcaaaggtgggcatagagccagcaggctggccatcttgatgttctctgctctcctgcatttccttctgttgttgccacctcatcagtgttcttcattcctatcagaaagaccgggctttgcaggaaggttgaatatt

SEQ ID NO: 40290 - DNA, 2300 bp, Homo sapien
cccagcactttgggaggccaaggcaggaggatcacttgagcccaggagtccaagaccagcctggacaacatggtgagacctcatctctacaaataaacaaacaaacaaaaattagctgggtgtggtggcacatgccattagtcccagctactcgggaggctgaggtgggaggactgcttgagcctgggagttggaggctacagtgagccatgatcacactactgcacttcagcctgggtgacagaggaagaccctgtctcaaaaaaaaagtaaatcaaggtagactcatgagaggggagcccacctttttttttttttgagacgcagtctggctttgtcgcccaggctggagtgcagtggcacaatctcggctcactgcaacctctgcctcccaggttcaagtgattctctggcctcagcctcccgagtagctgggattacaggtgcctgccaccgcacccagctaatttttgtatttgtagtagagacggggtttcaccatcttggctaggctggtcttgaactccttgccttaagtgatccacctgcttcggcctcccaaagtgctgggattacaggtgtgagccactgcacccacctgggagcacacctttaagactaaagtttttaaccaggattctatattatttttataggactaatgatatctaattatatctttaactctgtatgtcaggggcatgatgtaggtctgacttagactcagatctgtgaagtactgtgcagcagcattgcccttcctctggaaagttgacccttcctccactctgagctccacagtgccatttgcccaggacattgaagttcatagaatatcatagggataaagggcattctatgggggcattttttttttaccttttttttttttgagatagggtcttgctctgttgcctacgctagagtgcagtggtgcagtcacggcttactgcagccttgacctcctgggctcaagcaatcctcttgcttcagcttcctgagtagctgggactataggtgcacacccccatgcccagctaatttgtaaaattttctatgcagacagggtttcactatgttgcccaggctggtctcaaactcctgggcacaagccatcctcctgccttggcctcccaaagtgctgtgattaaaggtatgagccactgtacctggcactcatttagttcatttttacaacttttttgaaaagatcattcatttcagatagatgaaaattttatttggaaacttccaaagaataatattgctccaacagcccactgctttattcacttgctgtaaaagacaaataaatcatattcagaattccttatgctgtggcaaaagttggtttccttagtgggcattgggggccacatgatgattatccatttttgattgaagcctgaatcttttattttcttcctaaattttatgggagtgggtggatagtcctggtaatttttattccatttctaaactcctttgaaacttagaagggaatgacttcatataaaagtcttggaattcagtcttctgatggcagagagcattaagtggaagcagaatttgagatttgggatctggttgtagatttgtcactctcctctgatgggctgtgtggccatgagtaagtcaattcaccactctggtcccttccccttccctccccttcctttcctttcttttcctttcctttctctgttacccaggctactcactgcaacctctgcctcccaggttcaagtgattctcctgctgcagcctcctgagtagctgtgactacgggtgcgtgccaccacgcccaactaattttggtatttttagtagagacaggattttgccatgttggccagactggtctcaaactcctgacctcaaatgatccacctgccttggcctcacaaagtgctgggattacaggagtgagccatcacgcccagccttgatttccttacttatgagtgaggtactaggactacatgatctcaatgtttccttttagtttaaaatgtctatgttttttcatgatcaccctgctgcaagactatatttattaaatctgcgctatggctaaaagatgatcttttgttgcagaatttttttgattccttcttatttggagaaatctccagctgctctgatgatagcctaagaagactgcatgctgcttcctctcgatgccaagccagaccctctcacaacctcggatctcagtccttcatggagacctggtcccagcaggaatggcagtgcaggaaattggcgcccagatggttcttccatgtgaagttgtctcg

SEQ ID NO: 40291 - DNA, 2300 bp, Homo sapien
tgtgtattaggcctatacctaggaatttctgggtcacaacgtgtatattcagctctagtaaatatgaacagatgattttccaaagtggctgtcacaactgcacccccaacaatagtgcataacagttctatgtgcttcacggctttgtccttgtgttgtcttgtcagttttaaaatctgtagccattttagtggatgtgtagtatatatcatcatcgtgttcatttgcatttctttaatgactaaaaacattaagcatctttttcacatactgcctggctatttggattcgtcttcggtgaagtgctgtacttattgattgcttttctttcttattgcttttaggagttcttgttatattctaaattcattgttagatacaatatatcaaaaataccttctctcattccgtagatcagttttcattctttttctttcttgagacaggatctaatcctgttgcccaggctggagtgcagtgacacaatcctgactcactgcagccttgacctcccagggtcaagcaatcctcccacctcagcctcctgagtggcggaaaccataggcgtgcaccaccacacctggctaatttttaaaaatttttcgtagagacggggtctccctatgttgtccaggctggtctccaactcctgggctcaagtgatcctctcgtctcagcctaccaaagtgctgagattacaggtgtgagccactgcacccatttcttattttcttaatggtgtcttttgatgaatagagtttcttacttttaatcatatctaatttatcaatcttttctgtgtgtttgatgttttttagatgtggacaccattattatcaacctgttttcatagaaaagttgagtttcttggcaccagagctccgcagggtcgggaccagagggaggcaggcccgaaacagcaaatcgctctcaggcttctgcagtgcacccagcactgcaggacacccagggtcagcacctcctcagattttgagccctaagtacctcatttgccttgccctagacccacccctcccaaaatgctgaattacctccttaggtttattacctcctagactagggcacaataattttatttgagtttttggatttggaactcagtagcttgaagtcaattagctttcctttaccagtgtctagtccgtttgggctactatcacaacacaccttagtttgggtaatgcatgaacaacggaactccactgctcccagtctggatgatgggaagtccaagatcaacaaacacgctggcagattcctcatctgttagcgtctgtgcctcatacaagagaccctctatgtgtcctcacatggcagaagcttgctctggtctctttcataaagacacagtacatttgtaaatttatatagactataaaggcacgaaattcacatatgaatttggggcagggtacaaacattcacaccatagcaaccagtacaatcttttcttgaataaatgactttgacctttttttttaaatttattttatttatttttgtagacagtcttgctctgttgcccaggctggagtgcagtggcttgatctcggttaactgcagcctttacctcctggactcaagagatcctcccacctcagcctcccagtaggtgggactacaggcatgggccaccacactctgctaatttttgcattttttgtagagacagggtcccgctatgttgctcaggctggtatcgaactcctgggctcaagcgatctgcccgccttggcctcccaaagtgctgggattacaggtgtgagccgctgccacgcctggcctgaataggtgactgcatgcgctccagtcctagtccagttggagaagcggagagtttcccctgtcttaaagaagagggcccccgcagccttcccgagaactttccatagggccgtggcctcaggcggactgcgaaccaagatcatcagcagggggcggcccggtgttcttagaacccgggtcccaagagcttgtgaacagggcacgagtgaaaacccggatccaggctggctccgccggaacgcgccccgagctcgcccgcgcggccgcctcttccgctcctgatcggctcttcgggtcttcccggcgcccaggcttgggctcatagggagaaaggaagctgcgctgcattctgcgggacgaaccctgctccgcgcgaggtgagtgcgagcgccgcatcacatctggcctctgtggtctcttggtgggggtaggggcttgatgctgagacacggaaagacgcttttctggtcccacggaagctgggacactacctc

SEQ ID NO: 40292 - DNA, 2300 bp, Homo sapien
ctggcttgatgaagtaaggagctatgttgagaaatcccatgtggcaagaagccacaggcagcctctaggacctgtgggtggcctcccggacacacgccatccttactgagactgtgtccttcttacacttttgttattaaaatggtcttgttactggaaagtggtccccaatcagacccaagagagggttcttggatcttaagcaagaaagaatttgaggtgagtccataagtttcgtaaagtgaaagcaagcttattaagaaagtaaaggaatgaaagaatggctactgcataggcagagcggcaccgagggctgctggttgcccatttttatcgctatttgttcatgtattttttgagactgattcttgctctgttgcccaggctgaagtgcagcggcttgatctcagctcactgtaatctctgcctcccagattcaagtgattctcctgcctcagcctcccaagtagcggggactacaggtgcccaccaccacgcctggttaagttttgtatttttagtagagatggggtttcaccacgttggcccgtctggtcttgaacttctgacctcgggtgatccacctgcctcggcctcccaaaatgctgattacaggcgtgagccaccaagcccagcctatttattgattatatgctaaacacggagcggattacttacgcctctcctttttagaccatatagagtaatttcctgatgttgccatggcatttgtggcgccagtgggagtgtagcagtgaggacgaccagaggtcaaactcattgccatcttggttttgtgggtcttgactggcttctttactgcaatctgttttatcagcaacatccttatgacctgtattttgtgctgacctcatcctgtgatttagatggcctgaccctcgggaatgcagcctagcagatctcagccttattttacccagccactattcaagatggggttgctctggttcaaatgcctcttgacagtctttctttccttttcttttttctttttctttttttttttttgagaggtagttttggttgtcacccaggctggagggccacagcatgatctcggctcactgcaacctccgcctcccgggttcaagcgattctcctgcctcagcctcccaagtagctgggattacaggcacctgctaccacgcccgactaatttttgtatttttagtagagacgggatttcactatgttggccaggctggtctggaactcgcccgcctaggccgcccaaagtgctgaggtacaggcgagagccaccgcgcccggcccggccgacagtctttcttctataatacgatacaaactagtaaagattttctttttcccctggcggaaaagagctgttaggcttccagatttgtttttgtgggttattagacctctacttttcttcttggtattttccctcccttatcaactttgtttgttgtctcaaataggcaatgaggaagacacaggtgtttattattattggaatgctctttccatttggtcagtggtttctcaaagcaggaggaattcaagttctgagtttctaaagtcaggacccggtgccgcacccaacgtgggcgtggggagtggctaagtcagggtctgaggggcagggccggggcctggctgcgagctggggccgggggactcggaggagcggggacccagccccgccgcgccgcctgcagctttccccagcctcctcccagcagaggggaggcccgacagggaggggtcccatcctcatgaacggtcacaaacagggcgctagggaagcacgcccgacccccgcggtccccgcgctccaggattcggcagactgcgcgcgtcctgcctcccgcggatcgcactgggtcccaacagggttcccagctccaggctgcgcccatgaacaagcccagcattgcggacgggcgcgcgcagacgccagcgtggtgaagacgcgggggcgcgcgcgcggcgacgagactgccaggggacgcttcgcaacaccgagagtctcagcgtttctcgagataggtgaggctgcgcgttccggaactggtttcccggaaggagcatgtctgcgcccgcgatccgaccggaagttgcacgctgagccgcggacaccatgcagtcggatgatgtgagtctcctccggttgttcttacacccggggtttgcgcagggaattttgcccattttcggacacttagaaaacgcgtacgcagcgggtctgttgcctcgtgccgctctggatgtgaggcttccggaaccccgattttccaacataggttctcacgcgt

SEQ ID NO: 40293 - DNA, 2300 bp, Homo sapien
tgtctctaaaaaaatattttttaattaaataaaaaataaaaagaaatgaaggcacagagaggctaccgaacttttgcccaaggtcagacagcaaaatggaaagaagggcaggcgagtaggcagcaagacaccgcagatgggacagttgcaagtagtgcaccaagaagctggtgcgctccccaaggtgggacgaaaatactgtatgtccctctaccccataaccacctcctcgcgaggacaaaggacacctgacacgtcacccctccctcgcccctgcgcgcacacacgcccctcaccctaccccaggtcagaagaccccgaagggctttctctggactcctggaaccctggaggcgcaattgacgccttagaggctgaataagagtccctctccgagcagctggcgacacgtctctctcgcgccacccctcccagggtccgaagctcccgcctgtgcagtggcacaaatgaagtttgcctcctcgggctcctgcgaaaccgtggaagctatgagagtcacaaggtcctaaatggaagcagctcctcgggaactgaaggccaatcggacgcaattctaccctccaggaaagcgcaggaagagggaacaagcaatgccgacgcggcgtgggggacccaacacagggcggtcgcacaggcgcgacccttctcgcgccttctcaaaacccaagcaaacaccactggttcctacacccgccgagcccgagtctgcagcctccagctcccctggcccgttccgggcgccgcctgcgacccatgcccaagacagcgctctgctgtccctgcgcacccggcgccgacactggcggggcgggcccaagccggatccgccaacccgacgacccacctccctcagggctgccccagacgccagctgggggcttctaccttgacgctagaatttgaattttcaaacgcttgtggctacaggctttaaaacgctagctccagaaaccagctaaagtattgcattgaacagaaaaccaaataccgcatgctctcattcataagtgggagctaaacattaggaacacgtggacataaaagtggcaacaacagacactgtggtctactagagggggcaatgaaaacgggctaagctgcactccaaatcccagcatcccacaacatatccaggtaacaaacctgcgcaggtatctcccaaacctaaaaaattaaagccattaaaaagctctgcattggccaggcgcggtggctcacgcctgtaatcccagccctttgggaggccgaggcgggcgcatcacgaggtcaagagatcgagaccatccttgccaatatttatacaaaaattagctgggcgtggtggcgcgcgcctatagtcccagctactcgggaggctgaggtaggacaatctctcgaaaaccggaggtgggggttgcagtgagccgagatcgcaacactgcaactccagcctggcgacaacgcgagactccgactcacaaaagaacaaacacaaaaacacattacacagttggacaacggaaaagcacccgtgcgtgtagcatacagccagaaaaaagggcacccgaaaacggtaaacacaaagccatgaaactaggccacctgttatcataagtaacaagcccacaaatacaagtgttaaatcgatccttgaagttcaggtcagacgggtaatgtgcccacgtcgtaacaaggttcaagggtggcacatctcacacaagcgtatgaacacccaatcatcacgctcatgaactacaaaaggatcatcttatagttgacattaaggagtgccaagtatgtgccactaatttacacatagggtgactaccgtaatgcgatacatccattcttcacgtataaaatcctggatattttcaaagtcccactgagattctgtgattattcttttgtttctaccttagcaaaggaaaacagaaacacaattagcgagcggattattatatatgcaaatttattctctatagttccacctctccgtcattttcccgagcctggatctttattgctttacgaccatacgtcgtgaaataagaaggtgttgcggcagtactggcggaagctagccttgcgttttgcggcagcaatatgagctaggtccggatcctgttagacaccggcgggcgcgagccgttgcaggtacctgggggtggttaagttggtgacatggctcagaagtttatttctttaaatttttaagttttttttctttttagtcttcagaaaggcaacagtagtcttttaacgtcactgttaaaagtgtaagactcttttactccctg

SEQ ID NO: 40294 - DNA, 2300 bp, Homo sapien
tgatacacccccagccccacacatgtatagcctcccccattaatcctagcacttgggaggctgaagcaggcagatagcctgagctcatgagtttgtgaccagcctgggcaacgtggctaaacccagtctctacaaaaaaaaaaaaaaaaaaaaaattagccgggcatagtggtgagtgcctgtagtgccagctactcaggaggctgaggtgggaggatggcttgaacccaggaggtggaggttgtagtgagccaagatcatgcaactgcattcaaacctgggcaacagaaccagaccttgtctctaaataaataaaaacaacaacaaaaaagaatatacacagcctatgttcaaggaagagtaacaacaaaaagcttcatggctgatgaatagtgtgtggtgaaggggagtatttgagtatgaggaagactgaaacaaataaggctagactgaaacactttattttaatagttttttcttttttctttttgaaacagagtagtctcattctgtcgcccaggctggagtgcagtggcacaatcacagctcactgcagctgcatcctcgacttctcgaactccagtgattctcccacctcagccaccagagtagctgggaccgcaggtgcgcaccaccaggcccagctaatttttgtattttttttacaggtggcttcaccatgttgcccaggatggtctcaaactcttgagctcaagcaatctgcccgcctcagcctcccgaagttttgagattataggagtgagtctagactgaaacattttgaatgccacactctagtttacagaactttattcagtaaacactggagaccaacaaacgttatcaagcaaagaaatgttcagatttacattttacagagataattgtgaccagaagggatggacttgagagtgaaatcagagcactgtttctttcaatagccgcatgagaatttgaggggtggggaagacaaggcacattaaaatgaaaatttctgggtccaccctttattgaatcagaatctctgggttcaaggcctgggaatctgcatgttacatctcaaacataggagtgattcttgtaggctctgaagtctgagctatagactagaatcagaatggccagttaggaagcttttgcaattatccaattaagaaatgaaatgtcctgggtgccatggctcatgcctgtaatcccagcaatctgggaggctcaggcgggaggatcacttgagtccaggagttcgagaccagcctgagcaacatagtgaggccactcatctatacaaaacaattaaaaagtagctgggcttggtggcaggcacctgtggtcccagtttcttgggaggctaaggtggcaggactgcttgggcccagaagttggaggctgcagtaagctattattgcaccgctgcactccagctgagtgacagagcaagactctaactcaaaaaagaaaaagagggccgggagcggtggctcacgcctataatcccagcactttggaaggctgaagcaggaggatcacttgaggccaggagttcgagaacagcctgtccaacatggcgaaaccccgtcgctattaaaaatacaaaaattatctgggcatggtggtaagcgcctgtaatcccagctactcaggaggctgaggcaggagaatcacctgaacccgagaggcagaggttgcagtgagctgagatcgcgccgctgcactccagccttggcgatagaggcagactctgcctccaaatacataagtaaataaataacagatctgtaggcggaaaacaatgtggcagtaattgttcctttgccttggtgtccctgggcaaaaggcaggcccccactccggggcatcgctcgtcgccgctccattctctgcagaccgaagtttccccaggcctgggaagactaagtgggaggcgcccaccgtgcgaagatcctcccggcttccagggaagggaggctgggcctgcaaataatagccgggggcaggagaaaggctccgattggtcggagggagggtgacgaacaaggggcggagttttcctggggactggtgggggaagtaaaagggagggggtgtgcaccgccgggtgtcagtttcggaaccccagccagctcacctctgcgccgctgaacccgatccgagcctccggcaaaggtttttccctcctcccccggccgagggcttctgcagcccgggcacccccgccccgcggcgccccacattcccccagcccggggcccttggcgcgtgcgctccgtgcggctgtgctccgcgggactttgtttgtttcc

SEQ ID NO: 40295 - DNA, 2300 bp, Homo sapien
ccctccgcgcgcggggcccggctgccaggctggcgaggactggggcgacagccatggacctgttacaaaggcgaccgcaggcggagggagggagcggcgggccagggcccctggagccgacggatgggattggagaatgcccagggctgtatccctggacagaaaggggcttctgcatcccccgggaaaaacagccccacggagatccttcttagacctgggctccttcacgcttcccccatcccattcatcatctcgtagacagcagactctctaagaggaaaggttgtattgcaatacagtaatggggtctttaggcctgggtgcaaaggtagaagaagatgatggtgatagtgatggtggtgatggtggtagtgatgatggtgatggtggtggtgatgatggctgtagtgctatatttctgtgctccttccggacccagccattgaaaactctctctccctaaactccctaacatccaatcttccctcaccaatcctggtcctaaaacccctgcttctaatgccttgtaagtgcttggtttctcttggcactggagcaagggagagctgggccctgtctaggggtgtgagatggggacagagcatgggcagggacaaagatggcctctcactgctggtcatagagttgaagtccccctggcaggaggccaggaagggagtggaaggggattctgcaggctccaggacctcctgctttcaaacaggcaggaccacaggtgtgagaggatggggagggagggggaaggggccttgccattgttgcctccctgcctgaaggtcccagggcaagcctcaaacgctggtccttcccagctctgcagctcaacaggtaatctgagacacacctgctaagcccctcgttattgacctcgtgttttgtagggtcacttgactccaacagccatacggttggtaattctaagcctctgagcccctggacctggcaggatccctcatttttccctttccttcctgctttctaggcccccaccacccacccctgtcccccctcccctcaagacacacacagacaaaacactccaaccctgcgtcaattcccccaccatccacctctgtcaccctcccctcaagacacacacagacaaaacactccaaccctgcttagattcagaaattctcacattagagctgagatctgatcagtaatttcctaatgctgatccaaggagggtggtttgcctgttgtgcacatagattggtgccttcttccataagctcatgcattcagcaagtatttattttttgcaaacttactcttcctctttattgctattctccactcaccccatcccacccccaccacacccttcccatagcaggtttatctctgaggcagtggcaggtcacgaaggggttaaagtctaactctggcacagagatggcaggcctgacatgtgtcatggcctcagctgctgttgtctccctgctaattctctttggatgggtctaaaggtacccccaaccccatcccagctccctaggctctctgccgatagccccaggcagatgagactcagattccagctggcaagatccccagcagtggggacaaccacccaagtgccgtgtgtgtgtgtgtgtgtgtgtgtgtgtatgcgtgctggcagtgggggtggggtgatgaagctgaaacctagcagctgggcagctccctctccccgtaaacaaggacatgtgactctcccacctcgtttcgtggcagagccaaagagctgagcaaaaggagctgctgcagcttgaagaaaaagccacccctgaaggctcctgccagagccaggcttaccttctctccctcgagaatcttctcccgaaggaccagcccagggaagggaagcagctgctctggactcactcaagtgtgtctcacaccccttcctcttccagcagcagctacctggcaactgaacccatcatcaccacagccactcctgcagctgccacggtttctgccacctctaagatgtgccctggtaactggctttgggcttctatgacttttatggcccgcttctcccggagtagctcaaggtctcctgttcgaactcgagggaccctggaggagatgccaaccgttcaacatcctttcctcaatgtcttcgagttggagcggctcctctacacaggcaagacagcctgtaaccatgccgacgaggtctggccaggcctctatctcggagaccagtatgtatcgggcagactgggcccacggtagagcgtgtgtgtgtttgtgtgtgtaagaaaggagaagggtggcag

SEQ ID NO: 40296 - DNA, 2300 bp, Homo sapien
tgaggtcgggagttcgagaccagcttggccaacatggagaaaccctgtctctactaaaaaataccaaattagccaggcatggtggcacatgcctgtaatcccagctacttgagaggctgaggcaggagaatcgcttgaacccgggaggtggaggttgcggtgagctgacattgcaccattgcactccagcctgggcaaaaagagcaaaactccgtctcaaacaaacaaacaaaaaaaagatattgatcttgtaagtgctctttcacaattccttttatgataatgttttaactaggtttgcaaattaaatccaaattttaatttggatgcgcaaattaaaatctcaaatttctcaggtcaattccttggggttttttgttgtttgtttgattgtttattttcgcttttgtttgtttgttgagagggagcctcgctctgtcgctcaggctggagtgcagtggcatgatctcagctcattacaacctccaccttccatgttcaagtgattctcccacctcagcttcccaagtagctgggactacaggcgcctgccaccacacccggctaatttttgttttttagtagagatggggtttcaccatgttggccaggctggtctcgaactcctgacctcaggtgatctgcccaccctggcctcccaaagtgctgggattacaggtgtgagccaccatgccctgcctctttgttttaaatgacaaggatttcatttcatatttaaactgctgtaacacaagggacaaggaaaagtgaaaagaattttgtttctctagagaaaaaaaaaggctaggcggtacattaaacttggatggcagcctgtcatggaacctggggattggtcacattggccagtactttctctaacccagagatcaaaacctgatctgccaccactgctgggaatggagtcagtcctggtttcagctatagctgacaccatcagcttcaatctgagccaatctactttctgcctttcttctagtagacagcgagagttcaagccagcctagttctcaacagcatcatctgctaacatttatcatctcccccacttccctctcacacaataaggtaggcactggggaaggtagcacagtccctgccttcaaagtgcttacaatcttggtgcttacaataaaaatgccgatcaagtgaatatgtcactagaaggcagcacatgagaaattaatatgaagatggccggacacagtggctcatgcctgtaatctgagcactttgagagaaggtgggtggatcacctgaggtcaggagttcaagaccagcctggtcaacatggtgaaaccccatctgtactaaaaaacaaacaaacaaagaaaaaatatatacaaaaaattagccaggcatggaggcgggcgcctgtaatcccagctacttgggaagctgaggcaggagaatggcttgaacctgggaggcgggttacaatgagccaagattgcgccactgcactccagcctgggcgacagagtgggactgcatctcaaaaaagaaagaaagaaatatgaagatgaatgttttgagagtctggggaaagtgaagttcactatgagctgagctggtggaaatggcttcctgaatgaaggaaatccatggtgccttctccattttgtgggaggcactggtttagagagtggttaaggacataaactgcaaagccaggctgcattgtttgaacaagctcagctctgccagtaacgagctgtgtgaccagggcagagtacctagcctctctgtgcctaggtcgcctcctccctaaaattaggacaatagtaattatgtctccctcatagacttgtggggagtataaaatgccttaagctaaatgaagcacatggcatataatgaaggctaatgggggcttcggaccattgttctttatgacacggtttcttgagaccgaggcatgtacaagccagtgcacagaatcgtgtctatgtaattagttaattctgtctgggaggagtgtgtgtgtttaagacagtgcctgggatgacttataatgtaatctttaggcaaaacgctttgtaattggtgcagctctgagaacacacgcatgcattccaggcggtgctgctggggctcggcggggccgtgtctggtctgcaaggcgcgcgggctcgtggggggttggctggggagcccacgctgcctggcgactcgggccaccgaatgtgagaccgagtccctttatgtcaccagcgcacacgctgatttgaaccctgcttcgacgtgtgtgtcatggcttaaaaatagctgctaatctg

SEQ ID NO: 40297 - DNA, 2300 bp, Homo sapien
gtgttcatatacatttcaaatggattgcattggaaattaggacagtgtttttcaatagggtgtggccagtagggtgcatgaaggtgtttcgtgtgtgctggtggtattcagtctctcctgactgtaagttacaggatatgtgcattatgtgaaaccgcatcaagttattcggttggtgcaacagtaattgaggttttgccttttttaaaaatatatatctacaatttgtgagatttttgttcatatttgaataacattatttgttttagaatatttgtattacaacaaaacagaaacctaaatagtaaaagtaataaatagacaaaagaggaaagagtatataacaacttttgtcatacaatttgactggcttacttttattagcattattattttaatcagaaggaaaatccattgagctgttctcctatatttaatgatccatcaacttattgtcctacagagattttcataaaaatcctattgatataaatattaatatatgatatataatatttcataatatattatatatatctggtatataataaatcatatatattatattatatattattatatcaataattatatgatatattattacatatatatcatatgtaatatatgatatatgataaatgatattaatataaatattatctatgactttctggaacatatttttttccactatttgaacttaagcttactatagatatgagacataatctcagattacacaatttctaactgatatctagttagtaaaagaaaaatgtctatatctggaataatgtttatctgaacttaaatcatgtcaaatttcttaggatccaattaaagtaaaagtactcttagtaacgtaattgtttaaaagtacttatgcctataaatattcttttatttaaaaaattattttaattataaattttctattcaaaagaatttcaaacacttcacaagtttataatgtaaaatatattttaaaaatataactatataaaaacttatttctatttttaactttatttttacttttgcatttattcttttttttataatgagattctcctggagtaaaggcactgtttcataacttggcttttgtcacttaacaatatggcttagacagtcacagaagaacaaatactacatgatactacttaaatgaggtgtctaaaattgtcaaactcatagaagcagaaaatagaatggtggttgccattggcaggggcagtcattcttcaataggtataaagtttctattatacaagataaataagttctagagatttgctgttcaacatagtacaatacagtatcgtgcactttaaatctgagaaggtaagatctcatgttaagtgttcttaccaaaatacatacacatgcacacacacacacgcataaaagaacacattgaatttgttgaagtgatggacatgtttagtaccttggctgtggtgatagtaccatggtgtatgcctatatccaaactgatcaagatgtatacattaattgtgtgcaattttgtgtacatcaattattccttaataagctaaaacatatttaattttaaaaaacgaacacagctaatgtactttccttctcagtacataattctacctctttctctccaacaattgcaccaaattcctagatacattgaactgtatttgtttaatggtaaattagaattgagggagctttcaatattcactaatacagttcttcagggaacattcttatgtatgaatttttaaacacttgtgcaaatatgtctatggaacagatttataaagaaaactttcaggaatttttgttcagggtttgtgccctttaagctttggtgggtaataccaaactgctctctggcttaattccaatagcctatttaccagtgaagattatgaagcttctaaaatgggtctcgatgatccctgcatcccaatattcatatactgcgtaatcccctttccgtgagtgtggactagatttacggactggcttttaacaaatagaatatctcagtgatgggatgctataaatagactgtggcttccaaatttctttcttcctccctctctctctctttcccccatcctttttctctctcacatacacatataggcatgcatacagacattctcattctctttctctctctccccccacccctcccttttctcacacagacacattctctttgtctctcacccttgccccctcctctgtgtctctcacacacattctctctccctccttccctctctctcacacacagatgcatacatacacac

SEQ ID NO: 40298 - DNA, 2300 bp, Homo sapien
ttgttctaagaaaatcctcatttgtgacagaactgccacatagtcctgaagaataaggaaagtcaggcgatgaatgactattttccagaagacaggtaaagcatatttggtagattaattctcaattcaccttctaagcagaaaaggacaaaaccctcatttaccaagattctaaagagatttccaggcaagtccctagccagccccacatcagtctttgctttgaagcatccattccccagagcttggttttcttgactaggtcccaaaccttttattgagccgcaaggcgaccggaggaaacaatcggcttcttgcacagacattcacgtgtctggtggcactcaagagagggctggcacaaaagtgcttatcagagaatcaatcttttttgcctattatcttccttttcctcggaagaaagtgagttagtgcaattacctcatctagaacaattacctcaccttaaactgtttattcttcagagaaaggcgtttgggagcaggtagcacattggcgggagacatggatttttgaaaagtacttgatgttgagcgtgggtagtgaggaactgctgggaaggttgcctttcaaaccaaggctcccttttctatgggggattaccaggcaaaaggtgagctctgctgccattttgaggactcgatcctggcagcgataatgaggtagtccaattggggagcctgggactccccaccaacttcctgggtgtgctctgaaattgagtgacctaggacaagctctctaaagttactcctccagcagagggaagaggcaaccgtgaggtattttcgaaagcagttaaataaaaatttgataatctatctaaaacaagccacacttaaaaaaaaaaaaaaaaagagtcttctttccttcttcttataaaagtccagcgcgtttcaaagtccttttaattgtcaggcccagagagacattagaatgagaccacaatcatgccctactccttcctttaaactatatattcatttcttaaaactacatactattactacaaatagctataaattaacctaataataccacatcaaacagtataacccacatcctatgacttaactatatataactaatcactaatcgacattatttcaataaatcagtataaattcctaacaatgttacatcagtccactccccatcccccttttttttgcctttaagaatccacttataactactactaatcaaaatatatattcaaaacaacttaaatctatactcctgagttgcaatcctcacacttggcccaaataaactcttacttatattaatttcgcctcaccttcttcctttttaagtcgacactcctttccctgatacttaccagaaggcaattccttgggctcagattaaaactgacaaaaataggagccattcgaaatgagggagcttctgaaaagtttggggattccggagtgttcaggacaacagaatagggaattcgaaaaaaaaagaaagcaaaaataaaaatcgattatacaagccttaatgcacccatgattgttattccccacttctttatttatatgaatgaagttagcatagttgcagcaatggagtaactccattattattttttcccactacgcatttattttaagtctttctttttctcaggatgttttcctgagtgatgtctgatctaatgggaaaaagtggaagtaggagaggcaggactttagaagggctcaaagtagatgaacaaaacggaggtctcctggaagcaggtgactgagttaggcaaccgagatgcccacatatctgtgcggcgttcgccccaagaggccagccggctccgctcagctccccgcggcgtggccgcatccccgccgcccgactcccagcccgcttcctctctccgcgagcgggggggggagctgcaggcggggcccgaagcgccccgggggcacgtggagcggcctctggctcacctgcgcctcccgggccccagcccagcgccgccgcgtcaccgcccctcccgcggccccgccccagcccggctcattggctgccgctcggaggggaggggaaggggcggctgcgggggtctcattagcgatgcggactctcgcctccgctccgtagttcggggcccggcagcggcgcgagggctgggaactgcgcggcggggactgcgggcgactccggcatccgcgctggcggcagcggtcgccgcgccgtgggaagctatggggacgcgccctttctcggggtgcccattcagcggcggctcggagctccctgccccgctgctttaggaa

SEQ ID NO: 40299 - DNA, 2300 bp, Homo sapien
tgaccatatgaacaggactagtacccttagaagaaacaggagaggccaagagtggtggctcacgcctgtaatcccagtacattgagggcagatcacctgaggtcaggagtttgagaccagtctggccaatatggtgaaatcccatctctactaaaaatataaaaattagttggttgtggtagtatatgcctgtagtcctagatactgagaaggctgagacaggagaatcgcttgaacccaggaagcagaggttgcagtgagtcgagatcatgccactgcactccagcctgggtgacagagtgagagtcaaaaagaaaaaaaaagaaaacaggagaaacaggagagcttcttttcattctgctctccctaatgtgagagcacaaagaagaaacagccatctgctaacaaggaagctggctctcaccagacacagaatcttccagtacttttgtcatggacttcttagccctaagaactttgagcaataagtttctcttgtttaagccactcggtctacagaatttttgttatagtggtctgaactgactgcgacagatgcccatctttcaggaaggagctctggaatacaatgattattatcacataaaaataattcaaataaaaacaatccctactggatcacctgctgtatacagcactggccagacaaggaaatcaatctggaagtacttgaaggtaaaaggattagggaaaatcataaaagtctcagtttggaacaaggagaaaaaaaaaaaataaccaaaaagcctgcctacagtttttaccatttgatgtatcagagtacaagcgatacgtgtcattttttaaaaaatcttttctctaagtgacattccattacatagagaacccccttataaaatgtgatgagagcagaagcaaaggcacagaaagttttgacccatgatggatacaaacagtcatttacacattcattatagacagggtcaaggaggaagaccgtgtgcctgcagaagatggagtcacagagggtacccaaagatcagatatatcaaaggatgacacttactgaaacacactgggtatttctaggccattttttttttaatgaggggaggcatttgaatactcggaggaaactagcatatatgagataagcatgtatccctcctggttaattgatctcatttcttagatggcagaaaatagattttctcaagatgcggaaaacaatgaactctttatctctcaatatttaaagtgcttggaaataattttgaagagattaaaatgttagcattgcagaaacaaaaaaacaaaaagaaaaaaaagaaacaattcacaggtcttccattttaccctgtgaatgtagtccctacctctaacccacacaaatcccagataaaacgattatgacaactacaacaactcaggtggaagaggccactgatctaggaatctgcctggctttcaaggtactaaatgcttttgaggcagtgactgtgtggagaacaggcgagatggatgaggtgagttcccactattattatagctgcagtgtccaaggactcagggagccgctttctggagagtgtgctgctctccccaggactgcagggaacaatgcaagccttcaagataaatgtggaccctgggtttggtggaatgtctgggcctgtcgcaaatgcagattactagttttctatgagaaagtagaaaacaccagatttcagtgagattaattatacatcaaagcaatgttctcaattggtaaccatagacttaaacgtaaaactactagaacagaatcatgttttttccctttgtatcacagagaatgatttcactgctgggccagtgtcacactgcagtgaatcgcagaagaatgtaatgcttagtgagacaaatatgaagataattacaccagttatatttgggacacacacaaaataagggaccatatttgtagactctttatgaacactccagtgcagggagagaaaagaaaattttcttttttaatagctaaactggattttactatgactaaatgcctttgaagtaacacattgcttttctgtataattaaaacaaaaaagttagttaaaagagcacattacggcactcccaagatggcggctcctccgggcgagtacttcagcgttgggagccaggtgtcgtgccggacgtgccaggagcagcggctgcagggcgaggtggtagcctttgactaccaatccaaaatgctggctttaaaatgtccctcttccagtggaaagcccaaccatgcagacatcttgctcataaacttacagtatgtt

SEQ ID NO: 40300 - DNA, 2300 bp, Homo sapien
tggagacaagtcacatttacataaatgaaggcagaaagcctggctctattgtattctcttttagattatgtaacttggttttcctgctatggctttctgctctgacttgcacattgccgtggaccaatacactcacagaaaatgaatggaagttaaagagctaattctaaggagcattactctatttacatattgcagtgagaaggactctggaatattatgaaatctcctatgtttattaactacttgcctattaaagccaatagttttgggacctggccaacaggaaacccattgtctattagcctgctttgcaagatagctatgtgcctggtgtacagtgtaaccatttcactgaatgtttattgaataagtgcttcacagcatgtattctgaatttttcacctaacagaattttactaatatagctacagggagcaaatgataaagaagtgttataagcaacggtccatatcactaggactctgagatgaaaatgataatagcaatcagaaaatcaaaatataaatgttaggataataagtttggggatggaaatcatagggatgataattgtaattctttcctttttatgcttttgtttgtccacccagtgatgatgctgaaggttgtggtcatggtgccacatgatatgtatgtaacatttaaccatttactctatttttacatatattttaacatcacaaaacaccaacagattttagtcatccatttttgtgtatgagaaaaatggaacatcagggttaagttattcacccaaggtcacagagttaacacagaccttgtcaggttatttgattctcatgtaaagttctttagttttagcagatttagtctttgctttttggtatggtccctgtttacactttgaaacaaataccagtatagtgaaaagaaaagcatactttggagacagaaaaagcatactttggagacagaaaaggagaaaaaaagtgatatgtatttcaaagtaatgtcctctcaagaaaaaagtatacaaataatttagaacgtctcaaaatctcttgatgctcaaattcacttaaacaataatccaatggatcaggattttatgaatcccaattttggatgactgtgggccccggtgtgcccaattgcattacaaatacaacacatcaaatgataaaatattggcagtttattatgcttaaccctattagaatggcagtgcctttcgcccagttgtttttcttgctaatgttcaccacgtccttatattttaattggaattttagttgttaaatattcctgctttaaaagaaacatttatttctaaatgaaacacagaaaaattcttattattttattctcaattattctttgacttctttatttctgactttggtgaggatgtctagtcagttaaatatagttggtagaacactagttctctcaaaaatatttattttctcagggccttctctgggaggggttcctaacacacccatcctgatctggaatcgcagtccagctcacaggttaaccaaatgatctttaaggtaaatgtcattcttattgtaagtgaagaagtgactcacagataatgtgtgtttttataccatcttttggttttatgaactacacactattaccctgcgacaggcactcactaaattagagtatcagacttataagaatccattcctctgaaacaaaatggaattctgaggtggctggagtcagagacctgcattcaagttctgagcccaccacttactgtcagtgcagccttaggcaaggcagataattaaagcatctcctcagatgcacagtgacacccaccttggagagtttctgtgtctcttaaatgaccgaatccgtgtagaaggcttattaccacaatctgtagctacttggtaaacggcagctcttattttgactttctgctaacggagtttccacattccttagcctaccaaggctctttcctgaacagctgatggcattaggatttaattaagtgaagcttggagtgctggctttgtgtaagaaggaagatgcagctgtatcagtgaggaacgttttctgccacaaataacagaaaatctatcagtagcgttaaataagtagggattgtttaaaaaaaaaagctgtaatatgttatctgggggtggatgatcctggtgttagttaaagctctcagtgatgtctgtgctgggacttccgggttcctgttggacttttcctcccaaacttcaccaggtaaggcaggaacaaacaggaaaaaggacagtaccaaccacacctattctttcgtt

SEQ ID NO: 40301 - DNA, 2300 bp, Homo sapien
ggctctgaaatatgcaatggtagtagtgaatggaagatattgtgtcacaggctggtagtcagatgtattataaaattggttccattgccctactttgttaaacagagcagcgctttttggctctgatcattgttagtacctacacttccaggctggtgccatcaggaaccctgggatttggtagtgagatttgcttttttacttcattgtttggtaccactcggctctgacagctttattttacattttactgtagttctcagatctcttccttgtgctagttggtatcattttctttcaaattaacctcttctaaagtaagttttggatggtgatgatttgggatatttaagctctcattcatggggtggtacttggggtaagtatggaaggatcctaatatgttttcccctggtaaataaatcccttttcaaaaagacaaacaaatcattattaaaccaaataattatagaagagacgacctttttttggggggaggggcggacggagtctcgctctgtcgcccaggctggagtgcagtggcgcgatctcagctcactgtaacctctgcctccctggttcaagcgattctcctgcctcagcctcctgagtatctgggattacaggcacgtgccaccacacccggctaattttggtaattttagtagagacagggtttcaccatgttggtcaggctggtttccaattcctgacctcgtgatctgcccgcctcggcctctcaacgtgctgggattacaggcgtgagccacagcacttggcccagatgacacgttttattggtgataaattagcattctttagacttaagcaatgaaatgaagtatcttattctaaaaccagctttcagtgagctgtgcttgtggtgagcagagtatgatgaaatgcccctgatgtgtatgctcctgtgtgacttctctttgatgtcatcacggccattgctttctgtgataaatttcagtttttatgtgtccgttaaattactgtgttttacctatgctgataactagagctgaatggttgttgtcaaacaagagatgtgtctagtactaccaagaggcactagagagtagagatgttgcttagacatggaagcagagagtgaataaggaaataacacagatcagaggaaattggcatgtgatgaaatagaggtgctcagggtggtatatctccacttgaagtcaattgaggatccagggagcagagggcttccatctgcgtcttccttttgtgttcaaggaaagagaagtttggaccaaggataggaccaagataaaactgggaagaagaaaataggttcttcagcatctaggagaaaacacatccgaaatgggagtaccctgtgctcagaggatggggaaggtgggcttctccagaagaagggctgggcctcaactgtgtcagctacctaacccaaggcctaaatgtctcttcgatcactggaggagtaacgtaaatgatcaccaaagaaacttatctcaaaatctacagaacactgagctttaaatttaatttatctgcttatgattgcacaaatctgtattactttagccttggtacaatctcaaacctttatcaaaacttgtttaaattcaggcatcttgacttaaaaccttgtctaataatataatatcctctcacacaaaatacaagttctacatttatatgttaattttctgagctccactttggaccaattattgaaatatcatcatcatcatgaacgttgtaatgaaatgaaatggcctaattgcagtcacctcttttctctcctccactgcatttttagaaaatgggtcaaagtcaatgtaggatatttgtgttcttttcctgctcccaacttattagcttgagtatccatttcctgaatataaccaaatttaccaaataaaagggacaggatatggaataaagaaaccaatcattgctgttgctctatattttagatacatctctctcccacacccgaatctgctcacttttcaattccagaaaagagttctgatttttttagtgacttgtaaacattcctttcttcctgtaggtggaatggctgaaaaatgaagagcccattgactctgaacaagacgagaacattgacaccagggctgaccataacctgatcatcaggcaggcacggctctcggactcaggaaattacacctgcatggcagccaacatcgtggctaagaggagaagcctgtcggccactgttgtggtctacggtaagaccattccaaaggccaggaatggatagggagggcagaaagaggtagagg

SEQ ID NO: 40302 - DNA, 2300 bp, Homo sapien
ttctgccttgtattaaaattgtagggaagatgcatttcttgtttcatggagccaagattatttgtatgggacaattgtacaataaatgtcttctacatgaatgaataaaattgactatattgaagcaaaatcttgattttctttctttttgaaatggagtctcactctgtcgtccaggctggagtacagtggcgcaatgttgactcaatgtaacctctgcctcctgggttcaagcgattcttctgcctcagcctcccgagtagctgggacagcaggcacttgccaccacacctggctaatttttgtatttttagtagagatggggtttcaccatattgaccaggctggtctcgaactcctgaccttgtgatccacccaccttggcctcccaaagtgctaggattacaggcatggccaattttctttttctttaacaccaaaaggtccagtgagaagttagcaggaagaatgaaaaccacagcacaacaaatattaattgaatatctacatgctagactctggtaaattgaacaggtgtgatgatgaataaaactctatactgtatgtcagatggcagggactatgtctatcagatagggaatccagaccagaataaaggcaatgaaaatatagaacaaaaacgggatagtttgatacggaggcaacttacaagagcaactaactcacacttagggtggtaggttgaaggccttgcagacatgaaatctaagttgaaaactgaaggaagaataagttaagcaggttaagtgttaggatgagggaaagagacttagtcagaagtaacagaacacataagggaaactataggccaacatgagcaccaggcattcaaactgaggggctttgttttgctgaggaatacagcaatggtgagagggtaggaaggaaaatacttaacggtaataaagaaaagaaagctggggccagcgcggtggctcatgtctgtaatcccagcactttgggaggttaaggcaggcggatcacctgaggtcaggagttcaagacgggcctgggcaacgtggtgaaaccccgtctttattaaaaatacaaaaattagccaggcatggtggcagacacctgtaatctcagctacttgggaggctgaggcaggagaatcgcttgaacccgggaggcagaggttgcagtgagccaagatcgcaccactgcacttcagcccaggtgacagggcaagacttggtctcaaaacaaaacaaaacaaaacaaaacaaaaacagaaagccgggaccagatcatatacatgttaagtgctctagacttccttttaagaataatgctggccgggcgcggtggctcacgcctgtaatcccagctactcgggaggctgaggcaggagaatggcgtgaacccgggaggcagagcttgcagtgagccgagatcaggccactgcactccagcctgggcgacagagcgagactccgtctcaaaaaaaaaaaaaaaaaaaaaagaataatgctgagctactgaagaggcttaaacaggaatgtaatgtgatcaggatttgttttagatagatcagataaactgatgcagggcaagactggctacaaagaggcaactctagaaatcctggtgtgggaatgaagatggcctgaatttttagacttttcttctgggacaccattttcctttcatttggtttttctcttactccttgagctgttacttttctttcttctctgtagtgacttctgacctcctctacatctaaatgttaatgtccgtcagggtccatcctcaggtcttttctcttctctattcacgccattatctagtgatctcatccaacctaagggctttaaatatcatcgggacactgacaagccccaaatttatggtaccagcctgcacttctctgacttctcgactgtctggccaacgtcggctgtctactgaacctctccatttaaatgtttaataggtaactcaaacttagcatttataacactgaactcctgattctccctccagttttgctatgccaagttttccccataccagtaatggccaactccattcttccagttgcatagccaaaattttggaatcatccataacatttttctttctcttgtactctacacccaaaacatcagaaaatccttttgactctgacatcaaaagacatccagaatatgacccatttttacaattcctcttgctacatagctggctcaagccacaatcatcttagagctagattaagagcctaggtattataacagattattgttataataggtcattgtgatagatctcct

SEQ ID NO: 40303 - DNA, 2300 bp, Homo sapien
tactgtgtgaaagtgagtacaacttgtgttcactgtacatctgtcattgtctctgagcagtagctccaaaaatccaatagcatttccttttgtattcccgagtggttctttgactttgtgcccatgctggtcacttacaatttctcttgtgtctttcaggcattgagaatgccagcgacattgctttgtactcgggcttgggtgctgccgtcgtggccgttgcagtcctggtcattggtgtcaccctttacagacggagccagagtgactatggcgtggacgtcattgactcttctgcattgacaggtggcttccagaccttcaacttcaaaacagtccgtcaaggtcagcggcataggtccctccacacctcgtcctcagtgccatagactacgctcacactagaccccagccttctcctgggccctgtgtgaaggtagctcttggcactgggagccgctaccaaattgtcttcacacatgaacagaccgggctgggtgaagtggtctgcttaggtccttgtctgccacagggacaagaggatctcggtttattatcagcaacattttcaatgaggcatttccatttttgatgtagggtcagcctaatgagttattttatttcaaattatccttctttttaaaaaagtccttttgaggatgtatatttaatttagttaaccaaagtattggtcattcaagactgaggactaacacctatattacagcctcccaggtatatttattaccctatttatgaagtggagtaattttgttatttctattttaaataagtaaacagattttagagaatagatgatgggtcagctagccaggggaaaaaaaatgaaattccagccgaaacgactctcagctgttgccaagtccaagcaatctttagttgtgggggaaggaaaatctatcatgtcaaactgtatcatgtcattttcaaaacagagtcatttaattctgttataggaaccaaatctattccttattgcaaggtggggatgaaacatacacagctttcattttagaaaaaaatgaaaccgtctcttttcagaggatgaagttttctaccttgaccctcatcgtcaatatcgtcaccttcatttctgtttattgtgcatcagtggtgcctacagcgcggaaccagaagtctcagtgcaaggcagtgattgagtagacaggcttccgaagtggaaacacaggcatgctggaaaaaattgagagatggccagagagatgagtaccttccctcttgccattcacttctgggcacctcagagttaggcctcaaaagagacacatcccctacatttggacatatagtttagtatatgtagttaattggaaataaatccaaatatagaactgattttttaagtggtgttactcaagctggagtgcagtggtgcaatcatagctcacggaagcctcccacccatgggcttaagtgatcctcccacctcagcagctgggactacaggcacatgccaccacaccaagctaagtttttgttttatttttattttttatagagacagggtctcactatgttgctcaggttggtctcgaactcctggcctcaatgatcctcccacctcagcctctgaaagtgctgggattataggaatgagctactgggtctggtcaagaactgatttttatgctacctaaaaaactagaaacatattttcatcaaataataaaatatcaatatcttagaccataacacttgaaaacagatgagctgtattagtgtgagagacagttttgtgcataagtccgtaggctttgaagttagattttagtctaaaactgctatcaattagtctgttatcctcttgagtctcaagttttacagctataaaatggggttagtaacattcaactcaaagtgttctgaggatgaaatcacctggaataacatgggtaagcccttggcatatggaaagcgctcacaaatgcagcgaatagagttctagacgctggttgcttcctcttaccctagtacaggatgccagcgtgttccgtggagcaccaggcagcaggtgagaagggtggatccctggcctacacctgtctggggagtgctgacttgcctacacttaaactcaacttatgtgtattgtaaatctctaagacaatattagtcttaccaaacttacctgaccattttgttttatttttatttttagccaagaatatcatggaactaatgatacaagaaaaatcctttggtaaatgccactctccctgcatttattatggtaatctgcctcatgctgatatcatgtg

SEQ ID NO: 40304 - DNA, 2300 bp, Homo sapien
tccttcccttccttccttcctccctcccttccctcattccttcctccctccctccctccgttcattccttccttccttccttcctccctccctacctccctccctacctccctccctgcctccctccttccttctttctctccctcctttcctttacttcttcctcctcctgtctttataattaatgccattcaaaaaaggaactgaaatggctaatggcatcttatattgagttttatgcttttcaaaatatgttcacactaccttcttgaatccccacaataattctatcaagtaggtattatcttccacataaaatcaaaagactacgaacattaaaatgacttgttagaaatcacacagtaacttaatagaaggactgggctggaacgcagggctcctaactcctagaccagtgttcttttaaacatcgccctttgttattagctagctcaatgacaggattttgtagaaatgataggtaagcttaaaagcaggaaatgtaactgtggcagcagtcctaggaaatgctacagttatcttctgaaacagcctgccaaacagtgtggagtcatggcgggctcccaaggacagcgtgatgattcctcttgggcctcttcacctggtgtcaggttatcttggtaataactggggtgaactaggccctccactgggctctgacattttgcctgccacttgtgcacactgaaaggcatgacatttcttacacctttgaaaacatcagggaaaatcaaagaaatttctctcattctgaactttacctctgctgggccaaaaggtttgctgccagggcagtaataaaagcaagaaaggggagagttccataaagaagagataagtggaatggatttatgggctgaaataacaatcaaccaatgaccacactagttaaattgtcttcttcaatacctgcactctatactatgcctttcttatgtaaagaataaacaaaacctttttttttctgtttcaagataatcttgattttcattgtgtgtaattaaggagtacaacgtgatattctttggattgatgcacagcagatacacatattttcaagtcacgtgataatttaatacattcacataatttgtgtacttgggatatcaatcaacttacatatttgtattttctttgtgctagaaacattcaaatttttctcttctagctatttttaaatgtacaatagattatcataagctatagtcacttcactgatctatagaacattagatgttatttcttctatcaaaccaaatatttgtacccattaatcaacttctctttatccaacttctttcctcagccacccttcccggcatctcgtaaccatgaatctactctctatctttatgagatccactgttttagcttccgcatacaagtacaaacgcaaaatgctcttttgataaacttatgcatagtgaagcagtgactacagtcaagcaaattcatatatctatcatctcacagagttaatcatcttttgtgtgcgtgtaacaagagcccttaaaatctactcttttagcaaaaatcctgaatacaaataattttattaattatgttctttgttctgcacactagatcttctagacttattcattctgcatatctgctcctttgtataaaggataaacaaaaactttaaagtacttctctcttctgtccttccaagcctactaagcacgtggcatcctcccagatagagaaccaactcattcacacacatagttggctgttgtttcactccgaaagagttgatttgaaattatttgactgcattaactgaactgataaccagctgatcattgctacagataatgggatttcttcaaggcatagagaaagtcgtaacaatccgatctagaattatgatttttttgactattcatattgtaggccccagccatctccagttgtgtattcattcacaacccatgagctggcaccgggggattggcagacccttgttcctggaacttctcactggttatcacgcctaatgttggaacactgtggtacagtgaactctgattcctggaattgttaccaggcgaccacggcgtcatcaaatgacctggcaattccgtctactgatgtctcgaacatgtttcagactaagctacgaaatgaaacttgggaagacttgccaaaaatgtcctgcacaactgagatccaagcagcattcattctctcttcctttgtgaccttcttcagtggactcatcatcctgttgatcttcaggctgatctggagatctgttaaaaaatggcaaatca

SEQ ID NO: 40305 - DNA, 2300 bp, Homo sapien
atgttcaatttaaaaccacaccatttataaattcggaaaggagactttatttcttgtaaaaggttacagcctgtaaggtggccatcccacaagccgggaagtgtgcctccagaaaaaaacagaaacaggaatttcaaaggagaaggggttgaggtaggagatttatgttgaacaggttggcaaaacaaacgtattcaacaggttacaggaagagctatggatatgcatgcaacataagacccatgtttaccttggggtggagacttaatatttttttaatgtcagctttaggggtacaagtggttttttggttatatggatgaattgcatcgtggtgaagtctgaaattttagtgtacctgtcaccaaagcagtatgcattgtacccaatatgtagttttttatccctcatcctcctcccaatgtcccccttctgaatcttcagtatcccttataccactctgtatgcctttgcatacccatagcttagctcccacttagaagtcagaacatacagtatttggttttccattactgagttacttcacttagaataatggactctactttcatccaagttgtgacaaaatacattattttgttttttttatggctgtgtagtattccatggtgtatatataccacgttttctttatccactcatcagttgataagcacataggttgtttccatatctttacaattgtgaattatgctgcaataaacatatgtgtgcaggggtctttttgacataattacttatattgcctttgggtagatacccagcagtgggattgctgaattgaatggtagatctgcttgtggttctctaagaaatctccacactgttttccatacagattgtactaatttacattcccaccaaccgtgtagaagcattccctttttgccacatccactgttttttgacttttaataatggctattctggctggagtaaaggtgatatctcattgtggttttaatttgcatttatctgatgattagttgagcatttttctgaaaacgttgagcattttttcacatgtttattggccatttgtttttttttgtttttttttttttttttggagaaatgagacatttaaatgtatcacaactaggccctaaacatcaaaatgccttttcagggcatgaaggcatgtaagagtgtatcttctggaaaccggccagaaccaatccatggttgatggtcttcttatctgtagaaagtgctgaaatcagtctcttgtccaataaaagctgtagttatggctggtagaacagagattagttagtcagaatgtggtggtgaactacaaattgttttaatattgctcatcttgaggtcagtgcttgtttagctgctagagaaacaaacaaaaagctttgtggcagttagaatgtcatttatttcttaggtgtagggtacatgacttaacccttgcctagaatggccttaagttccatttgtaatttggtatcttattgccacaaagtgtctgttctgtcagtcttataatctctattttaacattaatactagtcagtagttatgttgaaacaatagaagggacgggggtatcatgaggctcatctaatctcctctcctgtcatggctgggaactcagtttttaaagatttttctgggttgcccttgtccaagagggagtctgttcagttggtcggggaaagggggatttagaattttatttttattttatagaggagaaaaaccaagtaacagaaacaaactaagagatgatgccaatttggaattatcagaatttgaaataagtatgattaatatgttaaagactctgatagaaaacatagacaacatggaacaacgaatggacaatgtaagcagagaggtagaaatcctaagaaataatcaaaggaaatactagaaatcaaaaccacagtaacagaaatagaaaatgccttgattggctcaccagtagactggacagtgtgaaaaggagagtagcttttcctgccactcctccctcccccacaacaccactctggctgcaccgtgctctgaactccaggcttctgctaagctagtgccaccttcatctcccttcagccccatcacgattatcttccaggacctcatcagccacaatgagatgttctctgacatttacaagatctgggagatcacaaatgggctgtgcctggaagtggagcagaagatgctcagtaagacaacagggaacactgatgactcactcattggcagaaattcctcctctgaaagtactgaggatgaagttactgaaagcacgataatca

SEQ ID NO: 40306 - DNA, 2300 bp, Homo sapien
tgttcttcatctcattgaccccaaacccaacacacccctcagctgctgatcacaataaaacctaatggtcaataccagatcatgtaaataagtttttcccctctggagtgttttccataaactagccaattcacagcccccttagggaagcctgaagggtaatacccatgggctttgatgaaggtggccccgacaggctcactgacttgctcagtgggtgatctccctgctgtctccagacttcacactggcctgccttgggcaccaagtctctctgacctgtgaataatacatttcttctgtttcatgcattttagtttcacctccttattgtgtcttacctgatacacacataaacctaactttcccctctgtcagcagtctcctgcagagtggctatcttggcttatggccactcttaagagagagacacctcaagacaaattagaacaaaccataaccatagaaatcacaacagccgtgaacattttgggagctgagaagatgtgcactggagggcttaatgttctgtgtgtcaatttcccctctctttaataattggttcattatgttttcagcaactgctgttgtcctcggtgtcagaccctgtctggctcaatctctacttagagcagtagttcccagactttagcttgcatcagaatcatctagagagggcttattgaaacacagattggtgagccccattttagagtgtccgattcagcaggtctggggtgaggcctgaaaatgtacctttctagccagttcccaggtaatactaaccctgctggtctcaggtccccactttgaaaaccactgctatggagtaatcctttagactcctactggagcaaagagggccacctggctacatgggtagaagagggcgtctgtgagcctgactccttcttttaaagacttttaaccagtccttatatggatagccctgctctgcacccttgctgcagaggcatttggtacctccaattcctgagccttctgggactatgctgtgaagtggctggttcttgaggctctcccgtgctgccaatgtagtttagctttttcttgtctgctatttctattgtcatttacctgtttactaattgcttccaaaatttcattgctatttcttgtcagctgtgacctcttcaccagctcttggtggatctgctgaattgttttgccttttgttggccgttattttagtgtcattagtcagaatcaagcatgtattcaactggctcttcctctaccttacttttaagccatcaccatctctcacctggcaataaatatcttttgaaatgatgaatgaatgacctttgacacacagagtcatgagggaatgagacgtgatgctgctcaacctcattgaaatgcatctccatcttgttgttcctgtaacatctcttaaagtttcagacatagatgctgaattatcgctttaagcaactttcagggtgtaattaaagtacaaggtctgactgccaggacttgagataaatttcagtgtctcagaggcagtgagatgtggctttgaattaaggggctgaaacaattctcccagaagtagtatatgaggtcacaaaagagctccattcaggaaggaaaggatggacaaagatggaagccaaagtgtggcatgttagttattctttgtgtgcaggtatctcccatttaaaaagttgaaaggctttataaggactttgaccatggataagtagccactaaactgatttttgtcactttgttgactatttcattacttgaaagaataatattcggtatctagaattatctatcatgcctagaactaggtaaaccaaagaacggttagaaagtttcgtgctgatgaacactggacatttccatgaaaatctgtggggaaaagcaagagagatcagattgttactgtgtctgtgtagaaagaagtagacataggagactccattttgttatgtactaagaaaaattcttctgccttgagattctgttaatctatgaccttacccccaaccccgtgctctctgaaacgtgtgctgtgtcaactcagagttgaatggattaagggcggtgcaggatgtgctttgttaaacagatgcttgaaggcagcatgctccttaagagtcatcaccactccctaatctcaagtacccagggacacaaaaactgcggaaggccgcagggacctctgcctaggaaagccaggtattgtccaaggtttctccccatgtgatagtctgaaatatggcctcgtgggaagggaaagacctgaccgtcccccagcccgacac

SEQ ID NO: 40307 - DNA, 2300 bp, Homo sapien
tcatatgtatccttacaaaagggaggtggagggagcttttcacacagaggaagtgcaatgtgaagacagagcatgagatgtgaatgtgaagataccggccttgaacactggagggatgaggccacaagccaaggaatgtaggggctaccagactcccccggcacctctgtagagagcacagtcccactgacaccttgatttcatcccagcaatgctgattttggccttctgacctccagaactgtgagagaataagtctgtggttttaagacacccagttggtggccatctgttacagcagccacagggaactaacgcaggaatacagactgcaggctccttcagagcaggatataattatgtctccccagcagtgccttgtccttagtgtggagccgcccgtagctgcagatgaaatgtattagcacatctccacttacttaaggtaaatcttttgagtcttcttttctggggcctgcagatatttcctgttaactaggatcttaggggacacccaaccatggttctttctcaacatcatctctggaagcgtcaagtgtctccttgacatcacacaccaaaggatgcactttctaaggtattgtttaggacttaggagaggcataatttttagcaatgagctgagagatgggggtccttgccacatcctccttcccacattgctatgacagctttgtgttttttttttggtcccaattcagttctgagtaggacccggtttgctttcaaaccttataaatggctactaaagattgaattgtgtaccccgaattcaaatgttgaagttctaactgccagcacctcagaatgtgaccttatttggaaatagtgtccttgaagctataattagctaagatgaagtcattagggttggccctgacctagtttgaccagtgtccttatgaaaacgcagaagttggacaaagacacacccacagggaaagcaccatgagaagatgacggcagagatctgggcgacgcgtctacaagccaagcgacaccaaaggtggccagcagcccatgtgaagctggaggagaggcctcgaataaatgctcccttacagcgttcagggggaactgaccctgtccacaccttgaccttgaacttctgggctccagaactgtgagacagcatgttctgttgttgaaggtacctggtctggggtgcgtggtgctttgcagccaaagtgaatgaatctggtgacactgacctgtgtactgtatgtcttgtctgcagcttgctggtaaatgagggaaaaagcagggaatcaggggtggcagaagggtagggggagaagggagtaggaccagagcagctttagaagtgcggccttgagtctgagcaggaatccttctatgtccagctttgtgtctgctgcctgtgataagagggccggcagagtacctacccaagcaacctccctgtcctgatccctcccgggggacccaaccttttcctctagatagggtcagctaaagaaagtaacattgcaatcacaccttccaagctgcccttctttccctcctccttcagtctcccccgcacccccattcccccttgtttctaagtgcccagccttctcctaagagaggggaccatctggttagtccttgtttactgcacaccctgccagtttgagcttattaatcatatttacccaagtatcttaattactccctgtctagcaacttgctttgcactcagctgttgacccctcttttttttattcctttctatcattaatcataggagcagcgtggctagaggaattcctgcagcttagatttcgctggcactgttaccactcccagagaggagcggctggagttcacggctggttcctgacaaacttcctaattaatctgctaaagatcagaggaggactaataggagctgaagactgtgtgcgagaccacccctccgccctctccctttgtgtgtgcacgtgtgtgtgtgtgtgtgtgtgagcgcgtgcgcgcatgtggtgctgagcttggcgggagagagatggcctcaccagcgacaaagcattcctgctgctgttgctgccacctaccttccctgctttgggaggatacattttctcctcttgcttagaagtttcagggagtcacccaagccttcttctcccagatacaacggtggaataaaatatcttccagccaacatattttttggagacggaatctcactctgtcacctggttgaagtgcagcagcgcgatcatggctcactgcaacctctgcctcccggtttcaagtgattctcctgcctccgc

SEQ ID NO: 40308 - DNA, 2300 bp, Homo sapien
ctaaatacctcttccctctcccctccccttttcctcctgacttatttcccattaatcatttctaacacacatctgctcaggccctagaaggatcccttggctccctctcacagctgggctggttacaataatcagggagactttcatctttcatagcctcctaggtctcccctctgcccagctcctcctcctctgcgttcctgcaaaggccagcctctctgcaccctggcttccttctgcccttcccgctctacacagcagtctcccgaaggcaaaatggcttgtgggtggacacagccctgcagtggacttttacaggtggtgtttgcagtgatggcaatggctgcccgcacagaagtcggcatgagaagcctgccacgatgaaataaatgagatcactccctcccttttcattcccgcacccctcttgctgcaatgtgggatccatctcacagtcagggtacccctttccattcggcgtaacatgattttaccaagattaaaattggggaacatgtaattacagcttgtgtaatttctaagcattctataagtgctgcccaaaatacagtatggatccagggagtgcacttagttttgggtatgactgatactgcctggaagtggggtctgctgtcttctactactgggcaagatacagattcgtgatagctatttctttctgtttgaagagctcctttgaaatcacctctccccatcttgggttctcaggtcatctcaaggcgtcggtcagcgcggcagagtcgggaacctgccatcctagagcaatacgccccgagtgacagccctgacaaccggagtgatggatcgggactggaaaagtggtgctgggagccaggcagtgacaccagcgcgcctccactggccgccgagcgcacggagaagtgggctccccagagttcggcacccaaaggaccaacttcgcctccggaaaagcggcggatccggaacttggatgtcaggactatgactacgtaaaatctctgcccagggcgaagctagcaatgcacactgtatcagaaaggcgcagggagtcgggaagggtattgttatttttaattaaaagtttttatcccgaaatttgcctggggaaagcaagtgctttttcccccggagtgagaaggatgggggggcggaggggttgtgttgccgagcagcgcttagagagagatccccctccagggacacccgcctcgcccgtgatctcggtctctcctcgtagcagctgggcgcggtacagtgaggaacttcacgcccctcagcaggacacggtaagaagcctgtaacacaccagacaccgagcctctaacgcagggcgcaggcacagcgcgcacagcctggggtcccgcgcttggtcgccgaccatgtcactccagaagggagacaaacttgcaggcttcagacaagacgggctcaaagtagttggagctgcctacgccgcgtcccgagaacagtgggtgcctccgaggctcgggcgcttccaagtgaacacaccaaggggaggccaagtaggggaaggagagcggggccgaggagagccggagcagctctggagaaggacccgggctcccgaggcgaggcctgcccccaggcggcctctgggagaggcttgaactccagcgtcccagagcccgcgccgtgcgatccctcccaccccaccccaccccaccccaccccacctcggacacacacggcgggcggggttacagcccccgccagcatcaccccccacccacccagtggtgagaagggagagaggagagagagcggccggaaaggaggacggggcgcagagctcagggtcccggagaagtcccgtcccaggcgggggaccccagggcgaggaaggcccagtcggggggaggggaggaatcccgggagcggccgagaccgaggcagcggcggcgcgcggcgcggcccctttaaggctctccccgcccaccgatggagccggcctcagcccgccgctctccccgccccggggtcccggcgagagctgcgattgggcgggcgcggcgatccctttgaagtgtggctgccgatcgcggctatttgacgtgcggctcgaggaaggcgaaggtttttgtgttgctagccggggccagcggcggtggcggcggcggcggaggcgtcggtggaggaggggaggcggcgaggaggcgcagctcccgctgcaccgcgatcgacgctgcggagcgagcccacccgccccgggagctcgcctccccggtgctcccccgccctccccgcccccccagcggcgctgcctcctccaaatg

SEQ ID NO: 40309 - DNA, 2300 bp, Homo sapien
gaaggaaggaaggaaggaaggaaggaaggaaggaaggaaggaaggaaggaaggaaggaaagaaagatagaaagaaagaaagagaaagaaagatggaagtaacggtgatcaggaaggagaggaagagggcacgccacctaccgagggcccagggcctggctgttgcagaagactttcttctccagtcagcctcccctgtccagaacaggaaggaaggtcttggggaaagaagactcacactaaggactctgggcatggctacaaaccctagaggtaggcagagaggaccccctggggacagggtggtcagtgacctccatctctaccaactccccatggcagctgaaatgatgccctcaagtcaatccttggagttaaggaatgaaatcctgcaaaaacaccataatccatgcccaggaaagggatggggggagaagacagccctgttaatacatcagtgtcaccccaacatgtttgggaatagccagtatctagaaaaacagaggcagcgtctgaagggaatgagacaggagaccattgaaggggagaaggagccaggtcaggcaggctctgaaataagaacattttcccaggaagggcagcttcaggattggcaccctggaaaggcctggcagccaggcaatgcacagtgagagtccagggctcgagcgcttcccagccacaatatgggtttctgtggcagaagcttatctcccccgcaaaggcaaccaccatgagggcacaggctttgcctgtgcatttactgctgtagcctccatgcccagtctgtgcctggcaggtaatgggctctcaatagatatttcttgaatgcatgaatgaatgaataaagcaaggtctagagaatggaccccaaaaagaaactggtccttcctctcgattctgcagacagatccagaagacctgcccgaagtcaggcccgagttgctggtagcaatacctgaaacgagtcaagtggcccttcttgcagagagaggtccacacctgagcagctggggaaggactgcactttacaaacttaccccagcagctcttggaacaggaccgggctccctgctgtcttttaggatttcttcagggagaaaaagaattttcctggccatcgggccagaatataaaaacaaggctacataaaacaggcctaagagggaaagagcaggccaaaaacaatacgcttctctctccccttgtttttacaggacctcaacttcttttcccagtgagggggaggaggaggaggagaggggagaaagcccagtgaccctgtgcctcctcgccaggacagaggcctttgcaggcagggagtcaaagaaaacttttccaagactgattaccaagagggtaactaggtacacagagcacatgtgaacaggctcctcgtttccaattcaggactgtcagatggtgattaatgactaacagccacagaacagccttgattgccaactgctgtattgttaatcctgacatttaatgaggccggacacaactccagcacaattccacaccatcatctgcaaatagcactcgacggacttaattggttaagtatttgtgtgtggggggcgggggggtggggagaaagagagagagaatagagagatataaagagcaaaagaaaggggcgaggtctctgtaattgtgccctttgtgggcatctatattttaatgcatgtaactgtgttatcgcatgagtcatctgcgatataaccttggtccccaacagaaacatccctaatagggtgaaacctcccaccaccaccctccccaccccactccatctgacccctacggcggtgtccttcccaccaccatcactgctgctgtctgaggggcagctggaaactggcatgtttgtgaagttaaaatacatgaaaggaagttgaaagaagaagttgtctcgaagtgggccagcatccagggctcctgagaagccactttttcactggactctgatcaatggggccttggcccgcctgactgggtggttcctcctctgccaagagagaagtatgtttcccccattccggaactcaacgctttcttaggagatgaacagaattcaccttattgttctaaaaacagagtcccaggcaacagggacagagagactggcccagcaggggctctctgggccaactgagcaaggtgacagggcccaggaaaggagctgttgcctgcacaagggcagatggagtcaaggaatcagtgttcatgggatcctggctgtccccacagtgtcgtggctgaaccttacaagaacagaagcaagtgaagcacagg

SEQ ID NO: 40310 - DNA, 2300 bp, Homo sapien
gaaggaaggaaggaaggaaggaaggagaaaaagaaattgtaaacatttttgttaaacaaatcatcacaaatgtatctgctgggtaacataaaaatcacaggtctcttaagaaagagattttcagaagtactagatcatcatgtactagcacatcacgaagtccatccccctgcctttaggcacgtccacaactaaataactcaggtctggtaaaatgactcctaagaacaaaatcccaaaacttctagccacaattcactccaaagtttaatgtgaggaaatttttgtgtttttattatttttaattgacacataataatatacatatttgtgggaaggggaggggagacgggttgccagaggttggttaaaggaaattcttaaattacaagtaatttaaatacttgatgctgcaggctagcccccatttcatgggttgatgaaccctaatatttccatttttcttactcaattattaaataaactattaaataagcatgcccagctgaggttatatcactgaacagggagagaaaaaactcaagttctgataggattgatcgagagattggccagctgtgtctgtttggggtgggggatgcagggacagagtagggagatgaaaggccttcatttatggagatgggcacagagctcccagacagcaccatgtaaccctcgtatgggtttcaccatgtaatgctgaaacatcccaacacccagagcaaacgcaggaaaggtaaacgggccaatcccaagcaggcatgcctggaaaaaaccacacttcccttttcctgagtcttaaatctgtctaacaccaccagcttgccatcttcccggtgtaaaagtttttcttttactgaaggctataattaagtggactctttctctcctgcaaacaaaatattaataacctcagtggctgaattagaaatgccccaatgtgatgctggtgaatagggcaggtggaggacaacgtgaggcccttagactaggagacacaaactctggattccgggcctggtcccacgttgccttcagtctgtttttactgggcacctaagccccgggggtgcggaaggaaagtcagtctctgctctcccgggaacgtacagtttatctagaaagacgaagtgcactagcccctgtgcactgtggcaggagtttaaaaagcagtgaactcaagatattaaggaaacacaaaggaaactttccttggcttttacccttgaacctcgctgaacttcttagattccgttcattaaaattagaataataattccttgttaatatactttgtggcgttgcaggatcccaagggccaaagctcccagaaaaatataaagaacaactcaaggtagggatttttgattggtgaggtaatgatgctaatctgtacattgaaaagactgtttcatttcagctgtgctataggaaagcaaacagttgcaactcgccagtaccttatcaaggagagaaaaaaaaaaaggccgcgcatggtggctcatgcctgtaatcccagcagtttgggaggccgaggcaggaggattgcttgaagccagagtttgagaccagaaataccaagaccctgtctttactaaaaataaaattgtcaagtgtcgtggcgtgcgcctgtggtcccagctactcagcagggtgaggtgggaggatcgcttaagcccaggagttcgaggctgtagtgagctatgatcgtgccactgcactccagcctgggcaaaagagcgagaccttgtctctaaaaaaaccaaaacgaaccaggttcggcctaatgcagaaggaaatccggagcaatccccaaagtcaacgccttggaaaggttcgccctgggtctcagtactccggggcatgcgcgtcctgccgctcgctctcggggagctcccaccaacaccgccctcatccccagccccaggacggatacccaagaccgaggtccaggaccgcaccgaccaagtcgcgggcgatccctggcggccagctacggccattgaccgctgggagcgcgaggggcggggcgcagagcgagcgcggggcgggggtgtggtcttctcgcgtgaattgatggcgtcatcgaagcgacggcccggaaggaagtcgcgtgctgaggggtgtgacggttttcttgctcgtgggctcggacgagtacggagcgcctgcagggacagcctggtacgcggcccccgccccttcgtgcgcgcgctgggcctagctgccgctcagggtcggggctgacccgtcactttcgggaacctcagtcccagcagcttctctccctcagccgg

SEQ ID NO: 40311 - DNA, 2300 bp, Homo sapien
tccagcctgggcaacacagcgagactgtctcaaaaaaaaaaaagataagaagtctgttttactttgtcatatctgttgggcttgtggcaatccattagggcagttaagtccagtaatatggttatcaactacctgcactaatgctggagtccaatgacatgaccaaccaaaagaataatttgaagtactttataaataattgaaatatatgttttggcaatagagttacctttctaatcaagttatatgtaaatgatgaagttaaaagcctttttggggaacatgtaagcagatgatggggagaaagaattaaaggagagaggaattccaatcagagttttagaacttgctgttagcaatccagaaacaagcatcacaacagcacatataagaagagttcataaagacataaagcaaaacacttggtcatggaggttactaaaaagaaagcaacccaagacttataagtgcttctttgctttatattaggcaaagaattaaaaaaaaaaccaataaaataaacagtgacataatgggttcctttattgtaggaaccactatcctaaggcttgctttgattgacgtaagtcaacctgcaggctctttcatttttcttgaaatgttaatattattttatttttagagacagggtcttgctctgtcacccaggctggagtgcagtggtgtgatcatagctcactgcagcctcaaacttctgggctcaagtgatcctcccacctcagccccccaaataactgggattacaggcacgtgctgccatgctcggctaattttttactttttgtagagatgggctctcactatgttgctcaggctggtctcaatctcctgggctcaggtgatcctcccatctaagcctcctgagtagctaggactacgtgtgtgtgacaccacagccggccaattaaaattttattttttattttatttttttagagatagggtctcactatgtgacccaggctggctgaaatgttaattttaaaagagcatcccaaattagcagagtaggctaccttctcaagttgccatcaagaactggtactcagctggcttttgtaaaggtaacctagcagtgtagagctaagactgccagagggatgtagagctaagactgccagagggatgtagagctaagactgccagaggaatgtaggagaaaacagtattttagggatgatcaatgaggagcaccagtttcctttagattttgtctctaaatctatatacacatttattaatcaccacccatggcatcatcttggactactaagtgaagttctaaatttacatatatatgtgtgtgtgtgtattctctttcccgtggttactgacataaaaagctccatctgaaaaggctcccctattcaaggaaatataaatagagatgttcagcagaatctgctaggaaagcaatgaccaggaaagggagctatttaacaggaagttgccggcttctccctgtctctgccttacctgtaatataccccaatatgtccctcttctatcttgtgcacagctgagaagagagatgcacaaaagaaactggaagccacagccacaactgctcccaactgagccatcagtgagcctttatcctagggaaaagacacgggaaaatgtgtgtggtccaacgtgcaggagaaaaggccacaacagcgagaggacctcaccaagctgagctccctgcgagtgactcatatccagcctggtgtcgtgtgaacacaaggctagatctacaactcgcttcctcctcgttctcagtcaacgttcccctttctttaactgtaaaattagagcccccaccgcactgaggaagcactggctccggatacagccgttgctcaagggagaacccgtgccagctgggtagggttcagaacacagccttgtcttcctgtgaacacgaatgtgctgtcactgaacctttcctaccagtagtagggaagagaggcagctgcagtactttggcccaaattacagaggatgccaaatgacaggcagttgtggctatgtaattctggtcagagtctcccactcctaattgcctgcagtttcaaaggaaaccattatttactcctttcagatgctggagtggcagagccagcaggcgagcagagtttcaaggtaggattcgttggcctcgcatccaccttcccagttattcctttggccctaaacaggacagggctctgaacaagcctgaagccacactcccccccatatactttggcactttgcacctgacagatccccaagcccgtggtcagagagaaagg

SEQ ID NO: 40312 - DNA, 2300 bp, Homo sapien
gactgggggcaccatgatctttttgtctccatttccattttcataagaccacagaatgtcagagatgaaaagcgagcatattggaagtaaatcggcagtaaagcctgtcttactcagcctggtctctctcagggttctttacagagtaacgcctcagtaaatgttcactgaatggataagggggtgggaggatgaccttgccttgtagttcaaagaatagaggtccctggctgggcacggtggcccacgactgtaatcccagcactttgggaggccgaggcgggtggatcacaaggtcaggagttcgagaccaacctggctaacatagtgaaaccccatctgtactaaaaatacaaaaattaggcgggcgtggtgatgcacgcctgtagtcccagctactcgggaggctcaggcaggagaatcacttgcacccaggaggcagaggttgcagtgagccgagatcgcgtcactgcactccagcttgagtgacagagcaagacttcgtctcaaaaaacacaaaaaagaatagaggcccaatctagtaaatgaagctacaactacttgttgtcatagtgacgtaacacctggattatacattccctagatctgtgaggtatttatggttttaaaatgttttccaaatagcacattatttgaagtgtttcatctcacccaatccttcctctacacatcccatcaccatgatcccctctgtcctccccatcactcactgctggctcgctccttcccacctgtgtctctacagcaagcatctattatgctcacaccacaaagggccattctggtcattttaaatttttttatcattttggttggagtacagatgtatcaagtctagagacattttatctgaacacaattactcctaatgttggcagtcctagtttgcagataacccagttaatgtgtaccagggtaaatgaccagagacttcccaaaaagaagtcccttattttaaggatctgaggttctgcctaatgtgactttcccagagcagaagatgtgaaattccatctctgttcctgggagtctggggaaaaactgtgagaggagagagtaagaatattgccccttctttccggaaagctctaataaaccccatcacctcaagacaagaccacctgaagaacaaacattagccatttctctaatataatagcatcccacttcattaagttgaattaatgtttgagaaactttcaacagaaattgcagccaagagtgctttccttaacaaaattgatctccttctccttgcccgtagcacctactatttcaccacctgactatgtagcattctgtattattatttgtatggcctggctcctcatcaagtttataaccatattgcccacagaaggggactcaagaatcaaactcagggcgttgtggtgcccgtttgtagtcccagctattctgtgaggcggaggtgggaggattgcttgggcccacgagtcccagataatctgggcaacatagcgagaccccatctcaaaaaaagaatctaactgaatgtgctgagctcctgctagaccatctaaagctgcctgtgggctgggcgcggtggctcgcacctgtagtcccagctactggggaggctgaggcaggagaatcgcttgaacccgggaggtggaggttgcagtgagcccagatcgggccaccgcactccagcctgggtgacagagcgagactgtctcaataataataatagtaataatcatgctgcctgtgtcccctgatgagacagcactggccgcaggtggccgctaacctctcgaaatagggatggcccgaattgagacatatgcaagtcaacactacaccgggtttcagaaacacatacgattttcaaaagaattaaaatatcgcatttagtttttctattgattgcatgttgaaatcttactttggatatattggattaaataaagtatatcattaaaatttttaagcttatgtgcctatgagaaacttccaaattacacagttggatggcgttatatttctcttggacagcagtggtctgaaagatgacaaaaatcacgatacgtttgaatcacgccatgtctttagggaaaagaagaaagaagagtttcctttcgtatcgcttaggggttcctcgcaagaaccatctgacagagaaaagccctggctcccgccccagtggcttctaattctggtccccgcgcccagaaagccgggaacgggcaagcctggaaaggcgttttgaaaggaaacaggatcccccgagtataggatgcgtttctgcctcacaaaag

SEQ ID NO: 40313 - DNA, 2300 bp, Homo sapien
agtgttttgtagatgtctccatcagacatttcattcctagtggtggggaagcctcgcctcattaaatgtcctttggcctctgttcagcctccaggagtgggtgttccagtagaattcttctttagactttgagtgtcttcatttagccaaaggaaatcacagaaaagctatatgacccaggccagagatctcagagtcttccttgcctgtgagcaggagggctgcacagccctgcctatgggctgtggctctgctgtcagctctttcctgaggaatgcagcctgggccaccgcctgtgagggctcctgctgggggagtccattccccttctcccttcctccatttgcaatcactatttatttatctttggaagttcaaggaaccagagagcctgcaactgggggagatctgtggagccagggagggaaagtgaagaagccaacatctaggcccctgcctgccgccaacgccaacgggcaagagaagaaagccattccctgcatagtcagggtagacttggctgacaggcacaggggccctagaaaaggcaccaccgcacatcagcagggctaagctcactaaagaatgtggcattcaccttggggaccgcttgggtggtagagtgaaggagggggaacgggagtcctgccccatcccggcagctctattaagcaacagaaaggtgagcttctgtggggaaacagaggaagcagacccctgggctgcacttcttactgcctgtccccagccctggttccggtgtactgcaggctgttttttttttaattaatttatttatttattgagacggagtctcactttgtcaccaggctgcagtgcagtggcacgctctcagctcactgcaacctccgcctcctgggttcaagcaattctcgtgcctcagcctcccaagtagctgggattacaggcgcccaccacgacgcccggataatttttgtatatttagtacagacagggtttcatcattttggccaggtggatctcaaactcctcacctcaagtgatccgcccgcctcggcctcgaaaagtgctgggattacaggtgtcagccaccgcgcccggcctgcaggcagctttatacccaccactagttgtcaaggtcacccctgccaccaccagtcctctgcctttggaaaccatgtgcccctcccccccaccacactctcttattctaatgccacgatttactgggcatctaatgccactctataaactggggagcaggcagagccccatttcaaccccagagatctgctaccccagcaagctaggggctgtgtccaaggtcagacagtaatgagaggcagagccgagtctggaataggggtctccagactcactgcgcagtgctctttccacaccctgctgcaaagccctgctccttctcatctacttttcccttgtcccactcactgtccccgaaacacacacacacacacacacacacacacacacagcgttgtggaaaatgtaggaggcccagtctagcctctagccttgtctgccttggcctttgacctctccttggccgaatgacatgcaccccccgctgagcgaggtcaccgcagcggaggagggtctgctgcctccttgtctcggctgccatcctcctgcggctgcctccaccggagctggaaggagagtgagagccgacttccagactgatcatcgtgtcaggggccaaaggaaacctcggagccttccaccaagttcaacccaaaacagggcgccccagacgtctctgtccaagcccgcgggtccaggagggccccagcagcctggagacgcaagctgcaccggcacggacgagggaaattttgtggaaggtggtggtggtcggctcagaggtctgagatgggttgcggaaaggaagggtcctggcccggggcgcggggacaagcgggagaggagtgttggtgcagggcgggcgcggggacgcagggtcctcgaaccagctggcccgcccccactcggcagagggtctaggcctggccgcgtgtcggtcggcgctagggccccgcggaaggcccgggcgggcggggaccggcggcgggagcggcgcggcgcggagctgcctccatccatggcacggagcggcggcggcggcggcagcaggagcccggcgcgatccgctaggtcccagcccagcgcccagcgagcaggcgacgcggaggggccgggcctccagtgtcccgagggccgggcgctgagactccggccgcgcagctgggagctgcccgcgctgcgctgacagccgcgccgacgtcctccccgccggg

SEQ ID NO: 40314 - DNA, 2300 bp, Homo sapien
tctactaaaaatacaaaaactagccaggcatggtggtgggcgcgtgtggtcctagctacttgggaggctgaggcagaagaattgcttgaacccgggaagtggaggctgcagtgagctgagactgtgccactgcacttcagcctgggcgacagagtgagactcctctcaaaataaataaataaataaaattaaaaaataagataatcactaccaggaatgataactcttagaagaactgggagcagtggagagggcaccaagatgatttccacgtctgtccagatttcctggagcaaggcaaatacatttcccaaataaatggacttcttcctgagaaagtggagaaccccaaacttacacatcttagtagagggcgccatcttctggcctggaccctgccccctcccagcctgtgtgtgcccgaggaccaggctctcctaggctcccagtaagtacatcatgtgtgactgggaaagacaaccagctttctccttccgtggctggctgcaggatcataaaactgcttttccactttacaatcaatcaggttgggtcaggcaggatttcaaggcttctgtcctaggtagatgggctctgtaaagtcccgcttaaaaaaaaagtgaaggtaggttcaagatctgcacacaactggggatgaggggagtctgatgctctgctgtgtgatcatgcaaggaactgttcccagtgcaagttatgtcgctttcagggacactttcttcatccaaataagaatgtcaaccacactaaaactaatggatgtctctgagtggtgtgtgtgtgcgggtgcgcatgtgcaaatgtatcttaatatttaactgtcagacagccagaaataagctctcatcctgtatctcacgctagtggggaggtctagaaaaggcgggggggcttggactgccggatcccacccacgattaatgtgctgaagcccccttctgttatgatactaaagtaattcaaattgaagagaaaggaccgttgggtattattgtgtctcttggccctccaatgtgagcgatccccatgggaatggacgggatgtctctgaaaaggagtagtgattctcacactctgagaaagcagtctcttagggaagggatggtgtctttaggtttggatatcacgtgtaaaaactgggtgtggaaaagaagggagtgacacttcttaaaggtatgttttattttgtttgagatggagtctcgctctgccacccaggctggagtgcagtggcgcgatcttggctcactgcgcctcctgcgcctcctgggttcaagcgattctcctgcctcagcctcctgagtagctgggattagagacgtgcaccaccacgcccagctaatttttgtgtatttttagtagagacgggatttcaccatgttgcccaggctggtctcaaactcccgagctcaggtgatccacctgcctcggccttccaaagtgctgggattacaggcgtgagccaccacgcccagatagctcaaggttttttaaaaaacatctgaatctgcgtgcttgcgccgctccaggtctccatcactccatattctttcactccaaactcctttagacattcctgcctggcctccaaaagcgtttgggtttgcatctctggatttttttttcaacttcctcattttacagttgagaaaaacaggaggtaaagagaggaaggaatctgctttaggaagcagctctggaaagcagaacacagtttcctgctcccgctctctctccactactctccctttaaaaaatatactttcttctatggccaattaaacattcattaccaacctgcgattcccttaggactttaaaaggagggttgttcaggggtgacaacaatcttctgtctgttatacgtgtccatgtaggcaaaaactttcccaaattcaaccccagtctaggtcccaaaaactaactacagagtgcagggaaaccagacagctacagttcagcccaggaacctcctctcctagctcacgtttctacccgagcccgcggaggcacagaccggaagtggcgcgcagcctcccagcggagggaaccgcctatgcctccgtcgcgctggccggaagacgggggtgcaaccctttgaagtgtcccctcctacttcttgctgcctcacggttgctgttgcagacccaggagtctctgaaggcttccgcggctttggggccggttgtgagatgccaggcagaggccgctgcccggactgcggctccacggagctggtggaagactcgcactattcgcagagccagctggtgtgctccgac

SEQ ID NO: 40315 - DNA, 2300 bp, Homo sapien
tggagagtcaggctgggtctcttgtggagagcaaagccagggatgcagctgaagaagtggcgccccctcttcccatgggagcatcagtcccttccattgattccatgatgcggaagctggaagagatgggtctgaacctccgcaaggaccagaagaaaaccaagaagcgtgtgtcattttctgagcagctcttcacggaagaggcagtggcgggggctgccttgctggtggaaggacacagcagttgtccccaggagctgaaccctgcatggtctgttgctggaaacgcgtctgacggagagcctcctgagtctccccacgcagaggactcagaaagggaatcggtgaccacacctgggccagcgacgtgtggtgcgccagcctccccagcggatcacctcctcctcccctcccaggaggagagtttctccgaagtccccatgagtgaagcaagctcagcgaaagacactccactctttaggatggagggagaggatgcccttgtgactcagtatcagagcaaagccagtgaccacgaaggtttattgtctgaccccttgagtgaccttcagttggtctcagattttaaatctccaatcatggccgatctgaacttaagccttccttccattcctgaagtcgcatcggatgatgaaagaatagatcaggttgaagatgacggagatcaggttgaagatgatggagagacagcaaagtcgtcaactctggacataggagctttgtccttgggcttggtagtcccctgtcctgagaggggaaaggggcccagtggcgaggcagataggttggtactgggggagggcctgtgtgatttcaggctgcaagcaccccaggcatctgtgacagctccttcagagcagaccacagagttcggaattcacaaaccacatcttggcaagagctcaagcttggataaacagctgccaggccccagtggtggtgaggaagaaaaaccgatgggaaatgggagtccaagcccgcctcctggcacatccctggacaatcctgtacccagcccctccccttctgagatctttcctgtcacacactctttccccagctctgcacattctgacactcaccacaccagcacagcagaatctcaaaaaaaagccacagcagagggctccgctggtagagttgaaaattttggcaagaggaagccactcctccaggcctgggtctcaccctcggagacacatccagtctcagctcagccaggcgctggaactgggtcagccaagcacaggtgagagatgggggagattgtctatgtaaatgtgagcaatgtccccctttgcttcctacctgcagaggttacggctttctaaccacacagacgtctgatgtgacaacccacctgtcactgtcctgctggtagggctgccccttgtggtggtaatacctcaagacactgctgcgtttatagcaagaacataatagtagtctgtaaatatagcttaggaattgttctgcacggtcagatttggagctcgcacattgcagaaacgcaatgccaccagtatcttaactgtctcagaactaactggcattgagtggtagtagtatctagcagtgtcaaaaacttcttcaagcactccccaacgtgaagcttgtatgtttgttttgagctgtctttactgtggagggacagaagcctctgcagagttttacagtgaatgcctaggctctagttgacttaaaaaaataagagactgcctttaatgttctgatgtttgtaacaagaccaagggtcccgtgaagatatcaggacatctggacaaggacatgctttcctggcttgcatgtggcagccctgtcctgactgcttttgtttccacaggaactgagacattggagtgctttggcccagagatgagggcagcatgtgacccacctgccccttgtctggcttactggctgccgtctttgcagtgggcagttgctcagttttgccatgaccggagggtctaaagatccttttccccttctctttagacttcatcctgtgaagccaatgaatgcaatggccaccaaggttgctaactgcagcttgggaactgccaccatcatcagtgagaacttgaacaatgaggtcatgatgaaggtatgtcctctgagaagctggtgtgttcgttagggattgacagaacacccgtttccatagtcaccatcgtatacctctccctgggcagccggtggtgccaggaacacttagtcatacatcttgagtctttgagtaaactttggaagcccccagacattccattggataatta

SEQ ID NO: 40316 - DNA, 2300 bp, Homo sapien
acagggcagctccctgaacctctttgaagatgtgcagatcacagaaccagaagctgagccagagtccaagtctgaaccgagacctccaatttcctctccgagggctccccagaccagagctgtcaagccccggtgagttttggctcttctcgtgcagggcatttctgccttgccattggtggttttcaggcttacgttagaccagctcttgtgggtcccatgatatcatagtacccatatatgccaaaggtttgctggtctaaattatttttttaaccagtccctactgccagcctggcctgccctgtataaattgcagtgatgtttcccagctcagagctactgcccagcaggcatggtctgtcctttcagtcagcttatcagatctcagtggaacgcagtggtttgtagcagattgtgggtgttgcaagttgggaatactgagtttgggttgtagtgtatgcagaacctgtgttttcgaagttcttatctcacatttccctttgagccagatgttatcctgcctccttgccttttggcattggtttctggtatgagagaccctcggtcctctctcaagtgacagtgacggttctttgtgtccactctgccccttgttgtaagagccggcataagccttggggactggccttggggacttctgcttttctgtgtgatcacattcatactgacaatatttctgcggtctggggagtgagatttttttttttagagattctgcttactttgacatgcacacacacacacacacacatatacacacacatacacactgttcctcttaaacttatctgtgcctgttgctttgtgttacatctttaaccactttaaaccttttaggtgcattttgtcctgtaataatcaaatgctcgggccttgtgttaatcaccacaagaaaccagaggctattgctttaccgggatcttttcatttctattgcaacagacttttgtgtgacggatctgcttggttataaaagtgtctgttgtgtatgttaagtgttagtgttcctttttttttttgagacagtctccctctatcgcccaggctggagtgcagtggcacgatctcaactcactgcaacctccacctcccaggttcaagcagttctcctgcctcagcctcccgagtagctgggactacaggtgcacaccaccacacccggctaatttttgcatttttcagtagagatgaggtttcaccatgttggctgggctggtcttgaactcctgacttcaggtgatccgcctgcctcggcctcccacagtgctgggattacaggcgtgagccaccgcgcccggctagcgttccttttttaacttcttaaggtactgccccacgtgtaaagacgttctcccctggtgaatgacttgtttttgtgtattttctttgtctctcgtgatgcatctgcactgacctgcagattttattttgtcctttttgcagactggaagtgtctccagaggcgcaacccacagccaggcttccttcccctactgactccccttcctctcttcctcctcttccttctagctctggccaggcatctgtcccctctgaattgggacatggtgcagacacacagtcctctgagagtccttctgtcttctcctctctctcatctcccatagcagctcccatttccacatccactccaattgaaagctggcctctcgtagacaggggccaggccaagtctgaaggaccacccttgctccctaaggcagagttgcaaactgagagtttaacaccggttccaaattctggttcttctgccctgggatcacttttcaaacagccatcctttccagcaaataaagggacagaagattctctgatgggcaggacccgtgagacaggcacagagaagaacaccagcagccttgagttggaggagtctctcccagagcagcctgaaacagggcgacaagaggaagaacttccgagattcccctgcaaaaaacaagactacagcccatcatctggagaagcccaggaagtaccgtttgccctttcactcagcagtgatggagctgtgagccctgttggggagcttgcagcaggaggagacagagacttggagagtcaggctgggtctcttgtggagagcaaagccagggatgcagctgaagaagtggcgccccctcttcccatgggagcatcagtcccttccattgattccatgatgcggaagctggaagagatgggtctgaacctccgcaaggaccagaagaaaaccaagaagcgtgtgtcattttctgagcagctcttcacggaag

SEQ ID NO: 40317 - DNA, 2300 bp, Homo sapien
actgcaaaccacccgtttaacatcttatcccctttctgttctttttcttcccaaagtcatgtctcacaagagaacagcgagtacggatcttaagcaactgaaccaggtcaactttacccttcccaagaaggaaggactttcctttcttggtggccttcggtctaagaatgatgtcctttcccgctctaatgtctgcatcaatgggaaccatgtttacctggagcagccagaagccaagggtgagatcaaggatagcagcccgtcctcctccccatcccccaagggcttcagaaagaagcatttgttctcttctacagagaacctggcggctgggtcttggaaggagcctgctgaaggaggtgggctgtcttctgacaggcagctctccgaatcttccaccaaggactccttgaagtctatgaccctgccgtcctaccgacctgccccactggtcagtggggacctcagggaaaacatggcccccgcaaactcagaggccacaaaagaagctaaggagagcaagaagccagagagcaggaggtcctctttgctgtctctgatgacggggaagaaggatgtggctaagggcagtgaaggtgaaaaccctctcacggtcccagggagggagaaggaaggcatgctgatgggggttaagccgggggaggacgcatcggggcctgctgaagaccttgtgagaagatctgagaaagatactgcagctgttgtctccagacagggcagctccctgaacctctttgaagatgtgcagatcacagaaccagaagctgagccagagtccaagtctgaaccgagacctccaatttcctctccgagggctccccagaccagagctgtcaagccccggtgagttttggctcttctcgtgcagggcatttctgccttgccattggtggttttcaggcttacgttagaccagctcttgtgggtcccatgatatcatagtacccatatatgccaaaggtttgctggtctaaattatttttttaaccagtccctactgccagcctggcctgccctgtataaattgcagtgatgtttcccagctcagagctactgcccagcaggcatggtctgtcctttcagtcagcttatcagatctcagtggaacgcagtggtttgtagcagattgtgggtgttgcaagttgggaatactgagtttgggttgtagtgtatgcagaacctgtgttttcgaagttcttatctcacatttccctttgagccagatgttatcctgcctccttgccttttggcattggtttctggtatgagagaccctcggtcctctctcaagtgacagtgacggttctttgtgtccactctgccccttgttgtaagagccggcataagccttggggactggccttggggacttctgcttttctgtgtgatcacattcatactgacaatatttctgcggtctggggagtgagatttttttttttagagattctgcttactttgacatgcacacacacacacacacacatatacacacacatacacactgttcctcttaaacttatctgtgcctgttgctttgtgttacatctttaaccactttaaaccttttaggtgcattttgtcctgtaataatcaaatgctcgggccttgtgttaatcaccacaagaaaccagaggctattgctttaccgggatcttttcatttctattgcaacagacttttgtgtgacggatctgcttggttataaaagtgtctgttgtgtatgttaagtgttagtgttcctttttttttttgagacagtctccctctatcgcccaggctggagtgcagtggcacgatctcaactcactgcaacctccacctcccaggttcaagcagttctcctgcctcagcctcccgagtagctgggactacaggtgcacaccaccacacccggctaatttttgcatttttcagtagagatgaggtttcaccatgttggctgggctggtcttgaactcctgacttcaggtgatccgcctgcctcggcctcccacagtgctgggattacaggcgtgagccaccgcgcccggctagcgttccttttttaacttcttaaggtactgccccacgtgtaaagacgttctcccctggtgaatgacttgtttttgtgtattttctttgtctctcgtgatgcatctgcactgacctgcagattttattttgtcctttttgcagactggaagtgtctccagaggcgcaacccacagccaggcttccttcccctactgactccccttcctctcttcctcctcttccttctagctctggccaggcat

SEQ ID NO: 40318 - DNA, 2300 bp, Homo sapien
cacataagtggactcatatagtgtttgtcattttctaactgactgatttcacttttttttttgttttttttgagatggagtctggctctgtcgcctaagctggagtgctggagtgcagtggcatgatcttggctcactgcaacctccgcctcccgggttcaagcaattctcctgcttcaacctcctgcatagctgggattacaggtgctcgccatgatgcccggctaatttttgtatttttagtagagacggggtttcgccatgttggccaggctggtcttgagttcctgacctcaggtgatctgcctgcctcggcctcccaaagtactggtatcacaggcgtgagccactgtgcctagcctgatttcactcttttaaaaaattctttatttttatttatttatttttagaaacagagtctcactttgtcacccagactagagtgcagtggtgcaattatagctcactgcagcctcgaattcctaggctcatgttgagtagctgagagtataggcgcacaccaccatgccggcaaattttttaattttttatggagatggagtctcgcaatattgcccaggctggtcttgaactcctggcctcaagtgatcctcctgcctcaggctcccaaatctctgggattacaggtgtgagccaccatgcccaaccccctccccactttttttttttttttaattctgtgttgtattattattatttttttactccctggcagggaccattccttactacaaacttgattttctctgagatttaattatacatcatttgcacgccacccttcttaactgtttgtgtatgatctttgctttttttttttttttttttttttgagatggagtctcactctgttgtccaggctggagtgcagtggtgcgatctcggctcactgcaacgtctgcctcctgggttcaagtgattctcctgccacggtctcctgagtagctgggaccacaggcgcctgccaccacacccggctaattttttatatttttagtagagatggggtttcaccatattggccaggctggtctcgaactcctgaccttgtgatccacccacctcagcctcccaaagtgctgggattacaggtgtgagccaccgcacctgccctgatctttacatttttaccctactgaaggaaaacatcactcatcggaagtgattccatggaatatttttttttctttatttttagaatgagctctttattgaatcaggatttgaggtgattatacgctaagcacaacactggatcctatctttgtctagcgcgtgtcttctcaaaaataaaagtgcaaaataaaaaacaaaacaaaagaaataaaagtgcaaattctgctctcagccgggtgcagtggctcacgcctgtaatcccaacattttgggaggctgaggcgggcggatcatctgaggtcaggagttcgagtccagcctggctaccatggtgaaaccccatctctactaaaaatacaaaaattagctggacatggtcacgcgctcctgtaatctcagctactcaggaggctgaggcaggagaatcacttgaacccaggaggcagaggctgcagtgagccgagatggtggcattgcactccagcctgggtgacagagcaagactctgtgtcaaaaaaaaaaaaaaaaaaaaaaaaaaaaattctgctctcatctaccacttcccgaagagaaagcatgagaatgcatgcattgaagaggctgctggtagcagagaggagaggccagttcatggggattgtgaacattgttgcagttgcttccattcaaaggtaactcctcagcctttctcctttcaggtggtataagttgaaatccaaaccaggaaagaaggacaaggagcgaggagaaattgaggttgacatccagtttatgagaaacaacatgactgccagcatgtttgacctttctatgaaagacaagtctcggaatccatttggaaagctgaaggacaagatcaaggggaagaataaggacagtgggtcagacaccgcctccgccatcatccctagcacgacaccttcggtcgacagtgatgatgagtctgtggttaaagacaagaaaaagaaatcaaagatcaagaccttactttccaagtcaaatttgcagaagacgcctctttcccagtccatgtctgtcctgccgacttcaaagccagaaaaagtgctgcttcgtcccggagactttcagtcccagtgggatgaagatgacaatgaggatgagtcctcctcggcctcggatggtgagtttctgcctcttcctgc

SEQ ID NO: 40319 - DNA, 2300 bp, Homo sapien
acaagaatcgcttgaacttgggaggcagaggttgcagtgagctaagattgcgccattgcactccagcctgggagacagagcaagactctgtctccaaaaagaaaaaaaaaaaagaaaaaaaatatttccaacatactaaacaggcctttctcacactgcagctgccctcagttgcaaacctgaggcatacctctgtcttctaatttcctacgtggtaaaaggaaacacttggtcctcatggttggccaacttaacctgcaaactcttgagttcagtagcacttcccgggtacctactgtgcacccaggtttgtgctggaggctgtgaaggagacaagttgaataagtcactacctggtccctgccctcagcagggcataggaagtcaaaccttggagaaatatgagtgaacccttgcagtgggaggttggcaaagacagtcaagggtacaacgtaaaggcctggaagtaaaaagtgtctgggctacaggtttgtttgttcgggagatagaggagaatgaggtagggtggggtcaaaatggagtaccttgaaatctctgttcagtccgaaggtaacgcggttgctggtgaggcagccagcaggttagtgaagcaatgtgcagtgtgaaccagagggaggagagcctggagattggagggacacgagtagccatccaagattggggttctgtggatctggaagaatcaagagatgcactgaacagctgtttgggagtcaggacactgggatcccagtcccagctctgcagagggaccttggacatgtcactcctctcttctgagtctttccttaactgtaaaactttaaaaccttccaagtgacctttccaatctgatgactcgttaaacagttgagcctttgaactaggacctgtgaaatgaagggaagcagccgatctattaggcatttggaacaagaaagggactgcctgggagcccagggatagaggcagggagagactaaagagggcctggcaagggagaaatggggaactgcgggctgggggcctgccactgtcccgatgtttgatttggcaatcccattttcagttcctcctttcttccctttttctaactcagcctcgccttatctggtggggggagggcaaaataggacactcccacattgaactcatgctccccaggataccttccccttttccggccctcacaaggtcctcaccttcctctgcagctgccttcctccagagcaaggctttccagcgggagaagtagaaagcacagtgaattgggtgggcatcttccttagcaccctcatagttaccaactttatttttttgagacagggtcttgctctgttgcccaggctgggagtgcagtggcacgatctcggctcactgcacctcgacctcctgggctccagagatcctccagactcagcctcccaagtagcggggaccacaggcgcttgccaccactcctatctaattatttttaattttttttgtagagacggggatctggctatgttgcccaggctggtctcgaactcctgggctcaggagatcctcctgtctcagcctcccaacgtgctggtcatggttatttactgagaactcaccatgagccaggcactgggccaagaactgtaatgcattattattattattttttacagcaatcctaggaggtgattgtcaggtgaagaaattgagacttgatgttaggtaatccgcgcaaggccacgactggcgatgtgaccctggaaatgaggtctgacttccaagtcagtgcttcggccagctccttcccgccgtgcgacctttggcagctggggaccccatccgtcacctaccacctctcagattagattctcgatgcgcccgcccctgcgcacgtgatcccctgcctgcctggccgcgccagccccgcctccggcgcccgggtgcccggagctgcccgcgctgctgaggccggcggggcggggcggggcggggcggggcgcggcgcagcaggtggagcaggcggctcgggcaggggcgtggccttggccatgaggggcgtggcctggcgggggtgtggccggaagccttaaagtggcctggtcgccggggcgggccgtggaggccgccagtcgcggcgatcttctcctcgcttctggagtgttatcgtcaccatgtccctaatggtctcggctggccggggcctgggggccgtgtggtccccaacccacgtgcaggtgacggtgctgcaggcgcggggcctgcgggccaagggccccgggggcacgagcgacgcgtacgcggtgatccaggtgggc

SEQ ID NO: 40320 - DNA, 2300 bp, Homo sapien
cccgtgttcaagcaattctcctgtctcagcctcctccctacatgcgcccaccaccaagccaggctaattttttttttgtatttttagtagagacggggtttcaccccattagccagtatggtctcaatctcctgtccttgtgatctgcctgtcttggccttccaaagtgctgggattacaggtgtgagccaccgtgcccgacctttttttttttttaaagacaggatctcactctgtcaaccaggctggagtgcagtgccatgatcatagctcactgcaataccaccacgcccagctaattttaaaattttttgtggagtgggtggggggggtctccctatgttgctcaggctggtcttgagctcctgggctcaagtgatcctcccgcctcagtctcccaaagcactaggattgcaggtgtgagccaccatgcctggctgtggctgaccctttgtatgcctaaatcaggcagtcattggctacccctgtcagtgggggtgaaacctccaggtggtttctaggctagctgactcctgccagccaagcacaattctccagagaacacaggcatataagccttgtccaccagcgaagcagcagctggggccgggcacattggtggtgaaggccttctgggtgagacatcaacagtgtttgcaacaatcatttaaagagttatttaacatcaggctgggtgtggtggctcatgcctgtaatcctaacactttgggaggctgaggtaggcagatcacttgaggtcaggagtttgagaccagtctggccaacgtggtgaaaccctgtctctactaaaaatacaaaaaaaagccgggcgcagtgactcacgcctgtaatcccagcactttgggaggcccaggtgggcagatcacctgaggtctggagtttgagaccagcctgatcaacatggagaaatccccctctctactaaaaatacaaaattagttgggtgtggtggcgcatgcctgtaatcccagctactcgggaggctgaggcaggagaatctcttgaacctgggaagcagaggttgcagtgagccgagatcacaccactgcactccaatgtgggcagcaagagcgagactctgtctcaaaaaaaaaaaaaaaaaaaaagagagagtcattaaacatcaaaaggaaaagaaagcaagcaatatgcagactgactctatagaggctggctcttttctccccttggcctctgctgtctatacttactagttggctgtcattgaaacttaacaaatggccaggtgtggtggctcatgcctgtaatcccagcagtttgggaggccaaggcaggcagatcacctgaggcaaggagttcgagactatcgacaaagtgagactccatctcaaaaaaaaaaaaaaccaaaaaaagaaagaaaaagaaacttaacaaacatatgtagaagtcttggctctagataactgagagaaataggactggcttagtgagttgccaattatattctaataataggattctttattaaaacaactgtggaagaaaacagtgtttgctttttattccttttgaaatctggggcactttgcaaaatggaaatcaatgcctcgacttgcattggtgtgtgatctggggtttttgcttctgcaggagaagccctatctggcttattggctgcctgccttgccctatgtctttctttcttttttttttttttaatttgtataaatgtgtgaagtacaagtgtaattttgttagatgcatacatcgcatagtggtgaagtcagggcttttagggtatccataaccccaacaatgtacattgtatctgttaagtaatctcccattatccttgccctgtcatctaaggagtgggcttgttactttggactgagccacctggggctagagaagagaaggcattgagtgagggaaacgggcttgggaattccggagattgttatcctgccctgcccgctgtctgaggggattctcctcaagtaccctggaatgttcctgtggcccctgtggatcgccaccacaaagatcatgaggttctgttgccctggcaacccgttgtccagcgcctctgcactggggctgccaaggttccaggaagaggcaggactgcccggcccagccttggaggaagacttctgggcagaagcggaacacaggagcagagacacatagtcttggctccagtttcgtttcagttatgcccaccctttcagtgttcatggatgtgcccctcgcccacaagctagagggcagcttgttaaagacctacaaacaagatgattacccgaacaagatat

SEQ ID NO: 40321 - DNA, 2300 bp, Homo sapien
gttaatgaatgaaatccttaaggaagtccggacacggtgactcacacctgtaatcccagcattctgggaggccgaggcgggtggatcatctgaggtcaggagtttgagaccagcctggccaacatggtgaaaccccgtctctactaaaaatacaaaaatttgctgggcttggtggcacatgctcatcccagctacttgggtggctgggaggcttgggaggctgaggcagaagaattgcttgaacctgggaagtggaggttgcagtgagcagagattgtgccactgcactccagcctgggcaacaagagcaaaatttcatctcaaaaaacaaataaacaaacaaaaaacctaaaggaagtggagcgaacacttaccattggggagatggcaatggaagagttgtgtatagtttggggggatggtggacctgcctcatacccagtcacccatttacccatttttttttttaaaatagggtcttgcttcttgccgtcttccaagctggagtgcagtagtagcatgatcacagatcactgtaaccttgaactcctgggctcaagcgatcctctcctctcagcctcttgattcatcctttcttttttttttttttttttttttttctgatatggagtttcgctcttgttgccaaggctggagtgccatggtgtgatctcggctcactgcaacctctgcctcccaggttcaagagattctcctgcctcagcctcttgagtagctgggattacaggcatgcgccaccacacctggctaattttttttttttttttttgtatttttagtagagacagggtttctccttgttgttcaggctggtcttgaactcctgacctcaggtgatctgcccacctcgacctcccaaagtgctgggattacaggcgtgagccaccgcgcccacctgttgattcatccatttttaatatgtctttatagcagaaagattttaagagaaggggctatctagaaaatctctaggtggaaaggtgcatggaaggggcagtgcagagtggggaagatggagaaattgaaattcttcagcatcccagactacatagtgccaaatccaaatgcaaatccagagctagcaatgaaaaagactcctggccgggcgcgatggctcacgcctgtaatcccagcactttgggaggccgaggcgggcggatcacgaggtcaggagatcgagaccatcctggccaacatggtgaaaccccgtctctactaaaaatataaaaattagttgggcatgctggcgggtgcctgcagtcccagctacttgggaggctgaggcaggagaagcgcttgaacccgggaggtggagattgcagtgagcagacatcacatcattgcactccagcctccagcctgggtgacagagcgagacgccgtctcaaaaaaaaaaaaaaaaagaaaagaaaaagaaaaagactcctgagcctcctagtggttcacgcctgcaattccaactactcaggaggctgggacaggagggtggcttgagcccgggagttcaaagccagcctgggaaaaatagagagagagagagacttgaaatatggtaaatttcctcagtacctgaaaatattaaaaaaaacaaaaagctagaaggaaagagaaggtaactgaaacagaagggaaaggggacagatctcaccaagctgaggtcttgggagaggagatactggctgagccctattacttaatttaaaataccttaggggaggccacccaagtggatgcggggctcctgtgaatcctttgcttgactccagcgggttacctttgcctctgatacataaagggtggggatgggagcgctctcctctctccttcccctgccttgctgtgggaacttctgggaaaggaggtgcagggctccaggaagccagtgcccagggagtgctatgctgagtccaggagcctggccacggcaggggtggacagatggtggcagaggaaccacggtgtcccttcctccagatttagctaaaggaaacgtggagcatcccattggccatcctccccactctccaattcggctccagaggcccctccagactataggcagctgcccctttaagcgtcgctactcctcccccaagagcggtggcaccgagggagttggggtggggggaggctgagcgctctggctgggacagctagagaagatggcccaggctggggaagtcgctctcatgccttgctgtcccctcccctgagccaggtgatttgggagaccccctccttccttctttccctaccgccccacgcgcgacccggggatg

SEQ ID NO: 40322 - DNA, 2300 bp, Homo sapien
tggagtgcagtggcagatctctactcactacaacctctgcctcccaggttcaagcaattctccacctcagcctcccgagtagctgggattacaggcacccgccactgtgcccggtctgttgtttttgtttgtttgtttgtttgttttgtttttttgtatttttagtagagacagggtttcaccatcttggccaggctggtcttgaactcctgacctcatgatccacccgcctaggcctcccaaagtggtgggattacaggcgtgagccactgcacccagccgaaatttatttttttttcttttgagacagagtcttgctctgacgccaggctggagtgcagtggcatgatttcagctcactgcaacctctgcctcccaggttcaagcaattctcctgcctcagcctcccgagtagctgggactacaggcatgcgccaccatgcccagctaattttttttatatttttagtagagacagggtttcaccatgttgtccaggatggtctcgatctcttgacctcatgatccgcctgcctcggcctcccaacgtgttgggattacaggcgtgagccactgcgcctggcccaaaattaatttttataatgtatttttcttaacccagtatactcaaaatattatcagttcaacatacaatcaatatagaaacaaattattcaggtattttacatgattttcttcacactaagtctttgaaatatggtgtgtatgttaaacttgtgacagtttggactggtcacatttggagtgctcaatgtgcacctgtagctggtggctactgtcttagccactgtaggcctaaagtttccctcaaaagtgagaccaaactcaacaggtctccctatctcaggccttgccctccttggcgcattctgaaactccactggctactagttatccttccaaaaaacaactcaaatcatgtcatccccctgcttaaaagatctctgatatctcctgcccttctaagacaaagtccaagcactttggcataatttgaaaaactcaacgacctgaccccaatttcctttttaaaaaattattatatatttttttagagatagggtctctgtcacaaagggtggagtgcagtggtgtgatcacagctcactggagcctcaaacccctgggctcaagcatcctccagcctcagcttcctgagtagctgggattacaggtgcaccacccaatttcccttttaaactgccctcccctcttcaccctcttccccacaatatgtgcccataatgctaagaacttctcaaacccaacaagcttttccatcctcggtccttcttgcatttttctctctccccttgaacatccatccatccatccatccatccatccatccatccatccatccaaggagtacctactaaacctcaggtggacgttggactcaattcaggggctatcgggaaacctcttcgacactcttactcctctccaacgcccttccccaccacccacctctgcgcccccagctctaaatttagctcccaggacgccgctggttggttcactcctcctcccacaccctctctaaaggccgggaacggaattgttagcccctccacccccacccccatcaaggtcaagaaattgaagcggggcggggggcggtgagcataactactcaatccccattttctcatctgaggaactaaggcacgaaacagggagtgccgaagggtacaccaggcctgatgtcctaatgcagaaaccgggccttcctgcagtgggccgggtcagctcggatctccgcgcggtcctgagtcgccgcccccaacccagccaaggattaatttaggcgagctatcccgcccgccatccccatatccgtccctgccagcgtggcggggagggaccccggacggaggggcagtcgctgcggggcggcgccagcgcccgtgcggaagagcccgtgagcagacgggagtgggtcggggggcggcgggggatcccacgtggaagcagcgtcctggagctgggtggggctgcggcgcggactacaaatcccaggggcgtggggcgggagaggcggaaggggcgtcctggggcggggcggcacggggcgaggcggagcgaggctggaggcgcgggagggcagcgagaggttcgcgggtgcagcgcacaggagaccatgtccgggggcagcagctgcagccagaccccaagccgggccatccccgccactcgccgggtggtgctcggcgacggcgtgcagctcccgcccggggactacagcacgacccccggcggcacgctcttcagcacca

SEQ ID NO: 40323 - DNA, 2300 bp, Homo sapien
ggtcaggagattgagaccatcctggctaaaaaacggcaaaaaccctgtctctattaaaaatacaaaaaattagctgggcgcggtggcgggcgcctgtagtcccagctactcgggaggctgaggcaggagaatggtgtgaacccgggaggtggagcttgcagtgagcggagattgcaccactgcactccagcctgggcgacagagcaacactccgtctcaaaaagaaaaaaaaaaaaaagaatattagctgggcgtggtggctcgtgcctatagtccctgctactcaggaggctaaggcaggaggattgctttacccggggaacttgaggcggcagtgaggtatgatgccgccactgctgcactccagcctgagcgacagtgcgagactctgtctcagaaaaaaaaaaaaaaaacacacaggtgaaaccccgtctctactaaagatacaaaaattagccaggcgtcatggcgcgtgcctgtaatcccagcaactcgggaggctgaggcaagagaatcgcttgaacccgaaaccgcgaggtggaggttgcagtgagctgagatcgcgctactgcactcagcctgggcgacaaaccgagactccgtttcaaaaaaaaaaaaaaaaagccgtgcgcggtggctcacacctgtaatcccagcactttgggaggcccaggtgggtggatcacttgaggtcaggagatcgacaccagcctggccaacatggtgaaaccccgcctctactaacaaaaattagccgggcgtggtgacagatacctgtaatctcagctactcgggaggctgaggtaggagaatcgcttgaacctggggtggaggttgcagtgagccgtgatcgggccactgcgctccagcctgggcgacagagcgagactctgtctcaaacaaacaacaacaagaaaacacaaaattctgcgaccatatgttaaaactgctacaatactacgtatttgggaggagatacttagatcaagcatcctgcttctctttggagtaccaacccctgatttaagtatttatcatcaattttaaaaatgtaacctggcaactcagttaggtctttcttcaattttgttgaaaaccaataattgagaaccaattgggaaatcaatatctacgtatttcccatggcgtccagtggcccagagattcctacactatcggtggacacatcacagtaagattagactgaggattggcgaggggtgcgccgttcttgtgtaaagcgggagaagagtgtattatcgttaggcaacattttaggatataggataaacactggtgtcctgaaaacgttcctggccgcaacactctcagaggtttgcattctcgagtttggagaccatggctctgaaagactcaactcactccactgatgccagccaccagctactgttgatgacttcccaagttcgtactttcagtccacacctcttcctttcgctgggcaccaaacttgtctacattccgagtgccccggcacaccccggggcttcgctttccgcctctcacagtaggaagcggcgagccgcttctagtgcccacgccgctcctcggctgcccggcctgggttttccaccctcgcccctggaatcggcctccctagattcccttccctcttaaaatcatttggaaacgggctccaaggggcgaccctgcgcagaaaaccaaattccatccggggcgggcagggagtgctagactccaaggaagacgtttcccacattcggtggtgaggagtgtttggcggcacggcacggccagcgctctcaaggaccctcttctgcgcagaatatccagtcgtagccacgaaaatacgccgcgtcagtccctgactcgaaaggaagtcctccagagagccgcactaaccatctagcttcctccaccttcagcctgccaggcccgcggccaccgccggcgcgggaggccggcccacctctgcccgcgcgcctggccttaaagcggtcgtggaattatgcttcctcaggcaggcggtggacgcaccgcgggctttttctgtttgaagactacagcgtcacacagcaacgcgcgcgagagaagagagtattctcgcgagaagtccaggggtggccgtgatggcggcggcaggagcaggacctggccaggaagcgggtgccgggcctggcccaggagcggtcgcaaatgcaacaggggcagaagagggggagatgaagccggtggcagcgggagcagccgctcctcctggagaggggatctctgctgctccgacagttgagcccagttccggggaggctgaaggcggg

SEQ ID NO: 40324 - DNA, 2300 bp, Homo sapien
aaaaaaaaaaaaaacacacaggtgaaaccccgtctctactaaagatacaaaaattagccaggcgtcatggcgcgtgcctgtaatcccagcaactcgggaggctgaggcaagagaatcgcttgaacccgaaaccgcgaggtggaggttgcagtgagctgagatcgcgctactgcactcagcctgggcgacaaaccgagactccgtttcaaaaaaaaaaaaaaaaagccgtgcgcggtggctcacacctgtaatcccagcactttgggaggcccaggtgggtggatcacttgaggtcaggagatcgacaccagcctggccaacatggtgaaaccccgcctctactaacaaaaattagccgggcgtggtgacagatacctgtaatctcagctactcgggaggctgaggtaggagaatcgcttgaacctggggtggaggttgcagtgagccgtgatcgggccactgcgctccagcctgggcgacagagcgagactctgtctcaaacaaacaacaacaagaaaacacaaaattctgcgaccatatgttaaaactgctacaatactacgtatttgggaggagatacttagatcaagcatcctgcttctctttggagtaccaacccctgatttaagtatttatcatcaattttaaaaatgtaacctggcaactcagttaggtctttcttcaattttgttgaaaaccaataattgagaaccaattgggaaatcaatatctacgtatttcccatggcgtccagtggcccagagattcctacactatcggtggacacatcacagtaagattagactgaggattggcgaggggtgcgccgttcttgtgtaaagcgggagaagagtgtattatcgttaggcaacattttaggatataggataaacactggtgtcctgaaaacgttcctggccgcaacactctcagaggtttgcattctcgagtttggagaccatggctctgaaagactcaactcactccactgatgccagccaccagctactgttgatgacttcccaagttcgtactttcagtccacacctcttcctttcgctgggcaccaaacttgtctacattccgagtgccccggcacaccccggggcttcgctttccgcctctcacagtaggaagcggcgagccgcttctagtgcccacgccgctcctcggctgcccggcctgggttttccaccctcgcccctggaatcggcctccctagattcccttccctcttaaaatcatttggaaacgggctccaaggggcgaccctgcgcagaaaaccaaattccatccggggcgggcagggagtgctagactccaaggaagacgtttcccacattcggtggtgaggagtgtttggcggcacggcacggccagcgctctcaaggaccctcttctgcgcagaatatccagtcgtagccacgaaaatacgccgcgtcagtccctgactcgaaaggaagtcctccagagagccgcactaaccatctagcttcctccaccttcagcctgccaggcccgcggccaccgccggcgcgggaggccggcccacctctgcccgcgcgcctggccttaaagcggtcgtggaattatgcttcctcaggcaggcggtggacgcaccgcgggctttttctgtttgaagactacagcgtcacacagcaacgcgcgcgagagaagagagtattctcgcgagaagtccaggggtggccgtgatggcggcggcaggagcaggacctggccaggaagcgggtgccgggcctggcccaggagcggtcgcaaatgcaacaggggcagaagagggggagatgaagccggtggcagcgggagcagccgctcctcctggagaggggatctctgctgctccgacagttgagcccagttccggggaggctgaaggcgggtaagaggtcctgccgcccgaggaagacgcgggagggaggcccgcccctcgcgaatcccgcggctcctggagccctgccgcccgccccctgcgaacccaggccccgccgccaatggctcgccctgcctctgcgccgcttggcccgtcccctctcaagcatatctcggataacgccccttccgcacctttcacgggcggtgggagctgaggctcctgtcgttatctctgatccttgcaccctggcaggaagctggtagctcacactttaacgggaggccttcacatattccagaaaagaaaccactttgcagtgccagactggaagaagtaacggtcactctgaaaacagggtgggagagctgcctctctttgaacctctcccaggaccaactctaaccca

SEQ ID NO: 40325 - DNA, 2300 bp, Homo sapien
aggggggtgactcccctgttctatatgggctccaagtgccaggcctggctctgagcagatcctgtccctttcaccctgtctggtgttggggagacagcgagagtgcatggggccccggcactgctccccatttttagggctcccctctgcctctgtgaggtggtggcaggacacagaactccctcccacagggagcagggcctgggccaggggcagttccagtgtgagtttttccactcccaatattcttgcccagtgaatctggcttaaaagcagcctcaaggtcactgtaaagggaagagattccgtcagagtcagagcccagcacgtgctgcgcctgggtaagggtgagtgggaaatgcagaggcctcgtggggccttgctcagcctgacagggcccctaaagtgcaaagactagggtgaacaccccaacgccctgtcttttctttttttcctttttttttttttgcaacagagtctcgcgctctgtcatccaggctggaatgcaatggtgtgatctcagatcactgcaacctctacctcccaagttcaagcaattctgcctcagcctcctgagtagctgggattacaggtgcctgccactatgcctggctaatttttgtttttttgtttttgtttttgttttgagacggagtcttgctctgtcacccaggctggagtacagtggctttatcttggctcactgcaacctctgcctcccgggttcaagtgattatcctgcctcagtctcctgagtagctgggattataggcatacgctaccactcccggctaatttttgtattgtcagtagagacgaggtttcaccatgttggtcaggctggtctcaaactcctgaccttgtgatttgcccgcctcagcctcccaaagtgctgggattacaggcatgagccactgtgcccagcccatgccctgtcttttcaagctttctgcacataccaagacccccagcccagctcactcagacaaagctactggcgggaaagtgtgaggaagggtgtgggcgtggcccaggccctcctcttctctctgccgtatactgatagggctgccccgcccccccccgcccccccgcgactcagccacgagaggtcatccttgctccagcacagacccctaagaaccctcactcggaacaggactttgggaaaggtggtttctataaatagatgagtaaataaattgacagttgaatataccaagcgtcctggggaccgcaggaggaactgtgtacagatggcttgaaggccagaggcttgggttgttgtcctggccctgccactggccagctgtttgaccttgaacaagtcagttccactctgtggacttcagggtcctcacccagaagaagagcagccatatggtctctactgcctggtaaacaccctggctcactctcgcgagacggtggttctcaaagtgtagtgtgtagtccacacaacacctgcattgcaaccactgggtatttatttatttatttatttaatttatttatttatgacggagtctcactctgtcgcccaggatggagtgcagtggcacgatcttggcttactgcaacctctgcctcctgggttcaagtgattctcatgcctcagcctcccgagtagctgggactacaggtgcctgccacatcacccggctaattttttgtatttttagtagagatgaggtttcaccatgttggccatgctggtctcgaacgcctgacctcaagtgatctgcccacctcggcctcccaaagtgctggggttacaggcgtaagccaccgcgcctggccaagggaagtttttttcttttctttttttcttttttcttttcttttccttcttttttttttttttttttttttttttttttttttttaacacaggtttctgagcctcaattccagatcagctgagcctggagtttctgaagacaagggctagaaatctgcactttaaagtcttgaaaaccactgtgtgccttcatctaagctgcccctgcttctctcccctccatccctcgcctggccctgtcctccctactctcccctgcaccctcccccgccccaagctccccacaaacggccaaagcagcagtgtgaggcaatcgctctatccttgaccccttcctttgcacagtgagtgatggcgtttttatctcctgatgatgatgcacagccttcagcgggggacatttaagacgcagaacaccaggtccaggctgcagctgcgggactcagaggcgaagcttgaggggctcaggaaggacgaagaaccacccttgagagaagag

SEQ ID NO: 40326 - DNA, 2300 bp, Homo sapien
aagtagggggtctggaatctacaaagaggtaggggttagaggaccaaagagcaaaactgatttttagtaaaatggcaggatgtgttagaggatatataaggagagatgagggcaaaagagcatcctcgagcaactaaaacatcctgttacacgtaacaggttcatatagatgttaatatatatttagtccaattacactacatttcccttacatagcacaataagtaatttgtgtttaaaaaaatgatctgtcggccggaggcggtggctcacgcctgtaatcccagtactctgggaggccgaggtgggtggatcacctgaggtcaggagttggagaccagactgcccagcatggcgaaacctcgtctctaccaaaaaatgcaaaaattagctgggcgtgctggcaggcgcctgtaatcccagttacttgggaggctgaggcacaagaattgtttaaacccgggaggtggaggttccagtgagtcgagatcgcgccactgcacactacagcctgggcgacagagcaagactctgtctcaaaaaaaaaaaaaaaaaaagaaaagaaaagaaaaaagatctgtcaaccataaaatgattttttttttttttttgagacggagtcttgctctgtcgctcaggctggagtgcaatggtgcgatctcggctcactgcaaccttctcctcccgggttcaagcgattctcccgcctcagcctcccgagtagctgggattacaggcaccgccatagtgcccagctaattgtaggaacggggtttcaccatgttggctaggctggtcttgaactcccgacctcaggcgatctgcccgcctcggccccccaaagtgctgggattacaggcgtgagccaccgcgccaggcccgtaaaatgaaattttaaccatagattctaaattgcgtattcacagagtaactgagacgattgcaacttatttaaaactatgtgtaaatcatcttgaaacaagttaatgagaaagatcacatgattaaaacaataaaaaatgttgcttgaggaataatgcacagacggaatttagaaaaaaggaaagccagaacaactgcagacggttcttttcgcttttgtataggactgagctcctcttccggacaaaaaccaggaataagggaggtcttcttagtaaaagcaaaagtaaattgtcttaaaaaaaaaaaaaaggttgcaagtgatttggtctttccagaaaagtcaataccatgtctaacagtggtctctactacaataacctgaaggtgctaatgaccctcacagtaaaataagctagcaaatggccacaccgtagagcgcctacatttactgccaattaagtccaactgccgctgtcttaatattttcgctttttaatgaatcctctctctaggtattccgatccatccaccggtaacacgctgatacttcgaaatactgcaggcaggagtggacgggggagaagccccccccctccccgggcttctttcgtgttcgggcctctgctgccgcgatccacggaagcaagaatgagttccatcgcttggggctcaccagctagagggctggcggaggctgcgaggggcagaagtagcagcaggctactgggtgggcaagcggtgtgtaccgcagctgtggaggacatcgacgcggaacgcccggattgagctcagaacacaccggccccgcccgggactcattctacaagcttcttcggaagaggcgcccgcccgggaggaagggtctaaccccgggctccaccgggaggagataaactactcactgtcaatgtcctcgatgaggctggcggtgccaggcatatagttcattttgaactgaaataatgctgcaatgcacagcggcgggaggccagcgcgtccaaaacctcttccctcctaccgcagtcgccgcctcggtgggaccaagcccggaatcccgaccgagaccagcacttctgccccggctttcagccgccgggggctgccggaagctcctccatattacccttacccacttcctgtaacacgtgtgggcccccaggaagaggcggggcagccgtaccgttgggggacaccctttccctgttcctgttaagtaggtaagaggaaactccattggataaatggcgaggaaacgtatactccctcttaaggaacacggtgtcttccttcgtctccgggttcccgagaccccagagtcactgacctccgtccctcagctttcggggttcggcagcagaaggggcgggcccgggcctgggattggctggcgtcgtccgacccccttcgctgctctc

SEQ ID NO: 40327 - DNA, 2300 bp, Homo sapien
ttctcacctacaccgccagtcccccaacctctggcaaccattaagctttctgtctctagatttacctactctggccatttcatataaatggaatcacacaatatgcagtctttctgactgacttagctcacgtagtgtgatgttttcaaggttcattcatattgtagcatgcatcagcagttcattcctttctaaggccaaataatactccattgaatgaatatattaacaccatattttgtttatcgatgcatcagtcgttatgtccttacaacattcctgtattcgaataaagaaccagggctccaagaggttcactcactttataactcaaataataaaatgacatttggggccgagcgcagtggctcacgcctgtaatcccaacacttcgggaggccgaggggcaggggaaagggggatcacttgaggtcaggagttcaagaccatcctggccaacatggcgaaaccccgtctgtactaaaaatacaaaaattagccgggtgtgatggccggcgcctgtaatcctagctactcgagaggctgaggcaggagaatcgcttaaaccgggaggcggaggttgcagtgagccgagatggcaccactgcactccagcctgggcaacagagcgagactccaactcaaaaaaaaaaaaaacaaaaaaaacgacatttctactttttggcgattatgaataatgatgctatgaacatgggcggacaagctttatgtgaacatacgttatcagttttcttgggtatatagccaggagtgggcttgctgggtcatagactaattctaatgcttaatgttttgaggaactaccaaactattttccaccattttacatccccaccagcaatgtacgagaatttcactattacattttcaacaaatgaggataattcttgaacgaacagagaggtatgctgccaccgcagaacgacaacccactacccagaagactgtattaacaaagcagaagtatatgtccggcaggaaaacggagaataaaatgttgcaggtccaagtgtattaggcaagtgagttaacctcgcagagccccggttccttattcgaaaacaaaaaaaagggccgctgtaatgccattttaccttgcagtcgccgtgaaaattaaatcagtcaatccgcgtaaaggtactttacaacactgattattcatgattcgatctcaggcaaggcattaggggcaaacagctaaatgcccagatccctcctcctcgcaaaggttccttcccctcgggagggtccctgagcggcatcgggggctgcagccacttcccttccccgggagagccggcctgccagccacgcaggataaattgctagagctggagcagtagatccgtgccacccctacccagcaccgctcccaggagagagatctgcagcctgctgctaagcttagtaagtccgcgcaggatctttcttttttaaatggtaataaacatattttttggggtcgaagcagaaaaggaggggcaaagggaacacaagcatgtccccccaacctctgatcttagtctcggtctctccaacaccccccgcaacacaccctcctccacataaggaaaacaagtatgaaacccgatcctttacgaaccccagccccaagggccctcacctccccgcaaggacagagggtgcaaagcttacctggtggcttcctccggctcgaccaggctctggccaggcgcctcccgagggatagtagccatcgcctcctccgccttctcccagccaggtggtctccgccgggccgcccccgcgcacccgccaggaaatgggaggctggggaggttcagggcgaagaggatataagggtggaggtgggtgtaccggcacatctccacccccaggcccgtagtagcggccgtaggacggaccgtcactggggccgtagcccgagcgcctcagggccgacatgggatccgctgccctgaagcgcttcccgccccgctccccacggccgacccatcgcgcaggcgcccgcgggcgattgcgaatggagagcagcgaagggggtcggacgacgccagccaatcccaggcccgggcccgccccttctgctgccgaaccccgaaagctgagggacggaggtcagtgactctggggtctcgggaacccggagacgaaggaagacaccgtgttccttaagagggagtatacgtttcctcgccatttatccaatggagtttcctcttacctacttaacaggaacagggaaagggtgtcccccaacggtacggctgccccgcctcttcctgggggcccacacg

SEQ ID NO: 40328 - DNA, 2300 bp, Homo sapien
gtgcaagataggctgctttgcctatggagtagccattcttttattcctttactttcttaataaacttgctttcactttactcaaaacaacaaaaataaaacaaagtgcaagacagaaaaatggattttaatagtatcagaatatgtgaagtttactgatatattttcaaactgcacattgcaatccactttttttttgagacagccctccaaatttgagaacagctggtatggaggctacaacaggatttgaagatagaaaacctaaattcaagttccagttctgtcacttacctgactgattttagacaagttacttaggtgcaggctctgaagtcacactgtgtgggttcgtgattttagctccaccccttgctaaatcggcctgcctgggcctcccaaagtgctgagattaacaggcgtgagccgctgtgcccggccttgcagaagctattctaagtgtaataaatttgaagggaaggtgttaacttggggatatttgtgtgtggctgttaatttgcaaagagaataaatgtgttataaaaaattgttttctttttctgtttgtgaagaaataacaaaactgaaataggccgggcaaggtggctcacgcctgtaatcccagcactttgggaggccgaggcgggtggatcacgaggtcaagagatcgagaccatcctggccaacatggtgaaaccccgtctctagtaaaaatacaaaaattagctgggcgcggtggcgcatgcctataatcccagctattccggaggctgaggcaggagaatcgcttgaatctgggaggcggaggttgcagtgagccgagatcgtgctactgcactccagccgggtgacatagtgagactccgtctcaaaaacaaaaaacaaaaaacaaaaacacaaaaactgaaaaaaaatgccctataatctagttagaatataggaaaatatctttttaaataccaaaaggtattaaaatgaaatactaaggagagtcgggcagggcctgtactcgacctcatgactgcgggaaatttctctttttttctttttttgagatggagtctccctctgttgcccaggctggagtgcagtggctgcgatcttggctcactgcaacctccgcctcccgggttcaagtgatcctcccacctcagcctcccaagcagctggaattacaggcgcgagccaccacccccggctaatttttatatttttagtagagatgccgtttcaccatgttggccaggctggtcttgaactcctggcctcccaaagtgttgggattacaagcgtgagccactgcgtccagcccctttcaacttttcacctcagttatgtcttcctgtttggacagcagtatctcatctccaacctccctggcatcttttaaatcctgttaaggttgcctctacaaaacaaaacaaaaaaaaattattaattttattgtttgtttagagactagtgtcgcagtgttacccaggctggagtgcactggcgccatctgggctcatgcagctggcaccaatgggctggggcgctccttcagcctcagcctcctgagtagctcagacccaggcgctgacaccacgcccgacacctctacattttttagggatacctttttggtaacctctaaatcataataaatgcacggaggacgggccaaagcctttttgcctggcaaatgctagtgacacccgttctcagcacccagaagcagaggccaggagcggggcggctgtggctgcgccctccgccctactccgctaatcccggggccgcgcagtccctgcgtccggtgatcaccgcgctgctcctggcgcactagtagggtctgtagcgtatcccgaggatcattccgactttcccgccccgtacgtgaggggccgccttgaagcctcttccgccacggacactcgaaactgatcttgaagcccctgccgtcacggatactagaaactgatctcgaagccccttccgccacggacactcgaaactctcccccactgttagacctcagcagccagcagcccgccgcccggcgctgcagctccctgcccgcaggagccacgtctcgcgcgactccccccacctctcgcgacacttgccgcccgtgccctgcggccctgcacgccccacccgcggtcgcgcgccgcgctccccgccgcctcaccttttcgcctggcatccgggcccgctactcgcccactgggagcgccgtggcgcctggtgttcggcgcgagcccggcggggctgcaggttccgccctgctccgccgcgccccgcccgggctggggtaaa

SEQ ID NO: 40329 - DNA, 2300 bp, Homo sapien
ccaccccttgctaaatcggcctgcctgggcctcccaaagtgctgagattaacaggcgtgagccgctgtgcccggccttgcagaagctattctaagtgtaataaatttgaagggaaggtgttaacttggggatatttgtgtgtggctgttaatttgcaaagagaataaatgtgttataaaaaattgttttctttttctgtttgtgaagaaataacaaaactgaaataggccgggcaaggtggctcacgcctgtaatcccagcactttgggaggccgaggcgggtggatcacgaggtcaagagatcgagaccatcctggccaacatggtgaaaccccgtctctagtaaaaatacaaaaattagctgggcgcggtggcgcatgcctataatcccagctattccggaggctgaggcaggagaatcgcttgaatctgggaggcggaggttgcagtgagccgagatcgtgctactgcactccagccgggtgacatagtgagactccgtctcaaaaacaaaaaacaaaaaacaaaaacacaaaaactgaaaaaaaatgccctataatctagttagaatataggaaaatatctttttaaataccaaaaggtattaaaatgaaatactaaggagagtcgggcagggcctgtactcgacctcatgactgcgggaaatttctctttttttctttttttgagatggagtctccctctgttgcccaggctggagtgcagtggctgcgatcttggctcactgcaacctccgcctcccgggttcaagtgatcctcccacctcagcctcccaagcagctggaattacaggcgcgagccaccacccccggctaatttttatatttttagtagagatgccgtttcaccatgttggccaggctggtcttgaactcctggcctcccaaagtgttgggattacaagcgtgagccactgcgtccagcccctttcaacttttcacctcagttatgtcttcctgtttggacagcagtatctcatctccaacctccctggcatcttttaaatcctgttaaggttgcctctacaaaacaaaacaaaaaaaaattattaattttattgtttgtttagagactagtgtcgcagtgttacccaggctggagtgcactggcgccatctgggctcatgcagctggcaccaatgggctggggcgctccttcagcctcagcctcctgagtagctcagacccaggcgctgacaccacgcccgacacctctacattttttagggatacctttttggtaacctctaaatcataataaatgcacggaggacgggccaaagcctttttgcctggcaaatgctagtgacacccgttctcagcacccagaagcagaggccaggagcggggcggctgtggctgcgccctccgccctactccgctaatcccggggccgcgcagtccctgcgtccggtgatcaccgcgctgctcctggcgcactagtagggtctgtagcgtatcccgaggatcattccgactttcccgccccgtacgtgaggggccgccttgaagcctcttccgccacggacactcgaaactgatcttgaagcccctgccgtcacggatactagaaactgatctcgaagccccttccgccacggacactcgaaactctcccccactgttagacctcagcagccagcagcccgccgcccggcgctgcagctccctgcccgcaggagccacgtctcgcgcgactccccccacctctcgcgacacttgccgcccgtgccctgcggccctgcacgccccacccgcggtcgcgcgccgcgctccccgccgcctcaccttttcgcctggcatccgggcccgctactcgcccactgggagcgccgtggcgcctggtgttcggcgcgagcccggcggggctgcaggttccgccctgctccgccgcgccccgcccgggctggggtaaaggccgcggccgggccatgcagtgtcctcctcagggagggcaggagagcctgaggagtggcggggccgccaggtgagaccgcgtcgggcgggcggctggaccgagggaggccaggctgggtgcaggtgggcggcgcagcgctgcggggccgggatgcggggcgggggaacctcggctcccgggaagccccgagcctgggggaaccctgggcaccctgtgaaccctgtggtctgcactggctgccctgctgctgtcgcggggctgcgggcggacgacctgagcccgagctccgagggcccggagcggggcgccagggcctagggtcgcgggggccaggggcgcgccagggtggctgaggtaagtct

SEQ ID NO: 40330 - DNA, 2300 bp, Homo sapien
ggctcattgcaagctctgcctcctgggttcttgccattctcctgtctcagcctcccaagtagctgggactacaggcgcccgccaccacgcccagctaattttttgtatttttagtagagacggggtttcaccgtgttagccaggatggtctcaagctcctgacctcgtgatccgcccgcctcggcctcccaaagtgctgggattacaggcgtgagccaccacgcccagcctttttcttgtttttggttttttttttttgctttttttgtttttgtttttgtttttgtttttgagacagagtctcactctgttgcccaggctggagtccagtggtgcgatctcggctcactgcaacctctgcatcctgggttcaagcacttttcctgcctcaccctcctaagtagctgggattacaagcgtgcctcaccacactggctaattttttttttttgagacggagttccactcttgtttcccaggctgtagtgtagtggcgcgatctcagctcaccgcaacctctgcctcctgggttcaagcgattctcctgcctcagcctcccgagtagctgggattacaggcatgtgccacaatgcctggctaattttgtatttgtagtagagatgggatgggatttcttcatgttggtcaggctggtctcgaactcccaacctcaggtgatccacccgccttggccttccaaagtgctgggattataggcgtgagccaccgcgcccggctcacactggctaatttttgtatttttagtaaaaatggggttttgccgtgttggccaggctggtctcgaatgccagacctcaggtgatcttcctgccttggcctcccaaagtattgtgattacaggcatgagccaccacgcctggtctagaacattaatattaatatattaaaatgtgaacactaattatctagcgtagatgatggaattaggagtatttttccccctttgtcctggtgctactatcagttgtaatttcaaaataatttaaaaataggctgggtgctgtggctcatgcttgtaatcccagcactttgggaggccgaggcaggcagatcacctgaggtcaggagtttgagaccagcctagccattatggccaaaccccgtatctactaaaactacaaaagttagccgaatgtggtggcgggtgcctgtaatcccagctacttgggagactgaggcaagagaactgcttgaacctggggggcggaggttgcagtgagccgagattgtgccactgcaacccagcctgggcgacagagtaagacaaacaaaacaaaacaaacaacaacaacaacaaaaagatttaaaaataaatttgataaattggagtaggatattcttattgaaactcattaatacatagtattcttgttaataggttcagtttaataggaaagctactagagaactctaatgaaatgtgttttcttttaaggaaacttacatgcttgctgtaactttggatgaatggaaaaagaaactggaatctcccaacagagaaattattattttacacaatccaaaggtaaaacaaagcatttctcttgtcgggataaaaagttaattgcgctattagggagaactcaattggtttcttttgctaagcactctgtgtaggataacctttgtcaaattttatattgaattcacagttatgaaacttaaaaacttgtagccactactgttatttacccaactcagcttatacaaaataattttcttatggaaaattatgccactgtagaataagaaaatcactgacatattatgtgagcatgtcttccatgtagaaagggactattgacagatctgttagcctaatatattttcacggttctcatttcaagccatacgagttgtatatcaaaactccagttcagattttactgtgtggtttgaaagacatgattctacacttaaaactgcattgtatagagatgattgtattgcagaatatttttattgctctgatctgttctgtttaagcttatggtgcattaccagccagttgcagggtctgatgattggggttcaacacccacggagcagggtcgaccaagaactgtgaagagaggagttgagaacatctctgttgacattcattgtggtaatgttaatcgtttattttttcttacctttggatgtatttgtttactccttaaattgtgacctttttctgtggatttagattacctcaaggcttaaaaatcatctttaatcatatgggtttattccaagttgagattagcatcacttcgtctactaagaatcttaataga

SEQ ID NO: 40331 - DNA, 2300 bp, Homo sapien
ggtaatgttaatcgtttattttttcttacctttggatgtatttgtttactccttaaattgtgacctttttctgtggatttagattacctcaaggcttaaaaatcatctttaatcatatgggtttattccaagttgagattagcatcacttcgtctactaagaatcttaatagatgtaaaaatatcttttaaaacatatggtaggatgggtaaaatttggcaatactatccaggaagtcactaagtacagatgaactgatttagtcctaattccaagaagtgtgattccacctacttgactagaaatttatacctggtaataactccttgtccttgaagattttcaactaaggaaaactgtttttcagcaggacctgattatgcactgctatctaggtagggtcacttatggttttataatatatttaattggattataatattccttttttcttgtctcttggacaaaatcctagctttactgtaatttaaaaagatgagtttaaaatttcaggctttaaaaacataccaaacattgataaaaatgaaatactagataaaagtattttatcaatgttcagttgcctggattcaataactgtattatggttatgtaagataatatacttaggaaatacacattatggtattaaagggttaaagaggtatggtgcatgcaacctgatgatgtatgtagtctgctttctaatgattcagaaaaataaatgtgtgtgtgtgtgtgtgtacacacacagagaatcataaagcaaatgtaattgttaaaaagttgaatctctgtaaaaagtatgtgggagtgtctgtactatgctttctagttttctgtacatttctagttatttagaaataaaaagttttaaaaacctggctgcacgtggtagctcatgcctgtaatcccagcacttggggaggccaaggtggaaggatcacttgagcccaggagttcgagaccagcctgggcaatatggcgaaaccctgtctgtacaaaaaatacaaaaattaactgggcatggtagcacacatctgtagtctcagctattttggaggctgaggcaggaggatcactcgagcccagaaggttgaggctggaatgagtgtttatcatgccactgcactccagcctaggcgacagagtgagactctgtctcaaaaaaaaaaaaaaaaaagtttttaaaacctgaaaaaaggccaagtgtgttggctcacggctgtaatcccagcactttgggaggctgaggcgggcgggtcaggaggtcgagaccattctggctaacacggtgaaacaccctgtctctactaaaactacaaaaaattagccaggtgtggtggcgtgtgcgtgtagtcccaactactcgggaggctgaggcaggagaatcgcttaaacccgggaggcagaggttgcagtgagccaagatcgtgccactgcactccagcctgggtgacagagcaagactctgtcacaaacaaaaaaaaaaccataatttaaaaaaaaaaaaaaaagagtttttttttttggagacagagtcttgctctgtcacccaggctggagtgcagtggtgtgatctcggctcactgcaacctctgccacctccagggttcaagtgattcttctgcctcagcctcgcgagtagctgggattacaggcatgtgccaccacacccggctaattttgtatttttagtagagatgaagtttcaccgtgttggtcaggctggtctcgaactcctgacctcatgatctacctgccttggcctcccaaagtgctgggattacagccgtgagccaccgcgcccagccgagttttctttttcagagatcagaaaaaaaagaaaaaagtcctgaaaaaaattttacagacttatttcaagataaattagaaaccaagtaaaatcagtgtatttttgctaggtacttaaaggactattttgtatcttttaaattatctgttcatcttttaacttgctcatatttataaccttttcatgatgaatgatattagaatacatgactaattatacagaataattttctttttaatttcatttataggagaacctttacaaatagatcacttggtttttgtagtccatgggattggaccagcttgtgatctccgctttcgaagcattgtacagtgtggtaggtttgcaaagcatgtgagagaatattaatcagtgctcttgtgagctgagataaagccttgtctttggtctattgtcttagctgcataagaagatttggagagttaaagacaggtggcaaggtagtaaagcttctcagctt

SEQ ID NO: 40332 - DNA, 2300 bp, Homo sapien
ttcactctgttggacagactggtctcgaactttggacctcgtgatctgcccgcctcagcctcccaaagtgctggcattacaggcgtgagccaccgctcctggccctgaacagtatattttaaaggacttaaaaaatgtataaccataacactattatcacacttaaaaatttcttaatatcatcaaatacctagtctgttcaaatttccagttgtctattatatttttatacatattttatacatatttttatatacattaattatataattatatacattaatttttgtatacatatttatataattacaaacatgttttaaactgggatccaaataaagcccataccttgcaattagttgatatgtcttttattataagtctctcttgggctgggcatggtggctcatgcttgtaatcccagcactttgggaggccgaggcaggtagatcatctgaggtcaggagtttgagaccagcctggctaacatgacaaaaccctgtcactactaaaaatacaaaaattagctgggcatggtggcacatgcctgcaattccagctatttgggaggctggggcaggagaatcgcttgaacctgggaggcagaggttacagtgagctgagatcgtgccactgccctccagcctgggcaatagagcgagagtctgtctcaaaaaaaaaaaaaaagaaaagtctctttaatttattttcttgattaccacttacctctctgtctacatctgttgttttcttgcagtttatttatggaagaaatgggtttgacttgagggttttttatactctgaattttgcttatcacattcctctggcttcattacacatgttcctttgtcctctttttgttttttcctataaatcgacaattgtttgttataaaatgtttaagcttgaaggcttaaaattggaagcagctattaagtgtatttaggtttcctgcttatattatttttccttttttcagagatctgcagcgaataaccctgcccagcattaaccgcctcaggcacttcaccaatgacacaattctggatgtcttcttctacaatagtcccacctactgtcagactattgtggacacagttgcttctgaaatgaaccgaatatacacactttttctacagaggaaccctgatttcaaagggggtgtatccattgctggtcatagtttaggtaacaaaatgagttctgtgtgaccagagaagactatcacattttaaagacacctgtttttgaagcacaatgtcttttatcagtatgaaattcagaggtctagaagtggtctgtggtcaggaaatttggaaggggttggaagggtggcggtaaattggaaagaaagactccttgctgtatagatttgcttacatatgtaattggcttatgccttttttgtataacagagagccatttagtgctaatgcttagaaattgtcccttcttctattttacttataggttcgcttatattgtttgatatcctaacaaatcagaaagattctttgggggatattgacagtgaaaaggtaatttagatgttcagctaggttttcttgtagttttccttagtaaggatttatagattttagacttattttttgtttttagctgagtttagtttcatgtcatgacattacatttacacttattttcattttaacagacttttaattatctctgtcattcttggatgatagaaggaagatagtaacatgcttctacaaataataattgttatattctaaaccatagttatcttattttcttttgtgaatatgcaccactggctgggcgcggtggctcatgcctgtaatctcagcactttgagaggctgagactggtggatcaccttaggtcaggagttcaagaccagcttggccaacatggtgaaaccccatctgtactaaaaatacaaaaattagctgggcatggtggtgtgtgcctgtaatcccagctacttgggaggctgaggcaagagaatcgcttgaacctgggaggtggaggttcagtgagctgagatcgtgccactgcactctagcctgggtgacagagtgagactccgtctcaaaaatatgcactgctgatctgttaatagagttatggaatcattgagctaaatgaagtttgcatatgaacaaatgaatgaattggctacaaattgatatgatttatagaaactctgttcgaaagtattggggacttgatgtttaaacattattttagtaaaaattcctataaccatgtatcatctgtaggattgatttggtacctatttctcctgttgg

SEQ ID NO: 40333 - DNA, 2300 bp, Homo sapien
ttcaagaatatgagctttataatttaatttttaggattcgctaaatattgtaatggatcaaggagatacacctacactagaggaagatttgaagaaacttcagctctctgaattctttgatatctttgagaaggagaaagtagataaggaagctctggtaaaaataatcttttaaaactttatgccaagccattttcagtatttttgtttatcgtgtttactaagagcctaccctttagacactttttagtcataaatactttatgattaatgttccttagcattatttatttgctttttatcatatcaagtgacctttgctttgtggaagttcaaaggtcagatggccatattgatattcatagagcaatggagcagactaaccagtacggctcatagaaaacatgagtgcaagaacaaacaaataaataaccattagctattccaactctaattttctgttgtactttcaagagctctactgttatttgcgagtagctgggattacaggtgcccgccaccacgcctggctaattttgatatttttagtagagatggggtttcactgtattggccaagctggtctcttggccaggctggtctggaattcctgaccccgtgatccacccaccttggcctcccaaagtgctgggattacatgtgtgagccaccgtgcccagccagctgatttgtttttttttttttttttccatttttgtcgtgcctttttctggtttgtgatacattcactcatttaacagatatttagaaaatgcttactataccaagtactggatagactggtgaataagacatatgatccctgacctcatagtgtttatagtttactggggaagacacatgttaaataatcacacacatcatggcaattacaataagtaagtaggaaaagtacaccgtgttgtaagaattaacctggtctcataaggtgcaggaaggcttccctaatcaaatgagtgatagctggctgggtgtggtggctcatgcctgtaatcccagcactttgggaggccgaggtgggcagatcacgaggtcaggagttcgagaccaatctagtcaacatggtgaaaccctgtctgtactaaaaatacaaaaattagctgggtgtggtggcacacacatgtagtcccagctacttgggaggctgaggcaggagaatcgcttgaacccaggaggtggaggttgcagtgagctgagatcacaccactgcactccagcctgggcgacagagcaagactccatctcaaaaaaaaaaaaaaaaaacgatgagtgacacttgagatcttgattgttagtctgttccatacttgtgtgtttgctgtatgttctcagtgcttgcgttcatcagcaggagtataatccttctcaggcatgtgacatctaagtcagtatagaaatcaaggaagtttttttgttttgttttgtttttttgagacggagtcttgctctgttgcccaggctggagtgcagtggcgcgatctcggctcactgcaagctctgccttccgggttcacgccattctcctgcctcagcctcctgtgtagctgggaatacaggtgactgccactgcgcctggctaattttttttgtatttttagtagagacggggtttcaccatggtctccatctcctgacctcatgatccacccgcctcggcctcccaaagtgctgggattacaggcgtgagccaccgcgcctggccagaaatcaaggaagatttttatgtcctgaagtccttagatacccaacttctctgttttttttttttttttttaacaataacaatgtctatattattgtaacattgatattataagtattgatattttctattcttttttaggctgtttcatgaataaaacaggtccttttttctggaagttattctatgatgttttactactagagagacaggcagcaacagagtgcctaggccttgttcctcttaggggacaggattgattttattttgtctagaaataagaaagacttgattttctatgcctaggctttatgtacagaccgagatcttcaggaaataggaattcctttaggaccaagaaagaagatattaaactatttcagcaccagaaaaaactcaatggtatgtgcctaatacagcttgttggactaaacaattctttgatgtccatagtgtgtccttgtgctttgtgggatgtttactctggggagccaagcagttttttggtaattgatctttggctctttttttttgagacagggtctcgctctgtcactcaggctggagtgcagtggtg

SEQ ID NO: 40334 - DNA, 2300 bp, Homo sapien
ttcatcattttagagcatctaagaatgtcaattaacaatttaaggcaataatttaatcttgttttctgaggaaatcttcctagaatttttggctgccatttcagaactttcccaagggtcctttcaaaccagtagaaaactatataatcctttggctatacttttactatatagtagctccccatactttttttttaaatagagactatgttgcccacgttggacttgaactcttgggcttaaacaatcctacctacctacctacctcagggtcctgagtagctgggactacaggtgcatgccgtcatgcccagcttctccacataactattttttattctttagggtattaagagaccagccccgcagcctgcttcaggggcaaacatccccaaagaatctgagttctgcagtagcagtaatactagaaatggtgactatctggatgttggcattgggcaggtaactaattctctttgatcattttacagcctgctatttgtatggtagaaacagatgtaacttttgttattaatgagagatgcttttattttcctcctttgaggtgtctgtgaaatacccccggctcatctataaaccagagatattctttgcctttggatctcccattggaatgttccttactgtccgaggactaaaaagaattgatcccaactacagatttccaacgtgcaaaggtttcttcaatatttatcaccctgtaagcattgtacagctattgtggttttacctaaatatcagggcttattgttaaagaacataggattttctgttgtgttgatttttttttcctattccattgtctagcaatgagacaacttataatagtattgatttggaagtgatggagcagaactgtacatttttttaaatgaacttatgattattgtttaagatacatagttctggttgtacatggtgactaatgcctgtcatcccagcactttgggaggtcaaggcaggaggattgcttgagcctaggagttgaaggctacagtgagccatgattgcaccactgcactccagcctgggtgacagagcgagacctcatctcaaaaaaaaaaaaaaaaaagttatatagtttccagactgtgcttagcagaggtaaatgtagctcttgtttttcctatgtagtttgatcctgtggcctataggattgaaccaatggtggtcccaggagtggaatttgagccaatgctgatcccacatcataaaggcaggaagcggatgcacttaggtaagtccgagcatagaacttgataattctagaccttttggccagtgcaaagggcatcattcactctgttcagctatgttggaccctaagctctttgtaaatcatttaatgttctttatttatatgtttcagaactgagagagggcttgaccaggatgagtatggaccttaagaacaacttgctaggttcgctgcggatggcctggaagtcttttaccagagctccataccctgccttacaagcttcagaaacaccagaagaaactgaagcagaacctgaatcaacttcagagaagcctagtggtcagtgacactgtacacattgaccagctgccagataagagggatgccatggtgtggcgtttttcatagttaatttaatttaatttcacatttaatttcatagttaatattgcattcttttgctttagttttcaacttctaaagagctctattcctgcttgcatttagtataaacccaaggcaaatgacctagctatcaatggtataggtaatgagatgtgttgcgcaaaagcaaaaaaggggattggacaaaattactgtgacctgagaaggagcttgaaggagattgagaggaggaagatgggagagagctctctgaacagagagtagctcattctctggtaaacttggagtgtgaggagaagttaacaggataaccctgaaggccaaaaggttttagattcttattatggttcttccatatccagatgttaacacagaagagacctctgtggcagttaaagaagaagtcctgcctatcaatgtggggatgctgaatggaggccaacgcattgactatgtgctacaggagaagcctattgaaagttttaatgagtatttatttgctttacaaagccatctatgctactggtaaatgttgtttatttttgtctgttttgtttgtttacctgtttcatagatatttgatagatgtagaaaaaggaggataggccaggtgcattggctcaggcttataatctcagcactttgggaggccaaggtgggaggattgcttgag

SEQ ID NO: 40335 - DNA, 2300 bp, Homo sapien
attttagtttctttttacatttatgaagtagaaagcattgttttgtaaactgttttgaaaataaatagcctagtctcttatcctctttagcgtggattaaaggtgaagttctgcaaatgggagagtgttcacagtagatagctcagattgattgaacacatttgaggaagagactcctgcatgagataccagcatttttacaaatactttttatgtacattctttattttgtcattttgtcaaccctctccccaagcacatcttctttccttttactatgtctatgtagggaaaaaaacaaaacaaaaaattgcacttacgttacactcccaaaatgtgggtaatccgtgtctttcaaaaaacatttctgttttttgttttgttttggtcagtccattgcataagtgacaagtttgggtgcttgtggcacgtatgtatgaagcgggagggggatgagaattgcctgtccttcagtaggctgtaaaagtaatttacatgtaagtaaaaagggaaaatagaatagatgccaaagtcatttattcagtccttagttttcttatgtggcattactgcatctgctagttagtgagaaagcaccctcagcttttactgctcccctccctgcctgccaacacacttgatgtgtgcaaacagccctcaagtatctgtcagatgacctatataaggtattgaataaggtattcttgtcagtttagaaatggactggataaaacttacttggttgtcattattttatctcatttgtcctgttacatgccctatgttaagataattatattgccactaataatcaagatgctaaatgagtattacaactggctaatatcattttttatatacaagggtatgtgtatatttggaattgatatgagaaactcatttgtacccatttgagtgatattgcacaacaaacacagatacctacagactccgttttcattttctcgtgttctttatgataatgatctttgtagattggttatttctgtactttatctgtaataaactttgtagatcctgtgaaccattactttgcctaaatcacttgagacttgagtctttaataacaaagcatcaatattcactaaagtcaatctcttttgagtttctgtgacttggctagaagctcttgacactaagggattagtgttaattttccctgggggtgttccactagggcattactgtataatgacttgatgttgccacatagacttcaagatatataatattttgaggattttgttgattggcctatgttttattgcatagtgtgaaacgtgtaaagcttggttaacctgtatatagatagcttattgttgactagttatagtgtatttagggttgcctgtaatatttaagcttctttactgatgtgtgtgctggtaggaacatataatttttgtacattatatttactgagatgttgccttttttattttacaaatactttggaattccaatgtgttttttgcttccgtgaggattaatttggaaaggtttttaatgacattccactgatttcagattttgcttgagattgacttcaataaattgtcctgtatgttccaaattaaatatgtgggcttgttctttgccaataattttttgctacaacactctgggcaggaggccatcctgggtgggaggactaaatgacacaatccagccaacctcaggtagtgtagcttcctgcagaatgcggctgtgttgctaaggaacgaggatctgagagcgggctgtttggttttccatttagaggcgaggtcccgggagaaggctgctccccgcggtggtgtggttgggccgtggagacgagctgctgatgatggaccgtacgccgacctactcggctggaactggggcgctggctccctgctgaacgcaccagagggcagctccgctggctttgcgtaccctttgccagacgatgccctcggcacagccgccaggccgtcttcctggggagccgccggagcgcgggcaactgggagagggggcggtgcccagttcccggcccggccctccccgcggaggtggccacgtcagcgcagcgtcgctcggagctcgcggccggatggggaaggcggcggcggcggtggcctttggggccgaagtgggcgtgcggctcgcgctgttcgcggccttcctgtaagaaagatccacggccgggcccgggcggccccgcttcccaggcaggcgggcggcacggggcggcgggtcgggcagtggggaagcggggaggaagccaggcgacctgctctgcgcttctttgttcc

SEQ ID NO: 40336 - DNA, 2300 bp, Homo sapien
ttaatgagaagaatgttattttgttttgttttgttttgttttgttttgagacaagagtcttgctctgtcacccaggctggagtgcagtggtgcaatcaattatttgtggtgatttttacagtagctattagttctataactggtgggtattggaacatatctttggacaatccaaacatacaagttttagtgggagtaatactgaggaacctgggttagattcccatttttggcaaagtagatgtgaatgcttatgttctgaaatggttaataagaatttttacttacaggtgcccgagaatatcatgtccagttttttagcaaccagccagagagggcgtgggttcatgaaaaacgggtacgagagtataaaggtcataaacagtatgaagaattactggctgaggcaaccaaacaagccagcaatcactctgagaaacaaaaggtaactaacatgttaatattatttacctagtatggtttttaaagaacttaataatttagaagaatttttcatacttgaattcagataattattagaatcctttttttaaacccctttcagctgttttaatcgtaatggtaaatgactagtaagtttgtaagtacaccaatgagttttatatgtcatataaacgacgtatagtactattaaaaactttagctacctgcttaatattgaattctattgtgagtttcattaatgtgcataagtgtaccagatgctagtgaaatgtggatttttgccagggatttttactcttttttctatttcagcatgtttccataatttcttttcattcttgtttaacaaaattgttttatgaaagtaaacttttaaaaatatttaatgagtgcctattgtgaaacaggtatgcttttaagcattttacatatattaactcacttattattcataacaacctgtatgaggtagatactattattcccctttttacagatgaagaaattgaggcacagaaagcttatgtaactggttcaaccgagatcacacaagtgatggaatcaggaaatatatttgatgtggtggtggatattttagaattttgacatgaactcttggtaatctggttaagagtttaaactcaactaaattagtgtgggtctcttatgattcagaaatttgtcattttttacacttgaaaaactaaattttatcacagaattttgattaattttatgagacttacattttacagatttatatatgaatatttgacatatgctatctcatagttttattaactaatttctggctacatcagtctagccacctggataattcctaattgctctggccatctcacacatctttattcaaagtatttttacccctcttgccaatccaaagtcttctgattgactctggacctagagacctatggaaactataattcaggtctaccttttttctcatccatgcctgttctcctttgtcttgttaattttcatttgttccttgaggctctgtcctttcacttcattctgtccctgcatgcattgtggttcaaactctgccagtagctttgttgtgatctctgtagcacccctgacttgccctctgcccgagatatgggagagaattgggagtttcagggtatcatttttaatgttagtgttttattagccactgaaaataaccatttctgtaatcattgttctcttttccctcattatcactagctttttatgtatatgagaggagaaggatgtctccctcttggggaccttgtccagcagagtgatcagcaaaggaaggatataaaagagagtagatcctcatgttatcgaatatctttttatcagaattatggagatagaacattccacttgtttgaccaaagaacctgaagatatttatgtagacctgaaaagataacaggatcacatgggaaatacatatcaattttaatgtacctattagagtaaagcatgtctgataatctctatcttttttaaagattcggaaaccccgacctcagagagaacgtgctcagtgggatattggcattgcccatgcagagaaagcattgaaaatgactcgagaagaaagaatagaacagtatacttttatttacattgataaacagcctgaagaggctttatcccaagcaaaaaagagtgttgcctccaaaaccgaagttaaaaaaacccgacgaccaagatctgtgctgaatactcagccagaacagaccaatgcaggggaggtggcctcctcactctcaagtactgaaattcggagacatagccagaggcggcacacaagtgcggaagaggaa

SEQ ID NO: 40337 - DNA, 2300 bp, Homo sapien
cacttttacactgttggtgggactgcaaactagttcaaccattgtggaagacagtgtggcgattcctcagggatctagaactagaaataccatttgacccaggcatcccattactgggtatatacccaaaggaatataaatgatgctgctataaagacacacgcacacatatgtttatcgcggcagtactcacaatagcaaagacttggaaccaacccgaatgtccaacaatgatagattggattaagaaaatgtggcacatatacaccatggaatactatgcagccataaaaaatgataagttcatgtcctttgtagggacatggatgaagctggaaaccatcattctcagcaaactattgcaaggacaaaaaaccaaacactgtatgttctcactcataggtgggaattgaacagtgagaacacttggacacaggaaggggaatgtcacacactggggcctgttgtggggtggggaaaggggggagggatagcattaggagatatacctaatgtaaatgacgagttaataggtgcagcacaccaacatggcacatgtatgcatatgtaacaaacctgcacattgtgcacatgtaccctagaacttaaagtataataaatacatatatatatatatatatatatatataaagaaagaaattacaataaaaaaataagtagatactggcaactatagagaagcacacactattggtatgagagttcattgacatagtataacctatagaacaattttacagtatctcaaaatttcaaatctgtcctatagaaatatatatgtgcacaaaaacagagtttagagaatgtttcaggccaggcgtggtgactcatgcctataatctcagcactttgggaggctgaagcaggaggattacttgagtccaggagtttgagacctacctgggcaacatagcaagaccctgtctctatttgaaaaaaagagtaaagaaaagaaaagaaaaataagtaaaaaataaacgaggttttctgcagacgtatttattatatcaaacaattgtgagaaactgatgatcagtacataaatggttaaatacaaataccacgtttgtttactatgcaaccatttaaagaatgaatatgtatgaaaattgtctatacatgctgatgtagaagtatatctaggatatattgttaagttaaataagcaagtcacagaataagccctattttaaaaatttatatgtaaaaatgtagagaaagatgtgaaagtatacccatcaaagtgtttatagtggttgtcttggcatagaagagtgggaataatgaagtggggacaggaacaggccttttcactttggtgtttaaaatatttgcaggccagtcgtggtggctgacgcctataatcctagcactttgggaggctgaggcaggtggattgcttgagcccaagagttcaagaccagcttgggcaacatagtgaaaccctgtctacaaaaaatacaaaaattagctgggcgtggtggtgcatgcctgagtcccagctactggggaggctgagatgggaggatcacctgagcctgggaggttgaggctgtagtgagccatgattgtaccactacattcaagcctgggtgacagagtgagattctgtctcaaaaaaaaagaaaaaatgcaataacattttattatttttgtaataaaaacaaccactggacaaaatatgaatgattttaaaggaagctcttatggaagcagattgatatgtgtcaggacactgcttattttgcaaacaccagttttaacctgagacgatctctaacttgggaaataaaaaggaatgtcaaaactatttcgtgtgttggtggtgatgataaaatcttgttgccacagttgttgtgaaagtaatcaggagtttcaaacagataagcattgaagataaaaggtatttgccctgtgtcagaattatatcagttatctgttttagaaatatttaatgtctatgcatatctggatatgaaaattgagttcaaaacattttagtttaatcctttttcagttgattagcctctagcctatgagaatagtaacaccttctaatcccctcttttataattttaggcccgatgagagaaagggaaagttaaggatgctggagcagaacaatggatttctctttctctttcatgcaagggatcatgggaaacacaattcagcaaccacctcaactcattgactccgccaacatccgtcaggaggatgcctttgataacaacagtgacattgctgaagatggtggccagacaccatatgaagctact

SEQ ID NO: 40338 - DNA, 2300 bp, Homo sapien
tcaagtatactaactgtattttgtaatgttttgcaggaaaagactatgcatctacttcacataactccaattttaaactcttgctgtcagcatagctattagaaacaggctaatataagatccctggggacaatttactagattctcctcaagggagaaacccaggtgccgggtcaaggcaacagtttatcaacaaagcaaggaagacacaggaggaagaaaaagaagaatggaggtagaaaggctcatagaaaaaaaaaaaagaccaatttaatccctctttcctggagatagaattaagctagacttggtggcccgctttggccatctgtgttttaaaatgtcatatcacaaataaaaagtatgcttttactgatagctgtaacttgtggtactacttaaagcatacgtttaaaaatatttaatgattaatagtaatgagatttttttttttttttttgagacatagcctctctgtgtcgcccaggctggagtgcagtggcgcgatctcggctcactgcaagctccgcttcccgggttcacgccattctcctgcctcagcctcctgagtagctgggactacaggcgccccccaccacgcccggctaattttttgtatttttagtagagacggggtttcaccgtcttagccaggatggtctcgatttccggacctcgtgatccgcctgcctcggcctcccaaagtgctgggattacaggcgtgagccactgcgcccagccaatactgataattctcagtatctagtattaaccgggttacgtttaaaaaaaatagttcataattagtgcccttttaaataactgatctgtagaaatcatttaatttccttaagtgatatttaaagatagagatatctaatttcttgtaatagtaccaaagacatccagcactataacgtctacagagtatgacgtctagcggtaaaatggctttattctcagaacagagtatcggtttcctcatttgcttgctgcctctgtttcctttttacgttcacgtctctgtgctgtaaccttccaaatccttatcaccaggccccaggaaatatcacctggtcggcacactcctgcagggccagatcactgtgcacacacttaaccttccattgttttccatacgtttcctaggatgcggggggctagaggatgacggagagttgcctcccggttcttcctctcgttcttatcttgggccctctaggacaaatgtccctcacgtccctcgatgcgaaggtctggccgcgagcagccgcggcctccggcacgtgacggtcacggagccgtcgcggtcccccgcggctggggggcacccggggatgcggcgggcgctgacgtcgtcctcccggttacccacaagcctccgggccgcagcagagcaggaagaggcgcgcggggccggcgcctgccggggaggtcgaggcgctccctcggcgagccggcgccgccggccgggtctcctactgcttgcaaccgggggagggggaccatccgacagctcagccggggctgagagggagacgacgccaaggcggtcttgcatcgcccccggctttccaaatgcagaccctaccggaaccggagcccttccctgacagccgtaggacgggagacggccgaggggtcgcctggactgccccgccctcgcgcggtgacccaccggggaccgtgcgagggtcgcttctaacccttaagagctagagagccgagtcaccctgaggagcgccgtatggcgctggttgcgcgttgttctttaatcagcctcactgaacgcgccgatcccagttttacctcccgggccccacctttccacgcctcctccggcttcccggggtgttttgtgtgtcactctcccacgtacagtccctccccgtccctcgttcctcggccctctcgcccggtctccctagtcgtccagacgctagctgccgcgggcgttcctggttcgcgctcccgccccctccgccccgccgactcgccgcttcctccggagccccagcgtcccgaaccagggactgcatttcccggcaggcgccgcggcccgcggccaatgaggggctgaggatttggcggcggcggcgccccgagagtcggggtgggggggctttgtgcgcggcggcggcgggagaggcggcggcggcggccagcacggaggcggaggccgagggggctgtgcacaggtcgccgcggagaggcgtgcgaattccgagccgagcgccgaggaccgtgctacccaggccgggctgccagccgcaggctcctctctggcagcagcggcggcg

SEQ ID NO: 40339 - DNA, 2300 bp, Homo sapien
attaaaatctacaaagctttggactctttacttttccctcactgaaaattcctggtggtcaaattttgagctctagaaggtagatgtagttttcacactaatttcataaattaatcattgcactaccatgtactggtacttttctggaaaagatcttaaaggatgcaaaaatattttcagttccctgggagacattttatacggggaaatattcttattcatgcattgtattcacttacaaccaggcacagtgaatatcattaagtattcataaaccagatgaacgattccatgcccagtatttgaaagatgagctaggttttctaccatggccatatgtcagcaatcctatcctaaaaagggaagggctaagaactcttcttattgagatatctgttcaaagtaatgtccgtcttccctagttatgagacttggcaatttctttgactttcaggataagagatttatcatgtaagattctgtatgtaatcttcagaagagaaatttttaaaaaaatattttttcctccatgactctggccctgagaattgtgttagattgctgtcttaatgagctccttgttcattttctatggcgaacagtaagcatcgtctaaacctcagaagatgttagatactgaaaatgtaaactattatttttaatggccattttcctaaatatgccaccagatcaagtatactaactgtattttgtaatgttttgcaggaaaagactatgcatctacttcacataactccaattttaaactcttgctgtcagcatagctattagaaacaggctaatataagatccctggggacaatttactagattctcctcaagggagaaacccaggtgccgggtcaaggcaacagtttatcaacaaagcaaggaagacacaggaggaagaaaaagaagaatggaggtagaaaggctcatagaaaaaaaaaaaagaccaatttaatccctctttcctggagatagaattaagctagacttggtggcccgctttggccatctgtgttttaaaatgtcatatcacaaataaaaagtatgcttttactgatagctgtaacttgtggtactacttaaagcatacgtttaaaaatatttaatgattaatagtaatgagatttttttttttttttttgagacatagcctctctgtgtcgcccaggctggagtgcagtggcgcgatctcggctcactgcaagctccgcttcccgggttcacgccattctcctgcctcagcctcctgagtagctgggactacaggcgccccccaccacgcccggctaattttttgtatttttagtagagacggggtttcaccgtcttagccaggatggtctcgatttccggacctcgtgatccgcctgcctcggcctcccaaagtgctgggattacaggcgtgagccactgcgcccagccaatactgataattctcagtatctagtattaaccgggttacgtttaaaaaaaatagttcataattagtgcccttttaaataactgatctgtagaaatcatttaatttccttaagtgatatttaaagatagagatatctaatttcttgtaatagtaccaaagacatccagcactataacgtctacagagtatgacgtctagcggtaaaatggctttattctcagaacagagtatcggtttcctcatttgcttgctgcctctgtttcctttttacgttcacgtctctgtgctgtaaccttccaaatccttatcaccaggccccaggaaatatcacctggtcggcacactcctgcagggccagatcactgtgcacacacttaaccttccattgttttccatacgtttcctaggatgcggggggctagaggatgacggagagttgcctcccggttcttcctctcgttcttatcttgggccctctaggacaaatgtccctcacgtccctcgatgcgaaggtctggccgcgagcagccgcggcctccggcacgtgacggtcacggagccgtcgcggtcccccgcggctggggggcacccggggatgcggcgggcgctgacgtcgtcctcccggttacccacaagcctccgggccgcagcagagcaggaagaggcgcgcggggccggcgcctgccggggaggtcgaggcgctccctcggcgagccggcgccgccggccgggtctcctactgcttgcaaccgggggagggggaccatccgacagctcagccggggctgagagggagacgacgccaaggcggtcttgcatcgcccccggctttccaaatgcagaccctaccggaaccggagcccttccc

SEQ ID NO: 40340 - DNA, 2300 bp, Homo sapien
tttaggaaaatggccattaaaaataatagtttacattttcagtatctaacatcttctgaggtttagacgatgcttactgttcgccatagaaaatgaacaaggagctcattaagacagcaatctaacacaattctcagggccagagtcatggaggaaaaaatatttttttaaaaatttctcttctgaagattacatacagaatcttacatgataaatctcttatcctgaaagtcaaagaaattgccaagtctcataactagggaagacggacattactttgaacagatatctcaataagaagagttcttagcccttccctttttaggataggattgctgacatatggccatggtagaaaacctagctcatctttcaaatactgggcatggaatcgttcatctggtttatgaatacttaatgatattcactgtgcctggttgtaagtgaatacaatgcatgaataagaatatttccccgtataaaatgtctcccagggaactgaaaatatttttgcatcctttaagatcttttccagaaaagtaccagtacatggtagtgcaatgattaatttatgaaattagtgtgaaaactacatctaccttctagagctcaaaatttgaccaccaggaattttcagtgagggaaaagtaaagagtccaaagctttgtagattttaatactggtaaacagaacgtgaagtgaaacctttatgtgcaaagttgaacatcagacatgcacaaagagacctctagtggccaaactgaaaagttttgcctatttaacagtggatctatttggttattagctgaaaaatcctttgtggattaaaagcagtctgcattttttactgacgtttaataccgccatcttccattcttaaaaatgtgtagcccagatgagtaaagtctgtggtcagctcacatgtcaggagacgtattctccgtgagaaagcgattccttgctgtatggtggtcgagtagagccactaagaaaaaaaaaatttttttttgaggtggaatctcgctcttgtcgcccaggctggagtgcagtggcgcgatctcgactcactgcaacccctgcctcccgggttcaagcgattctcctgcctcagcctccagagtagccggaactacaggcgcacgccaccatgcccggctaatttttgtatttttttttagtagagacagggtttcaccatgttggccaagatgttttctgtctcctgaccttgtgatccgcccgcctcggcctcccaaagtgctgggatcacaggcgtgagccaccgcgcccagcctaaataaaaaaaatttttaactctttcttctggagccagataaaatggatgggaaaagataactggggaatgagaatatttctagatgtttcattttcccaagatggctcagttggccatcctaggaactgaagtgccctcaaacctgcagtgtctgtcatttcacagctactataacatacattttatatgctgagatttctatacaaattattaatcacaaacaacacttgttaagggaccattgagaaagcaaatatttttagtagaatacagatttccatatgaagatttcacagtattccagcctctggagaggaagggagaggaatgcgctccttccgattcccgccctttctgcgacaccatcaaatcctctcagcgcccctctggcagttccggatttgcagggtccgagggagaatacatcaaagtgatgtcattcatgactccgaaatggttaccatggcgactatcagacatattaagctgtcagggaaagagcctgtttaatccagtcttcaatcacgggtttcctcgggcgttagccactgcctgcggagtgtggactggcagaaaaacgtcaccttcgggccccccagcaccaacgcgccttaaaccaagccccacaaagaagtcacttcggcgatgtaaacgcgactttgcggcttcctgggctgctaaggtgaaggacgcccgccctccccagaacttgagagcttattggttggcgatgtcgtcactcagagtgacgtcaggggcgaggaaagaggcggaaccgtagagacttggcttcgggcccttctagcttgggggtcccgggaaggagctgggaggacctaggcggccgttccgcggagcccggccgaggaggtaggggtgggcaggcccagccctcaggccgcgacctggtgggccgcgctgcctttttttcctccggatcccgctcggtccgcatcctgctcctctcatcagagcatgatccaggcttctgacagcttccagt

SEQ ID NO: 40341 - DNA, 2300 bp, Homo sapien
aattttcagtgagggaaaagtaaagagtccaaagctttgtagattttaatactggtaaacagaacgtgaagtgaaacctttatgtgcaaagttgaacatcagacatgcacaaagagacctctagtggccaaactgaaaagttttgcctatttaacagtggatctatttggttattagctgaaaaatcctttgtggattaaaagcagtctgcattttttactgacgtttaataccgccatcttccattcttaaaaatgtgtagcccagatgagtaaagtctgtggtcagctcacatgtcaggagacgtattctccgtgagaaagcgattccttgctgtatggtggtcgagtagagccactaagaaaaaaaaaatttttttttgaggtggaatctcgctcttgtcgcccaggctggagtgcagtggcgcgatctcgactcactgcaacccctgcctcccgggttcaagcgattctcctgcctcagcctccagagtagccggaactacaggcgcacgccaccatgcccggctaatttttgtatttttttttagtagagacagggtttcaccatgttggccaagatgttttctgtctcctgaccttgtgatccgcccgcctcggcctcccaaagtgctgggatcacaggcgtgagccaccgcgcccagcctaaataaaaaaaatttttaactctttcttctggagccagataaaatggatgggaaaagataactggggaatgagaatatttctagatgtttcattttcccaagatggctcagttggccatcctaggaactgaagtgccctcaaacctgcagtgtctgtcatttcacagctactataacatacattttatatgctgagatttctatacaaattattaatcacaaacaacacttgttaagggaccattgagaaagcaaatatttttagtagaatacagatttccatatgaagatttcacagtattccagcctctggagaggaagggagaggaatgcgctccttccgattcccgccctttctgcgacaccatcaaatcctctcagcgcccctctggcagttccggatttgcagggtccgagggagaatacatcaaagtgatgtcattcatgactccgaaatggttaccatggcgactatcagacatattaagctgtcagggaaagagcctgtttaatccagtcttcaatcacgggtttcctcgggcgttagccactgcctgcggagtgtggactggcagaaaaacgtcaccttcgggccccccagcaccaacgcgccttaaaccaagccccacaaagaagtcacttcggcgatgtaaacgcgactttgcggcttcctgggctgctaaggtgaaggacgcccgccctccccagaacttgagagcttattggttggcgatgtcgtcactcagagtgacgtcaggggcgaggaaagaggcggaaccgtagagacttggcttcgggcccttctagcttgggggtcccgggaaggagctgggaggacctaggcggccgttccgcggagcccggccgaggaggtaggggtgggcaggcccagccctcaggccgcgacctggtgggccgcgctgcctttttttcctccggatcccgctcggtccgcatcctgctcctctcatcagagcatgatccaggcttctgacagcttccagttcccaccgcgctctcctccacccacgacctcatccccgccagttccccagcacagcgcgaactctgaagctcggcctctcctcccccttccccgcacagcgcgctccgtccttttttccgtcccaggccctgcttctttctcctcggcttcatttccaacaaccccgatcatccacgagggtcgtcgttcccgtgcctgtcccacctccgcaccagaaaaccaaagcatatcccccagaccccgccgcatgcaggccgcgcacacatcaggcgcgccgaagccgccgggcgaggaagccgagggcgcgttttgctcccgtgtggtgatgggcaaagccgagggagcccgggagcagcgggcgtggggcggcgccaatgcgagtgcgagtggtgtccgccgcccgggagcgcccgggcccgagcggattaaccgccgcctcaggtgtcgtctcctgcccgcgaaacaccacccaccgttagtgtgggtccacaggtttcgagcccctgttgaaaatgtcagctctgtggctaaggtttctattcaggagagctcctggaactcttttcccaaccacaagagagcaaagctgccattgggaatgtcagctcttctgccgttcctcgcggc

SEQ ID NO: 40342 - DNA, 2300 bp, Homo sapien
tgtgctccacctatttgtccctcttctttcctcccccaacccatggcagccactgatctttttattgtctctgtagttttgccttttccagaatgtcatatagttgggatcatacagtgtgtagccattttagactggcttctttcacctagcaatatgcatttcaagttcttttcattgctcaattctttttatcactgagtgatagtccattgtatggctgtaccacagcttgtttatccattctcctatgaaaggacacctcgattgcttccagtttttgacaattatgaataaaactgctatagacacttatgtacaggtttttgtgtggatgtaagctttcaactcattggggtaaatgcctaggagagtaattggtggatcatatggtaagactatgtttagcttttaagaaattgctaaactgtcttccgaagtggctgtattgttctatattctcaccagcaacaaatgagagtaccagcatttgatgttgtcagtgctctagacattagccacgaaacaggtgtgtagtggtatctcactgttttaatttgcagtctcctgatgtcgagtatctttcctgtgcttatttaccatttgtgtatcttctctggggaggtgtctgtttagatctttggttgacttttttttttttgagaaggagtctggctctgtcacccaggctggagtgcagtggtgcaatttcagctcactgcaacctctgcttcccgggttcaagtgattctcctgcctcagcctcccgagtagctagaaatagaggtgtccaccactgcacctggctaatttttgtatttttagtagagatagggtttcaccatattggccaggctggtctcgatgtcctgacctccggtgatccacacacctcagcctcccaaagtgttgggattacaggcgtgagccactgcatccagcccttcggttgactttttaattgggtttttttgttttctgattattattctgagttctttgtatattttgggtaaaagtcctttatcagatatatattttgcaaacgttttcttctactctgtggcttatcttttcattccttaaccatgtctttcacagagcaaatgctttcaggattaatgacatccagcttatcaattttttctttcatgaatcatgcttttagtgttgtagctaaaaacttattgcccaactgaaggtcacctacatttttctcctgttttattctagaagttttacagttttgtgtcttagatttatgtctgtgatccattttatttttttatttatttatttttttttttttgagatggagcctcgctctgtcgcccaggctggagtgcaatggtgcgatctcggctccctgcaacctccacctcccaggttcaagcgagtctcctgcttcagcctcccaagtagctgggattacagacatgtgccactacacccagctaatttttgtatttttagtagagccaggattttgccatgttggccaggctggtctcgaactcctgacctcaggtgatctgcccacctcagtctcccaaagtgctgggataacagacgtgagccactgcgccaggccgagttaatttttatgaaaactgtaatgtcagtatatagattcatttctctcttttttgtatgtggatatctagcttttccaggaccatttgttgaaaagattttctcttctccactaaattctaacttgattttaactgtcaaaagaacaaagagaacaggctggatgcagtggctcatctctgtaatcccagcattttgggaggctgaggtgggaggattgtttaagcccacgagttcaagaccagccagagcaatatagtgagacccctgtctctaaaaaacaaaaattttaaacaaattagccaagtgtggtagcatgcacctgaattcccagctacttgggaggctgaagcgggaggattgcttgagcccaggaggttgaggctgcagtgaactgagatcaggccactgcactgcactccagcctgggcaagagtgagatcctgtttaaaaaaaaaaagaataaagaaaacagaaatccactgttaccgcggtgactagtggaacagtaggtatgatttagtcagcccaacagacagttcagcagcccctgagaagagggagccttcactgagtgtggcagtcactgtgccggtgagaaaacagaggcagctccttccttctccccgttctgtgccactctactagacagcgttgacagcatatggtaagaaagtgtgaacaaaacattatgagaagacaaaaag

SEQ ID NO: 40343 - DNA, 2300 bp, Homo sapien
ctgctgaaggagggtcaccgcatggacaagcccagtaactgcaccaacgagctgtaagcccgaggagatgtcggaggccctgagccaggccttggggcaagagtgggcttgaggggcagggggctagactagagagtatccatctccaggagacgtccctgaccttacagtcctgccgcaggtacatgatgatgcgggactgctggcatgcagtgccctcacagagacccaccttcaagcagctggtggaagacctggaccgcatcgtggccttgacctccaaccaggtaaggctgcccgtgccagagccagagctcaggccgtccccactgcgtgcacgcacctccctgagcagggaggaggggcccggcccatcgctgcttcctctcgcccatcacaggagtacctggacctgtccatgcccctggaccagtactcccccagctttcccgacacccggagctctacgtgctcctcaggggaggattccgtcttctctcatgagccgctgcccgaggagccctgcctgccccgacacccagcccagcttgccaatggcggactcaaacgccgctgactgccacccacacgccctccccagactccaccgtcagctgtaaccctcacccacagcccctgctgggcccaccacctgtccgtccctgtcccctttcctgctggcaggagccggctgcctaccaggggccttcctgtgtggcctgccttcaccccactcagctcacctctccctccacctcctctccacctgctggtgagaggtgcaaagaggcagatctttgctgccagccacttcatcccctcccagatgttggaccaacacccctccctgccaccaggcactgcctggagggcagggagtgggagccaatgaacaggcatgcaagtgagagcttcctgagctttctcctgtcggtttggtctgttttgccttcacccataagcccctcgcactctggtggcaggtgccttgtcctcagggctacagcagtagggaggtcagtgcttcgtgcctcgattgaaggtgacctctgccccagataggtggtgccagtggcttattaattccgatactagtttgctttgctgaccaaatgcctggtaccagaggatggtgaggcgaaggccaggttgggggcagtgttgtggccctggggcccagccccaaactgggggctctgtatatagctatgaagaaaacacaaagtgtataaatctgagtatatatttacatgtctttttaaaagggtcgttaccagagatttacccatcgggtaagatgctcctggtggctgggaggcatcagttgctatatattaaaaacaaaaaagaaaaaaaaggaaaatgtttttaaaaaggtcatatattttttgctacttttgctgttttatttttttaaattatgttctaaacctattttcagtttaggtccctcaataaaaattgctgctgcttcatttatctatgggctgtatgaaaagggtgggaatgtccactggaaagaagggacacccacgggccctggggctaggtctgtcccgagggcaccgcatgctcccggcgcaggttccttgtaacctcttcttcctaggtcctgcacccagacctcacgacgcacctcctgcctctccgctgcttttggaaagtcagaaaaagaagatgtctgcttcgagggcaggaaccccatccatgcagtagaggcgctgggcagagagtcaaggcccagcagccatcgaccatggatggtttcctccaaggaaaccggtggggttgggctggggagggggcacctacctaggaatagccacggggtagagctacagtgattaagaggaaagcaagggcgcggttgctcacgcctgtaatcccagcactttgggacaccgaggtgggcagatcacttcaggtcaggagtttgagaccagcctggccaacttagtgaaaccccatctctactaaaaatgcaaaaattatccaggcatggtggcacacgcctgtaatcccagctccacaggaggctgaggcagaatcccttgaagctgggaggcggaggttgcagtgagccgagattgcgccattgcactccagcctgggcaacagagaaaacaaaaaggaaaacaaatgatgaaggtctgcagaaactgaaacccagacatgtgtctgccccctctatgtgggcatggttttgccagtgcttctaagtgcaggagaacatgtcacctgaggctagttttgcattcaggtccctggcttcgtttcttgttggtatgcctccccagatc

SEQ ID NO: 40344 - DNA, 2300 bp, Homo sapien
tcccccataagtttatagtgaggaatgaattaattcctcactatagttctaaattaattctacttagggcatccttggtacatagtgggtgttcagtattcatttcattttctcttttctgattcctttcgtaaaagtagaaaaatgaaagagaaatgttgacttctcttttgatttgaaatcattaaaacattttagtaagccttgggagggagctagtggtgtggcatgtgtatcccgctggccaagcacatgtgaacgaagccaagaatccaggggcttttctgccagccagcactgactcacttgcgaggggccctgcctggctcgggggaggcagggctgaagtaccacattagggcatgttccggggaagtagattctctgaataacttggatggctccctggagcatttaggacagaagccacctggaaaatagagatggtcacccccacgtagccttgacagtgcccagaaagtcttgtcacttggtaaatgttaacagctatgatccgttctttaagaccctggggagttttaagttttaccccaccagacctgagaagggtaaagggctgcagattctgttcttttaactggggccagtgtgagccatctttgactcagtgcttgcaatagaccttgattctgcagtgggacctcccaggcccccttgccccccgcaacttctggactcatatccgtcagacatcacttgtcaccttccagcatcagggagaactggatccctcctggctccacactcttaggctctttgtaagtagctggtgagggttttcttctctctgcaagggaggctggtagaactatggatgtgattcgtacaattttagagacaaaaagaaagtacccaggaggtcatttatttcagctgcttcattgcataggtcggggagttgagcatggagtccagcagctactaactagttatctctgtacctggcttccatttactggtccttagcttgttccgtgattcttcattgccccttatttctcaccagagggactggttggccctagatggagtggtctttttaaaattttttttttaaattttttgagacagagtctcactctgtcacctaggctgtagtgcagtgctgcgatctcggctcactgcaacctccgcctcctgagttcaagcaattctcctgtctcagcctcctgagtagctgggattacaggtgtgtaccactatgcccagctaatttttgtatttttagtagagatgggatttcaccatattggccaggttggtcttgaactcctgacctcaaatgatctgcccaccttagcctcccgaagtgctgggattgcaggtgtgagccaccgcacctggcctgggcagagtgaagtcttatgctggggagccatcagcatgctcaaacctcctgcaattgtagcacactttgtaaaactgtttcccacaaaagggcagaactatttgggactttcatgagaccattcactttgtagcacatactactttgaagtttataccttggaaaacctcatgatggtattcccaggcttgcacgtaatctgcactcaaaacatagctgtagaattgaactaaagcatccctctgtccaattaagacctataacctctctttttgagacagaatctcgctctgtcacccaggttggagtgcagtggtgcaatctcagctcactgcatccttcgcctcctggattcaagcgattctcttgccttagcctccgaagtaactgggactacaggtgcgcgccaccacgcctgggtaatttttgtatttttagtagagacggggtttcgccatggccaggctggtctcaaactcctggcctcaagtgatcctcccgcctcagcctcccaaagtgctgggattacagggtgcaccaccacacccagccaggacctatgatctaattcattgttggggtagcttcacaattttcttctggacgccttagtaagtccacactttaagcagccaccacatggcatactttaccttctgtttttcctttcccctcccctacctagaccctcctaacttttggggtttttttcctttcctcagggtcagtttgaaaaggaggatcgagctcactgtggagtatccatggagatgtggagccttgtcaccaacctctaactgcagaactgggatgtggagctggaagtgcctcctcttctgggctgtgctggtcacagccacactctgcaccgctaggccgtccccgaccttgcctgaacaaggtaaggtgctggctgggggcagcctggact

SEQ ID NO: 40345 - DNA, 2300 bp, Homo sapien
tcttaggggaaaaccctataaacagtggctgaagttcatttattcaacaaagatatgagttcttgtttctcattttttgttttgtattattttgttttgagacagggtcttactctgtcgcccaggctggagtgtagtggctggatcatagctcactgcagcctcaaactcctgggctcaagccatcctccttcttcagcctccacctccagctaatttttaaaaatattttgtagagacaagggctcactttgtttcccaggctggtcttgaacttctggcttcaagtgatcctcccgcttcggccacccaaagtgctgggattacaggcgtgagctgtaatttagttgtttatttactcatttgttcaacaaatacttattgaatatttgctctttggccagtcaagggatttcatgagtgtctactatgtgaataacactgtgttggccactagtctgtcacctactggtggattagaaaaatagcgcgaggaccattttttcttttcttttctttttttttttgagacggagtcttgctctgttgccaggctggagtgcagtggcacaatctcggctcactgcaacctccgcctcccgggttcaagcgattcctctgccgcagcctccccagtagctgggattacaggcaagcgccaccatgcctggctaatttttttgtattttagtagagacggggtttcaccttgttggcaaggatagtctcgatctcccgacctcgtgatccacccgcctcggcctcccaaagtgctgggattacaggcataagccaccgcacccggccaactcttttcttaaattagccagggaggcgtgggtgggttgggtgaggagttgggtggggggatctcattcagtattcaaacttctacaagtttcggggttgaggtgggtgatggtaagggaacaggccctgccactacctttcatagtgacttccatttgtgtaatatttttggtccactgagagctattattttatttgattcttatgaccatcttgtgaaggagtatcaacagataccccgttttgattttatcagatgcatgatttgtcctacatcaaacttcataaatgatggacagaatggaggaatccttcagaccaagtgctgcctacttcccaccccaatggtggcctcagcctgggctcacatcacacgccccaaggagccttggaaaaaataaaggctcttggctccttcctgggacagcgtgattcctcatgtctgagcaggcccatgaacttgtatttttcagacgttccctaggacccgtgtccatctggattagggaaccactacattataccacttcgcgggaagactcagggggaagcattttagccactttcctgtgttccacagtactggagggtgttctgagtgggctgtgattaatttccaaaccaaccacacgtctcccctcaactcccactgcttactctttgcttcctagacattcactgcaggctggagacttctggaagccaacagcatcgctgtagaatttacagggtccagttcccggtggaccacaaaacctaaattatgtggctggggaaagctgaaatccaagggaagggtttgaggaggggctgaccttataataaaaccggcttgtatttactaagtgttaactatgcgctaggccctcgttgacgcctcaactctatgtgaaaagcactattatcccccatttacagatgggaaaacagagatttagagcgcgaaaatcatttccccaaggcgcacagactccaaagcccacgctaccaggtacaacctcaaggctgcggcgtctcttcacctgccccctagcccccaaaccgctgctatgtctagggcctgacattccggcgccctctgggacgtgctcagatgcaggggcgcaaacgccaaaggagaccaggctgtaggaagagaagggcagagcgccggacagctcggcccgctccccgtcctttggggccgcggctggggaactacaaggcccagcaggcagctgcagggggcggaggcggaggagggaccagcgcgggtgggagtgagagagcgagccctcgcgccccgccggcgcatagcgctcggagcgctcttgcggccacaggcgcggcgtcctcggcggcgggcggcagctagcgggagccgggacgccggtgcagccgcagcgcgcggaggaacccgggtgtgccgggagctgggcggccacgtccggacgggaccgagacccctcgtagcgcattgcggcgacctcgccttccccggccgcgagcgc

SEQ ID NO: 40346 - DNA, 2300 bp, Homo sapien
cctgaacaaaggtatcgggcacagctctggctttgcttcatttctccttcttgccagttgatcaggaattcctgctgctctccagaaaaccatcagaagcatatgttgctgttggaatcaccacccaccagtgggcagaagaaagctggggtcacaggctaatttccccaggcaggtggcctgggttgaattccacgcccgccactgtaggctaatctgccccactttaggcatgttatttaacctctgtccttggagtcctatgcagcaaaatggggataagaatgcctaccccataaaaggttttgtaaaaattaattaatattgtagaaaaatgcttagaaccgtgtctgatgcatagtacatgctatgtgtgttaaatatttaactgacagttaaggccagacacattggcaaagtaaccttaaatccaaaaacagcagaccaattgtaaggaaagggctaactggaaatttttataagtctgtttgctgaagaagccttttccagatttttttttttttttttttttgagacagagtctcgctctgttgcccaggctgaagtgcatggtgcgatcttggctcactgcacctctgcctcctgggttcaaatgattctactgcctcagcttcctgagtagctgggattacaggcacgcgccaccacgctgggctaatttttgtatttttagtagagacaggggtttcactgttggtcaggctggtctcgaactcctgacctcaggtgatccaccatcctcagcctcccaaagtgctgagattacaggcgtgagccactgcacctggcgccttttccagatttgaagttgcagggagagctgaggatattcacagggcaaggacttgaggcagagagacgaagactcgggtctgccaaagcaaggtcattccctctggattctagttcttcagatggatagaatgaggtcaaagataaagctctcacccaagcaggaggaaaaaaacgctctcaaggattgccagactctaaaagtttcagagttgaaaagggcatttcaagctataagcagccagccaagagctaggcacagggtgtctcagttcttggcattgctgggccagcatctatacttagggaaaatccacatggaaggaccccttctcctctctccaggaaaacactcagcttaatgacagctgggtccagagcaggggcctagcaagtccttgtctgggcctctggtgccggagtcaaaggaggtcctgatccagccttgggattccagcaaggactttaccccatattcaggaggggaatctacaggtctccctcaaagaccctcaggacattctgtgggcagcccctccaccatctcctcgctgctgttcaaattctcacttttatttgtgtgccacttttaatttgtcaaagcactgtcacatctactagctcacctgatctatgccaccacatcagaggatacagaaaggtggtattaggacatctgacagccaaggaagcagagactccagtggttaatgtctagcccaggaccacagctactagcagaggctacacctatacccctgacttcacatcacactctgccacactccctctcctgtgtgagggctcccccaggaaaagaggaaagacaggagctattctaggcaaagtaaccttaaatctgaaagcagaagatgaattgcaaggaagtgcagctccaggacgtgttcccctatcttcccatcagaactcagccagcagccatggacacaggcctctctttcctctgcactgcttccccaccctggttcccgctctggggtaggtccctcccagaccattatggctgggacgtgcagcatcttttttctctgcttctccagtaacagctggttctgctcaactcccaaagatgattttcaagaaccccaacactactatctgcctgggctgccagaaagagaaagggcaccctcagagacactgaagaccaccctccagaagccgccagcactttctatcatgtgactagctctgggtgctccttatctagcgaaaggggctggctcaaatggcacagatattgaagatcttcctgaagaagacaggaagagatgctcaggtcagggagggaatgagacccctggggaagggactcctcccagctgaggagttgattagaagcaatcttggagttggcaggagccttagagactgcctgagccagtccgggaagctggctgaggagcttgggagcaagagactaaaaccagccaagtttgggacagaagggaaggaaagggttgagc

SEQ ID NO: 40347 - DNA, 2300 bp, Homo sapien
aaatgcatttcaattactttcaagtttaggtacaaaactcaagccagaacagaaaaatatcacctagggtcagtctcacttcactgactagataaaaatcatgtgtaatcagtacatcaactcaacaatctagaaattgctagctttagtctcttatgtgtacagtataatttttgtaaatgaaggatactcctaaaacatttgaaactttctaacctgatgaattggcaaattttttttcttttctttctttctttctttctttttttttgagatggggtcttgctctgctgcccaggctagagtgccatggtacaatcatggctcattgcagcctcgatctcccagcctcaagtgatcctcctgcctcagcctgccaagtagctgcaggtacaggcaccaccacactggctaatttattttattttatttttgtagagacagggcttccctaggttgctcaggcttgtcctgaactcctgaactcaagtgatcctcctgccttggcctctgaaagtgctgggattacagacatgaaccactgcacctggcctaacaaactattttttcttacaatcttactcgcactatgaatgtgcaagtaatgataataatagtaataataacaatagctggtaaaagattgcagtgcaggccaggtgctgtggctcatgcctgtaatcccagcactttgggaggccaaggtgggcagatcacctgaggtcaggagttcgaaaccaacctggccaacatggcttcttttaatgcatagaacagaggagatgttctcatttcctgtttgtgaacaaattcccaattaacactatgaaaactactgagttttgttgcaggggtcaacgagtaccctaaaggttcccaatttgtggtagcatttgacaattcacagacatgctactccctgggcagttaccaacaactgaatcttatgatcagcctctcagccctgtgtacttccacccaatcacctccacaaatcacaaccaggggtctttcaggcctatccctggggtgcggggtgggggcagggagcagaggagatggagtttgtaatttgaaatgggaccccatttgaaaaaagtagccaattcttgtgtgaccattatagaaagacctagaactaagagagagccttgaagacctgaatcattacctgttactcctctttaccacacaggatgcacactgtgctgtggggaacacgatcacacagacaaggctgagtgaggcagcaccctaccgcccacagtttaagaacaagaacacctgcattgcgatttttcttttcttttttttttgagagggagttttgctctgtcgcccaggctggagtgcagtggcgtgatcaaggttcactgcaacctccgcctctagggttcaagagattcttgtgcctcagcctcccgagtagctgggattacagatgtccaccaccacacctggctaatttttgtatttttaatagagatggggtttcgccatgttggccaggctggttttgaactcctgacttcaggtgatctgcccaccttggcctcccaaagtgctgggattacaggagtgagccacagcacccggcctgcactgcaatctttcaccagctattgttattattactattattatcattagagacaggatctcactctgttgcccaggctggattgccgtggctcaatcatagctcactgcaacctccaactcctgggctcaagtatttgggactacagacacaagctactgtgccaggctagtttttaaattttgtgtagagacagggtctcactatgttgcccaggctggtctcaacctcctgagctcaagcaattctcctgcctcagccttccaaagtgcggggattatgggcacaaaccactatgcccagtccaaccagctattattactattttttaattagaaggaaaaaaaaaaaaacaaaaaacagagggatgtgggtgtgtatgtttcttggaatccaagcgatcagggggaaaaaatccgtcaaaaatgttctcagtacaaaagttggcaaaacagctctcttttttaaactgaactttgtaataggagaaatactctcacaaggacaggatgtttctgagccaagttgaagcaaaagaaactttttccagcatgtcaggaacgaagctgacgttccattaagaaaaaaaaaaaaaaaaaaagaagtgctagaggaaggagtaagaggtgaaaaggcaccagaattcagacggagctttaaattccagacagggccagcgttgggagcacgtaggaggcgc

SEQ ID NO: 40348 - DNA, 2300 bp, Homo sapien
aacagagcgagactccatctcaaaaaaaaaaaaaaaaaaaaagatctgttgtcaatgtaaatctccattatgcgttttctgattctttctggaacaactaaaatgtagtcacatatatctttattcccctacagcttcaagaatgaagttaatgttgaaaacaattctgtgtgcttcaccactggctctttcattcattcagcaaatagttattgtatataaaacaagaaccaggcactgtgctgggcactaagctagaatacagagaaaaggagcattcccagctgggtgtggtggcttacacctgtagtcccagtgctttgggaggtcaaagcaggaggatcacttgaggctaggagtttgagaccagcctgggcaacatagtgagaccccatctctaccaaaaaaaaagaaaattagctgggtgtggtggcattcacctgtggtcccagctgctgaaaaggctgaggcaagagggctgcttgagcccaggagttcaaggctccagtgagctttgatcgcaccacggcactccagcctgggcaacagaaagagacacggtctttcaaaacaacaacaacaacaacaacaacaacaacaacaacaacaacaacagagtgttcctgcctttaaagaacttatattctagtgaaagatagacaagtgaagagatcattattattattattattagagatgaagttgtgctcttgttgcccaggctggagtgcagtggcgcgatctcggctcactgcaacctccacttcctgggttcaagcgattctcctgcctcagcctcctaagtagctgggattacaggcgtgtgccaccatgcccggctaatttttgtatttttagtagagacggggtttcaccatgttagtcaggctggtctctaactcctgacctcaggtaatccaccccctaggcctcccaaagtgctgggattacaggtgtgagccaccgcgcccggccgggaagagagaattataaaataagattggtaaatgcttcgttagcagagttaacaagtgctataggagccctgggaaggacagcgataacatgggtgtaggatgcctgcatccatcaccaattgtgagcgcccactgtgtgccaagcatgttggaggaacagtgaaatcgaaacagattccctgtcttcatggagcttatgttctagcaagggagacaggcagtaacaaagaagatgtaacatcaagatgcaggatggtgtcatagaagggaggtttggagaaggattccagtctgctggaaaaagcgctagaataaggacaggtggctggagaggaggtgggtgggaggcaggaatgggtgaggaagggcatgagagatgctctaaagggagttgctaggtgtagctggatcgcagatgagatgatagggataggtgtttgtttgtttgtttgttttttccttgcgacagagtttggaggaaaattcattgcctggttgtcagagcctaaagggacattaaaagctaaagatgaacatactcccttgttttatggataaagaaaacaagactcagagagggtgaaataacttgttccaagttactcagctagttggaggcataaccagagcccagttttctgtgcagcgcagtccaggcctcccctagtctcaggaggcagaagcggtttaggggaaagagcatgccctttgcagggccgcctgggtcccctgaccccgtcacacaccgccccctcctgctgcttctctgaacagcagctcccggggcctcttcccgcggcttcccttccagccccggacccagcgggcggagagggcgacgtccgcggatcgcggagtcccgggggcgcccgcaggcctagcgccctccacctgctgccccgtgccacctaggagtttccttgccgggcgaggaggcgccgctgcccgggctccccgcagccccgcacgccccaggggctccgcatctccaggcggcagcacccgcggggccctgcaatccgcggagaagttggcggcatctgaagccacctccttccccgctttcccagcggcggggaccctacggccgggcgccccaccccgccctccctcgccccacccttcctcccgccccaccgcctccccgcccagggtctgggcacagccgcccgccgcccagcacaggagggtgcagccccggccccaagttctgcgccatgggaggctcccactctcagaccccgaggggccgggaacccgccggggagaggcacccgagacccacggagaccgcgtgagtcccagagccctctccaagggccg

SEQ ID NO: 40349 - DNA, 2300 bp, Homo sapien
ggaattcgcaaagctccctctgcaggcaaagggagactgttcccgaagcagtaagcagttggttcaagctaggcactgtttcccaaatttaccctgtgataacagttccccaggacacttagtgaacacacagatttccagactctgctggcaatttggatttttttaagaaggctggcggatgattcttgggcatattaaagattgacaacgagttctctactcactgtggctaggaatacaaaaggatgggcatagaggggaatgggaaccgaaagattagagcacgagtcactgatcagccaggcaggggtgacctcaggcaagaaaaccttcagaggtaaaaccaggtgggagttatttacagtagatcatgaaagatggggagtgcgggaactatgtcagtcaccacagggatgcaaaggaatgaaaagataagagaactattcaggaggaagaacaggtcctagtgtatgctagttactgatttgctggggtaatattatttcccagaaacagaaccctgtgtcaaatccaggagcctgggggactgtagaacctgaagttttactgggtaagcataaacctaaaactacaacagttggataagtggtgtgatatatttcacatggacctcctgcctagttcacttctttatagtcgctagaacactcatgacaatttatttctgggaagaagccaggatgaattcgaaagcatcctgacaccccacccctttcttttctctagacttcaggttaactcctgcccttcggttttggtaaaactaccctgccaagccttatcttgtattttgctcctgtttttgttatcaaatgtgtaaaacagtcacgatgaatatacatgccaactgctttcagaggcaacggttagtctcttgcaagtttcaacgtgcacattttggagctgctgtctctgtgggaacctgcaggcacctcatggatgcaccacaactcggaaattacagtaccacctggaacaccttatccaggcaaggagatcattaagcctggtgtttgaggcaatcgattcacttggaagaaggtgctttggtggttttgagaggaacaatccctacatgaaatccctccatgggaaatggagaacatcagctatttcccattgccttcaaacctaaagatgtcgccaggcctcttggcttgttactgaagcagcgaaataagtcagaaatcaaagacttagaagttacgaaaagaaaatctcaaaaaggagaatggggtcaggcgcggtgtcaggcctggaatcctagcattttgggaggcagaggcgggaggatcgcttgtggccaagagttcaagaccagcctgggcaacatatcgagacgcctgtctgtattttaaataaataaatatggagaatgggaaacccatcaggctgtaatctcacagggaatttagtaccctttacctaagacaagacctgggcacttgggaagcctccccgagtgcggtttggggagggggagggcatcttaaattccagtcctcggtcactcttgtggctttgccaagggattttcaaatcccgggaatgccagggatggagatgaacaggctgaaatcccccacgctgccagggttagggaggggaaaacaacagtccacagcggccgcgaaggtttgtatttttttttttttggtaacaaggggcttgtgtgcagtccaatatcaccatcgccgtgaagtcacagtggcaagatgaaaatgtttaaaaaaattttaaaaaggaataaggaaagaggaagaggacagcgtgccccggctcagaaaacggtcctcctctgccccggacgccggcggacctgtggggtatgaccgaatctccccgcgcagccggcaagccccggccctcagtcgggccgcgaccagcgtgacgccgcggtagggggatccggcgggcgcgcggccgtcttcaaagccccggcgccgccgccgcccccgcgcgcgcgcgcgagtagtacggtccgagggggcggcttctggggcgcggctccggcggcagctgatgcgcgccccgccggccgggaggcgggagtccgcgagccgggagcgggagcagcagaggtctagcagccgggcgccgcgggccgggggcctgaggaggccacaggacgggcgtcttcccggctagtggagcccggcgcggggcccgctgcggccgcaccgtgaggggaggaggccgaggaggacgcagcgccggctgccggcgggaggaagcgctccaccagggcccccgacggcactcgtttaaccacatcc

SEQ ID NO: 40350 - DNA, 2300 bp, Homo sapien
ttctcttgccacccaaggccttctgcttctctttgcctcccagcatccaaaacagtagtgctcaggaaatacttgtggctctgtgatggagtgactcaggcagccccacggggagtagagttttatgagtttaatatgaaccataccctgaaatctgagaaatttacctcattgctcatgctggaaaccctcagttccagtcggatttgcttggagctggatggaattgtgttgcttttcatactgaaaatgatcatctaatttttaaatttaaaaaacatttacgtagcacctacttcacgttcgacaggaatctcaacacttcacaaatgttaactcactgacttttcctaacagaggcattgagaagttaagtaacttgcccaggggtcaaagccagtaaacggcagagctgggcttcaaatccaggttccttgcttccagaggagatgctcttcagtttgttctggtgcctgaaacttacagatgagtggcaaaaccctccatgaacggggaaaaaaaagacattgatgtatttatttcaagggaaatgtgtgtgtgtgtgtgtgtgtgtgtgtgtgtgtgtgtgtgtgtgtgtgttttgcccatcgtcccccttttcttcctcattgaaagcaaaatgctctaaagcaaacagtcttttttcacacctgagacaccggcggtgttcatttttgctttggcaatcaaaatggaagaggaaacttgtgtggtttcatcactggtgctttcggggtgtgtggggcgggctgtccttctccctcggtcctggctcatcggcccgagcccccctccccaggccttgtggcctccggtcggtcgtggagacataagaggccgcctttcctctgttaacaccgggaatgtgccccagcctctccctccttcctgcaaatccagtccttgtcctggagaacctcagcgtcttcttatgcctgcctctttcaaagcctcgtaggatttacacctgattaacaacgtttgcattaggatcgccagacaccggcgcacggccccgcaggcccgcgcgaatcttctacattttcatgtttcggatgttgtccacctgacttgatgcatattcaaatgtctctctcccgacgtgggaggccggagtcagaacctgacagacctgccgtttactaactgggtacccagggcaaattacttcacaagtctgagtctcggtttcctcaccgtgaaccggactggtacccataggttgcggcgtggatcaaatgagatagcgcaggggcgggacccgcgcacagcagctctcttagttcctcttggcgaggtttacgtagtaacacatgcttgtctgtttcccattttttcccagagcaccctcatgctctgggggcaggaagggagtcttcgcatcacaccgaaaaagtcccaacgggcacggtgtaggcgcctgtggtcccagctactcgggaggctggggcagaaggatcgctggacccaggaggtcgaggctgcagtgagctatgactgcgccaccgcactccagcctgggcgacagagccagaccctgtcttgattaaaaaataaaataaaataaagaaattaaagtccttataaccctggttagagcgttcccgcccactggtctcttagggcacatttaggacaacctgaagaagccactcttcttgggaccctaacccttaccccaactcctcggtccccaaaggctaagggctcgggatccgaaggaggcccagctgaggtcgctgggtggggctctgggaggaggaaatggggttcttgagggagctcgcgctccagctcgcctcctcctgcgaggacgccccctgcccggacacctgctgcccgagcgagcgtcggggccgggcctccccgcggggcagtctcggcgcgcaggtcccacctgccaggcgcggaacgcgggcggcctcgggcgcagcctccgggcgccccgcccccgcctcccccgcgcggccccggcgcccggccgcaccccctcccagcccgcggcgccccggcacccctctccctccccggcgggctccgcggagcattgtactcacatccggggctgggttttgctttaatgcgaaacgtaattaacccggaaaaaagagccgagggacgggagagaaggagggggcactgggggagaccagagcgaggggagcgagaggcgcggagagtttggcaggcagacccagaaatccctggagcgcggcggacccggcggccggaggggcgaccccgcccgatgtaacgcgccccgcccgagccccggcccc

SEQ ID NO: 40351 - DNA, 2300 bp, Homo sapien
gcccatccagctgggctgtgtgtgtgtgtgtgtgtgtgtgtgtgtgtgtgtgtaatatcaacgcagtgtatttaatttggggaagtcactaggttagaactgtaggcatactcagtggagaggaagctacctattctattctaactattctgaggtcttcctggagagggattgttttagcagctcctctccagagggggctggaagtccagtttcaccaatgaccaagttttatttccttgtccttgttttagttttttcattttgttttcagtccaggtgcctcgcagctcttttggaatgggccagcattagtctaattttaagcgctatgtgttttgtacccttgcaaacttgctttctctttcttcttgctgttgccctttgaatgaagccttgtgtgcttgcatgatcagaccctgtaataggatgaatttccatgcacttaacatgaagagatacaaaaagaatctagagagagatatatatttttaatgaaatagaagcttggcatagaaacattgatttagatgttatgagttgctggccagagattcctcagataaaagagcctagaaaattgagttttgagcgggcatggtggctcacgcctgtaatgccagtagtttgggaggctgaggcgggtggatcacctgaggtcaggagttcgagatcagcctggccaacatggtgaaaccccgcctctactaaaaaatatgcaaaattagccgggcgtggtggtgcaggcctgtaatcccagctactcagaggctgaggcaggagattcacttgaacccaggaggtggaggttgcagtgagccaagatcgcgccattgcactccagtcagggcaacaagagtgaaactccgtctcaaaatataaaagaaaattgagtgtcccacccaaattttagggcgtacctccttccatttgataagaagatgctatttccagtgtccctgggagaattcttccatccagtttatatggtgaattgccaccagcgttccctaaaggaagagagaacttagcttatttctgtctgtgacttttatcagctagatcagttaattgtatttttaaattaaaaattagtaactagaggaagagactaagagaactatttttacctgagtaaatgctctcctcttcttgtgtccaaatctaatgcagaggtgaaaacacttgatgagaaaatcctttgtggcttgaggggaatcatgtttctttcaggacgtgttgtttccctgaagtctatgtcacactgagaactttttctgactgcactgctttggagctattcatttaaattgagtttggcctagttttcctggtataaaacaggaaatctacattgttccctctttctctcccttccatcccttcccctgcctttcctatacacgctggtgtgcttttgccctcagaaattcttggtttgggagttatgtatttttgagtgatcgaggttatgacatacttggagcggcatgatttcaagaagccattccaaattcttatagctccttagctctggttttactctcgtattttccccaagaaaattttttggctattcaaagaaagcacaaaatatgtgatgtggaactcatgaaaatagggacttttgatatctctttaaatattccctgactcacggaaaagatgtcctcttttggtgtatacattgtgaaaatctacccatttatctctctctctctcttttcttttaaataaattatctgataaggccggcaaggtggctcacgcctgtaatcccagcactttgggaggccgaggcgagcggatcacgaggtcaggagatcgagaccgcggtgaaaccccgtctctactaaaaatacgaaaaaaaaattagccgggcgcagtggcaggcgcctgtagtcccagctacttgggaggctgcggcaggagaatggtgtgaacctgggaggcggagcttgcagtgagccaagatcgcgccactgcactccagcctgggcgacagagcaagactccatctcaaaaaaaaaattatctgataggttactattgctaaattaattggccattataataagctgatttgtttcttattcagcaagatctcttttgagaatgtgacaaattaaacatacatagaatccatatggtattatcctgataaagggaaacgaggacactaagactgtcaaatggaaatcttcttgtcaattggcaaacacttgggaattccacattagagcattgcttgtttttaattttttttttttaatttttaaaagacagggtctcactctctt

SEQ ID NO: 40352 - DNA, 2300 bp, Homo sapien
ttatcctgataaagggaaacgaggacactaagactgtcaaatggaaatcttcttgtcaattggcaaacacttgggaattccacattagagcattgcttgtttttaattttttttttttaatttttaaaagacagggtctcactctcttacccaggctagagtgcagtggtgtgatcatagttcatcataactttgaatctctgggcttaagcaatcctcccatgttagcttcccaagtagctaggactacagggttgtgctaccacgcctggctaatttttaatttttttttatctacagagcctggctatgttgcccaggctctctcaaactcctggcccaagtgatcctcctgccttggcctcctaaagtgttgggattacaggtgtgagccactgcacctagccagaacatcgttaatgtagttcaatatgagataaattattatcttcaatgaaacaagctctaaaagcattccattcctaaattgtatttcaaacttcctattttgttgatatttcttaacttctggccagttttggaccataatcttttaatgtgaaccaaagatggtacgtatttgaccaaagcagttagttttaaatgtataaaattgaaccaaatggaaaaaataggttggggatgcagtatagattagtgactaagtgcataggctctggagtaaatctgagtttttttttttttaaaggaactaaaaaatgtactgcattttctttgtggaataaaagccttgcctgagttgtgctattttcataaggcttttgaagtggtcttgacccactgtgtgtaacagtatttcaggtggtcctccccatggctgaataatgccatccattattctttaatttttatttttagaaacagtgtttcactctgtcacccaggctggagtgcagtggcctgatcatggctcactgcagcctggacctcctgggctcaagtgatcttcctgcctcacagcctcccaaagtactcagattataggtgtgagccaccacgcctggccaccatctattacttttgaaatcttcaaaagacttgcttactcaatgtcagctgatggttggtaaaaataatttggcctttagtgttaagtgagacatcataagggtattgaggtatacattatggagattgatgtcaggtcagaatattggagttatacatctatttctgagttgaatactcagctcccacgagaaagaaagtagttttaaggtccagcttcttagtctacttgaagcaaattttttttcttttatatttctgaatataaatatactcttatatgggctaaaaagaccccatgaataaatagcaggttcagtagttgaggagtggagtttagtaggtttgttttcagtataaattagataacatgtggaggtcacagcattttggaaattgagtgtccccaagtgagctttgtttataaactttcaaaatgtcggaagtggacaggtttgttaaatcttgtctgccagcacccttttcttcctttgttccttttcctctctgtgttattgcctgcggcagccagtccttcatactagatagagttcagataaagcaaacgtttggcaaaaacatactgtttgacctcctccccctctgcttatgaaggggtagcatgattctgtgttttaaagcagtgatgtttcagctgtgaaatgcactcgctgtaagctctaggctgagtgcatggaaactgttacgcttctcattttatgtgatctcctaattggtatgtagcaaaaattttctaaaactgttttgtggcttgttttgtaataaaaccatgtgaaatactgaaatatggtcatgtgttttcctaatactgaccttctgaccatgggtgggtgagctttcttatcagtctgccctcattgtcggttttagggatttcaggaggtaggttcctgctccgggtagggctagagaccttcccctcattgcctgggggagaacctggctccggggcgccgacgggggcgggtggtaggggatgtacgggtgtgtatatgcagaggtatgccaggctctgccccttaaagtttgggggccggcggaggcggcgccgtggccgggagaaagtgtctctcatttaggagggtttgcaggtccagagtaaagtcactgaagagtggaagcgaggaaggaacaggatgattagacctcagctgcggaccgcggggctgggacgatgcctcctgccggggctgctgctgctcctggtgcccgtcctctgggccggggctgaaaagctacatacccagccc

SEQ ID NO: 40353 - DNA, 2300 bp, Homo sapien
gtttttccattccaagaagccactgttaaccaatggcttccgctggaacgctttaatgtcctacaaagacatataccggtagactctatctgtctcctacggacatggtggaacctgtttgcctggagaaaagaaatgtcattggcaagaaaagctctgccccaaatgcatgtgtaacaaagatactgcccaatccatcaccagtgttgcaaagtgcacagacttccttttgctctttcaggaaaggttcatgccttgaaggagagtcaggggtgacattttagtttcaaaatctgtcagtggccaaaggaaccaaagacaggttggtctttgcacctgggtggttttagcacagagattgctccttcataaggaaaccaaatatcttgttcagtcactgaccctggccatactggaaatttccagtaacggtctttctgaggaaattcttcaaaaaactttgtacctcttatacttttatgtaatagcattcagacattcctatttcgttatcgaagggtttgctcttacgacaaaacaaaaactcaccttgagacaaccataaccaagttcctgggatgcagttgcatttccaacatgatccactgggtcttcacattctataaattcatcaggtctgtaattcaccagtaagatcatgatcatcatcatacggtctttgcaaatcgctgtttgcatgcacgtaatcaaaacgggcaaaagacatttcttcatcaagttttctggggttcggtttcaccctgctgacccctttccaagccaattaaactgaagcacagcaggtcaaacggacagccaccaaaatgaaccttttgttggagaagggaggtgtttctggtcctgtttctataaggattctacttctgccatggtttcatctcttcagtaggcaaacaacaagattctgggggcaaaatttaagccaaagtattctcagtcctctttgcatttcccaaatgccttttcttgtttgatcaaaaagagatgttaaaaaatggcgtgattctgcaacggtaagaatattgattgcttttttaaaagatgccttgtaggcagagacaagtcatttactccatttatgccttactcagtactggcaccgaatcgaccgactaatactctccttgggctaaagggcgcagggcaaagaaagcacaaccttacgcccttcttccagaggctatatgatgttactcctacccagttttcctctttggggatctcaaagcctctgtcactgacacacaagagttttctctgcacgggctgtgagaaacctggttcatgatatttgcctccggaacgacctcagagaggcagggtctgaaaaaatgcagcgtccccccaaccctgccttcccttaacacccatatattcctggcacaccctccacgtccacccgcctcgaccactggtagcttacaggtaagagcagaggatgaccggagagtgggggtcgccatattcccagctcgcagcacccccggggccctccggctgggcggcgccagcggatgtgagctcaggctcagcggtcgcattttgcgagtggctccgagacacacaatgcagcagaagtaaattccccagcagcaaagccgcctggccgcacagaagtaagtaactaaccgggcaaccacctagcaccatcttcccgggcacaggagcggagacccggcctcaaccacaaccccaggccagcagcacagacccaagaactgcgtggtcaggcctttccgcgtagccccgcccgcgtagccccgccaaacagccaatggacgcgcagctcgacgctccgcgcacctccgccaaccaactagaaaaggtcgagcagacgggcggggctactccgccctctgcttctgcttctcgattcctcttctgggtctcatgctcctccttcttttgcgccgaatgcgttctccaatcggatccgtcgacccccctaggtgggcgtgcccggcagccgacggggcggggcggatatgactggcgggccgactagtgctggttgccaccgccggtttagaaatcctattctcgcgccggggactggatttttccctacgtcagcgcagctaggcgatgtcgggagcgagctcggaccgagggctcagttgcgtcagtgccgcgcgcgtgctcgtcgggcgcgcgtgctcgtcgggcgcgcgcgcttcccggccagacttggggccccggcagggttggaaaatgatggaagaggcggaggtggaggcgaccgagtgctgagaggaacctgcggaatcggccgagatggg

SEQ ID NO: 40354 - DNA, 2300 bp, Homo sapien
tcaccttctgcccctctacaatcaactgtgtggtgtttataggagttccataaacggtggctaaactttgaaggggcatacacatgccgaagtgaggagctggccaaaaccacagttaaagaccatcaggatattccactcacctaatgcaggtcggtaatgactgacaatttatattaacatttaaaaatacagtcttatttacatttacaaacacaaaaaaaaatcacagattaataaaactccggatgtataatcgtcttcaccttaaacatcggtgagtgttaaccatctagaataccaccggaaaagtagttttaaccagaagaaatttggcaacttcccattcaaaacattgtcagagtttcaacatttccacactggggcaaatttacttaatttcaaataaagcagccaaagataagaaaaacaagtaattagtttcctgaaggtcaacagtcctgcgttgaaatcttctatcatcacctttgaataactttcaatcaatgatttagtaaaaactcccattctccatcatcctctgtcgctgatagagaaaatacagccatgcaaacaattatatcatacaaaatccaaaataaacaacttgtttccagaaagacgccagcgtgctgacaatctgcttccactatgtttgggcatctccaatacaagtatcttacatagtcaagggcagtttcacaattcaaaaacgatttcacacaaatgatttaattcctacaataatcctgtgagttcaaaagagcagggattatctgtccggatttaacacagtacgaacccaataaaaacacagattttttaagaatggtttggctatagaaaggtagcacatcgtttacaaaatattcttactacaaaaatgacccaagagaaatgagcgtcctcccacccacctttattccaccattaaatttagctgtgttgacccaaggataccatgaacgtcaaaatttcaaattataacctgcagcaaaagtttcatctctcagtctctttccaagcgacattaactccacgagcgagagccagctccctccctgcaggcgtttggaggactgaacgcccgcgggcgcgcccagcctgcagggctccggcccgccgaggtcagcgcccgccccagagcgggtttcggggcgtctgggggacccggggtcgcgcgaggcggcgagggatggggggacgctgggaacggctccatcgaacaggacacggaggaagcggtgccgggcagaggacccgggccaagaagggcttggggcgccaaaccccgcgcctcgggtgcgaccccggtccgcacacacctggagcggccgcgccccccgaccccgggtccgatccccaggccgggcccctccactcccaggcaccacaggttcactccgagcgccccgtccctaggaagcagccgtcccaaccgacccggggcgcggacacccacctggccgcgccgcaccgaggactgggcccaccaggccaagcaacagcaaccaccggacacgaagggtccccgagggaaagcgcgcgccagaccccatctcggccgattccgcaggttcctctcagcactcggtcgcctccacctccgcctcttccatcattttccaaccctgccggggccccaagtctggccgggaagcgcgcgcgcccgacgagcacgcgcgcccgacgagcacgcgcgcggcactgacgcaactgagccctcggtccgagctcgctcccgacatcgcctagctgcgctgacgtagggaaaaatccagtccccggcgcgagaataggatttctaaaccggcggtggcaaccagcactagtcggcccgccagtcatatccgccccgccccgtcggctgccgggcacgcccacctaggggggtcgacggatccgattggagaacgcattcggcgcaaaagaaggaggagcatgagacccagaagaggaatcgagaagcagaagcagagggcggagtagccccgcccgtctgctcgaccttttctagttggttggcggaggtgcgcggagcgtcgagctgcgcgtccattggctgtttggcggggctacgcgggcggggctacgcggaaaggcctgaccacgcagttcttgggtctgtgctgctggcctggggttgtggttgaggccgggtctccgctcctgtgcccgggaagatggtgctaggtggttgcccggttagttacttacttctgtgcggccaggcggctttgctgctggggaatttacttctgctgcattgtgtgtctcggagccactcgcaaaatgcgacc

SEQ ID NO: 40355 - DNA, 2300 bp, Homo sapien
ttgaaaatattaaaggacatcctttctttcttcaaaaagaataaataagggtaaattatatgcaagtttgacatctctgtttgactctgtatgtcaaactgaccttgttcagagtattgcattctcgctttctcctgtgtctgtaaccatagagttaagcacaatttgggttttctaaactcaaatcagattttattaaatttcataaatgtttactaaaacctaccatttttcaggcactgtattaggtactgtgatatctaagttctggataggatatgtttcccgacttttagaagtgcatcctctgttatgaagagaggcatacacacaagaataatacaaaatcaaccctattaaagatacaaaccagaaaggttgaggagtaagaaagaacaaaataatacaagagccagaaattcattcagaatacttaccactaattgatgagttgaagcatttactgtaattgctcttctgtttgttacaaagcaaggtgaaactagctgtggctcagcagctgcctaaaagcagtgttagcttagcattggctgttcctattgagatacaagctcagtgtatttttttgttgccttgttccccaccccacccctccacctgccccagatggagttttgctcgtcacccaggctggagggcaatggcacaatctcggctcactgcaacctccacttcctgggctcaagcgattctccttcctcagcctccccaagtgctgggattacaggcgcccacaaccatgcccggctaatttttgtattttttagtagaaacggggtttcaccatgttgaccaggctggtttcaaactcctgacctctggtgatccaaccacctcggcctccctaagtgctgggattacaggcgtgagccacctcacctggcctgttgccttgtttttgttcatgctattaatttcaggtgtagattgccctgttgaaattgcgtgcatccataaaaatcacatcttcactttaaatgtcttagttccccaagtgagatttttctctgttcccatgaggccttttagtttatgtgttggcctattatgtagtatgagaaattaatccattctttgggatttgaaaagaatgaaaagctaatgcatacagatggagaccaggtgtgaggctgggaaggaggaggcattgcagttccagggagtaaagcagtgtttaggaaaaacccaaagtcagagctgctaaaacacgggataggagaaattaagtggcaggttccggtctgagttcagaaaaattactatgctgaggctagaattttctactggaatgtaattactgtaattgtgggcaagaatctctaaatctttcactacatgaaataagtatttattgcactgagaagtttctgaacaatagaatgacatcacatgagttttagccaatggcctgcggagaaccagattggaggaaaaagcctggttgtgaagtccatttgggcagcgtcagtggggaaaaaaatgcagctggcgctcttcaaaaatatgaagagctggcatttcatattgaaaagcggctcacttttcccttctttggaatgttcacacatctggctaaatagttttgaaaaaatattagaaacaggtttggcaaatatgaatatatatttaggtgtgtatatagattttaattcagaaagtattacacattcgcttttgaaaggacctaggaagccccgaacggtggcagatgcctgtaatcccagctactcaggaagttgaggagggaggatcacttgaacccaggagttcgagaccagcctgggcagaatagtgagcacccccgtcccaaaaagaaaaaaaagcaactgggaagtgtctggtgcaggagagcacacgctgactgtgaataagtgtgtcagttcttaaggtccagcaacacaaagcgaaaagttagtggaggactacgagcgcgatctcgacagagggcgctgggtggtcagtggctccagcaaccacgcggctggggtgcgccgggaagggagctggatgttttagcctcggggcgcacgctgcgggcccttcgtgttccggacgctaaacaccgagagcaccccgtctccggggcctccggagaacgctgtcccatgaacgtgcggggagcggcccccggcgtccgcgcgtccccgcgtccctggcaattcccgacttcccaacggcttcccgctggcagccccgaagccgcaccatgttccgcctctggttgctgctggccgggctctgcggcctcctggcgtcaagacccggtgagccagcccaga

SEQ ID NO: 40356 - DNA, 2300 bp, Homo sapien
ttcagtgactttataatttgtaaatccgtaattatggcatagtgaattcattgccatgattgtagaaagcatatggttctatatatacacagtttaataatggagacagacatggaaacacaactgtaagttgttatactataagagcatccaagtgggtgttttaaaatgtaggttttattactactcaggtatattgaagccaacagatcagtagatggttgctattgaaaagacaggctgttactcagtttccaatggtagggggcactctccatcattcagggcccacaaagggaaggagggaagatgtcattgaaatattttaaataggggagtgacatatttctattttaccttagaataatcattttggtaatagtgtagggaccagattgctggtgggaaaattggggaaggaggaatcaaattttaagagactgttctagtaatcagggtgaaaacttagaaattagtggcatcaagaataaaaataaaggaacaactttaaaagttactgattgggttgaattagaagaacttgatttgattgatttattcgtttacttaacaaattcattgagcatcatctagataacagttgctgttctagccattggggatatagcagtgaataaaacagaacaatttccgctctcatggagcatgtagtgtaataaatgtaggatgtgttagataataataccattcactaaagtagtgaaaatataagtaggaagagatttttgaaggaagacgatgagtttagttttgaatatatttattttagttttggatatgagtttactctgggataatttgaggatcctgtggaacatccaaggtgatgtactatagagagtttgtctatggatatatacagtttgacatagttgcaatccagtttttcagatttcaagagcgatgtatatgtatgtatacatacacacacactcatttgtgtgtgtgcatttatgtacagttttatgcaatggtattacataggtagccttccataaccattgccacaattgagacactcaacagtaccatcaccacagcactctcctgtgtgatcccattagagccacactgatcccctgcccgcttctgagcctttggtgtccactaagccattctccttctttgtgatttcacacacattgcataaagttatcaagcagtctgtatccttttgagattatgttttcatgctgagcataattttcttgagatttatccaggcagttccatatatcaacatttgtttctttttattgctgagtttatggtaggaatgtactacagtttatttaaccatttaaccactgaaggatatatgagttatttctagtttttagctattatgagtaaagatgttatggacattcatgtacaagtatttgcgtgaggatcagttttttgagataaatgctcagaagtgagattgctgggccatatagtaaatccattctttgttttgatttcaaagaagttgaagttaccaaattattttccagagtggctgtaccattttacattcccatcagcaatgcatgagggatccagtttatattcagtttttacttattaatgttttattttgaactgttgaaacccaaagcagccttacacctctgacagtagatggaaaagaatcttaaaaatactacataataatttgtacttaaatataaaattaattctgtttttcagtatgattactggggctctgatagcatgatagtaacaaataaagtcatcgaaattgttggccttgcaaattcagtaagtgttttccttttcatattaaaataattgttgttttgaaatgataatttgcctaaacttgatgcggtattcctggataattaacccacccatataaactgagtgtgggattgtaaaaactttgaatttctgggtttttataagataacataaatattaattatgcatgtatttatctcttctgtttttagatgttcacccaatttaaagttactattgtgctgtcatcattggagttatggtcagatgaaaataagatttctacagttggtgaggcagatgaattattgcaaaaatttttagaatggaaacaatcttatcttaacctaaggcctcatgatattgcatatctactaatgtaagaataatgtttcattattcctagaaagaaaacaaagacctgtgataattatgtggcttaatgtaaggaattattattcatttctgaatatccatgctttgattatttagtatgtgctttattcaggctttatgctcaatttctagtt

SEQ ID NO: 40357 - DNA, 2300 bp, Homo sapien
aagagccctcttggtgctctaccccactgtggtagagcatgtacctgaagtcagcatgactaagttctactccaggcctacagcatactacctgggtatcactgttcattctttagggcccaagggctgtttagtgagtaggtgattgatccttcccggatggggtccttccattcaaggcagcaggttcccttctggccagggtgtgtttagaaatatctaggaactaggacctggaatggggacttcaccaccctgatcagtgccctatcttattgtggctgatctggtatccaagatgcaagacaaagtcttctttactcttcccttttctctcaaccagaaggacggggtctttttggcgctgtgcactctgctgcctgaggctgggggaaggatggcacaagtgttctcttagcttccctggctggtgtctctacaggtcacttgcccctgcagtctggcttagagcccagctcaccactaggacttgcctagtcattgcagtccttgtgtcatagattgcccctcaagttcacttagggccccagagtactccagcccatggtggtgaggcttgctggaactcaagctctgactgatcagaaggatgattcccctctggctagggctggtttatatgccccctctatggatgggtgtcagctgagtatagcctgattctgctttacactgtgtcagggcaacattgaattcaatgcaaagcctcatagacactgtgctctcctccctgagtcacacagattctccgcaccatgaagctgctgctgggggataagggatggttgctgttgacaattcaagacattctttcccaccctctttggtgcctctttcagcaacatgaagtcattcaagagcaagttgtttaatttccatgtaattgtgtggtttttgagatatcttcttggtattgatttctatttttatttcactgtggcttgagtgtatggttggtataatttcaatttttaaaagatttatttagacttggtttatggttgagcatgtggttgatcttagagtatgttctgtgcacggctaagaaaaatgtatatgctattgttgaaatgtggagtactttgtaagtgtgtattagtattaggtccaattggtcaagtgttaaattacattcagaatttcttttttagttttctgtcttggtgatctgtctaacactgtcagtggggtattaaagttctccactattattgtgtgactaagtgtttttgtaggtttagaagtagttagaatctaggttctacagtgttcagtgcatatatatttggtaccattaagtcttcttgttgaattgaactctttatcattatgtgatgtcattatttatcttttattactgtttttggtccaaagtttgtgttatctactataaaaatattgacttctgctcttttttgttttccatttgcatgatagatctttctgcaaccctttactattagcctactggctttgttacatataagatggatctcttgaagacagcagatggatgggttttgtttttttattcaacttgcacttagagtctcttacttatttctgcttggatctatattatttcttttgttccactaattttaggtttagtttcttcttgcctttctagttccttgaggtgcatcattaggttgctaatttgaaaattttctccttttttgatgtaggcatttattcttataaactaccatcttagtattgcttttgctgtatctcataggttttgttatgctgtgtttctatttcatttgtttcaaacaattttttatttttattctttatttcttcattgactattgatcattcaggagcatgttgtttaatttctgtgtgcttgtgtagttttctaagttcttgttattgatttctagttttattcccttatgatcagaaaagatacttcatatgattttaattgttttttgaatttgttgagatctgttttttagcttagcatatggtctattctgaagaatgtttcacttgctaatgaaaataatatgtattctatagctgtttgaagaaatgttgtgttaggtccatttggtctagagtgtggtttaactctgatgtctgtgttgattttttcttttttggtctgggtgatctttccattactgagtgaggtgttgaattgtccaggtattattgtaatttattctttctttctctttatgtctattaatgtttgctttatatatttgggttcaccagtgttgggtgcactgtatttagaattattatattctcttgctaaa

SEQ ID NO: 40358 - DNA, 2300 bp, Homo sapien
taatattaaattgactggttcacttaatatatagtgattatcaatataattgaaaacatataaactcaattacatgcttattctttaaaattggtgaaatattataaaacctaggacatgatcattttgtaaatattttgtgggtggttgggaagaatgtgtattctctatggttgatctagaattgtacaaatgtttactagatcatacttatttgagtcatccaactctcatatatttttgttaaattttgcctgcttgatctataaataattataagagatgtgtttcaatctccaatcctgatgatacttttgccagctttcccctatactcctatcaatttttgttgatacattttaaagctatttagttatataaatacatgttagaatgtttcaaattgagaacattatcattttgacattgcccctctccattcttcccatcatagtcatattgtctaaaagtatgcttctagattattagatatatatgttttcattatttgatgtagtatttttctctcacatataaacaaactctggaaagatatttgattgctgttactgtgacatcatttaatataatcttctgttttccttatcatgtggtttcttctacgaaatgcctttctgatatgtatttttacgtcaaattttatttgaatttatatattgaagagaattttaaaactcatgccctcacatttgaataatatttcagatttcttttcagttaacaatttaataatattaacccattgatttcatgtgttcagtatggctatgaatgttgatttgattcttgttccttggtaggcaacctgttcttttcctttagaagattctaggattttctctttgttatcattttaaatttcaggtgtgtgtgtgtgtgtgtgtgtgtgtgtgtgtgtgtgtgttttcctcttcaatgcccagtttgcaatctctgggttctttcaatctaaggtcattctctaactttttaaatgtacagaaactttttccattatttctttaaatatttcctcctattttgatttttctcttttttggtggggaaatgctattctctagatacaggcagttctatttctattttccatataacttaattttatttttgcattcctactttttttctttccttgttcttttctgtcagagtttgccaacctgatattccaaatttctgcttcattaagcaattgtatccattctactattaatttcatgtcttgtgactttacttctttgtctcttggttctttttttaaatatttttgttattgttctgctgataacgtcccttagatttgcatccaagtaatttcaaagcgtatttataaacacgctttcagatttttactgaaaatttacagttaatgtggggatgtggctgtattttagtgtatttaatatgatgtgtgctaggacctgcaaaggaaagagtgcctatggaccccaataaactaaactgtttctgcttctgctagaggcagaattttaaaaggtctgaataaagaagtaaaagctagggattgcaggattacacagaatgtagcagtaatagtttgggacattagagaagatttgttggaagtccgtctgagcagggactgtatgggctgttcggcattcaatagctgtcctataatggtgtccccagccatggaatgttaaaatcacagcgtttgcaacattttctgcaaacatgcattttgcctggttctagctaaactgtttgcatggtatattaatgtaatgggaagaaacttgattgctgtcagtaaccagaatatgtttatatttgtttcttttctcactgtaactggaagttaattaaaaaagcgatggtctaagtaaaagatataagcaaaagcgtcaccaggcaccaccctaacctgagaattgacaattaggaatcctttcttttttaacaataaactgactggcgtatcaatgctgagacgcttctcttgagtgctcagctgcctgccagcagcgcgttacctacttccaatcacctcccgcttcgtctgtgcgcttttcctctccgcagccttcctgggccgcctcacgcgcgctcagccctgcgcgagctgcgcctctccagctctcaacgtctcaactgctgttcatcgccagggctctaagacagcgagccatgttccttcttctggtgcttctcactggacttggtgggatgcatgcagacctcagtaagtccaggaatccaggcttccgagggagaccttgttcactctttccacggcccaggtccagcccagactt

SEQ ID NO: 40359 - DNA, 2300 bp, Homo sapien
tgattctcctgccccagcctcccaagtagctgggactacaggtgcccaccaccatgcccggctaatttttgtatttttcgtagagacagggtttcaccatgttggccaggctggtctcgaactcctgacctcaggtgatccacccgtctcaacctccctaattgctgggattccaggtgtgtgccaccacggtctacctgttgttttcattctttgtgattcccttgtctgggtttggtttcagaataatgtttgtctattaaagtgagtttggaagaattgcctcttcttcaatttctcaggagagttttgaaggattggtatcaattctccagatgtttggtagattcagctataaagtcttgcacttttatttggtgggagtcttcttattattaattcaatcttcttattcattattggcctgctcagattttctatttttcatgattcaatcttaatagattgtatgcatgtgaaaaagtatctatctctccttctttatccaacctcttggcatataaatgttcatagtattccctcatgatcgtttctatttttgtggtatcagttgggatgtctcttcatttatttcgaattttcatttatttcagtctactgttttctcacttagtctaactaatgtataatttgatttatatataaaaacttgtacatgaacattcatagcaatgttttttgcaaatttaaaaactggaaactacccaaatattgtttgatggatgaatggttaaataacctgtggaacatttgtattatgtatactactcagaagtaacaaaatgaattattaatacaagaaaaaaatttgatgtatctcaagggaatgatatgagtgaaaaaacaaatttcaagagatactatataatgcttcttatatatagtatcaaaaataatattatggagatggattgtggagactggattagtgtttgccagtgactaggaattacgagtaaggtaggtcagtatactctatagccgtagtatataggttccttgtggtcatgaaatagttctgtatgtcaatatgtatgtcaatttttgtattgggtacacaaatcaatacacgaaatcacaaacaagtcagtttatgtaaaaattggtgaaatccaaagttttggaggtgaatgatagtgatggttgcccagcaatatggatgtatttaattccactgaaaagtaggcttaaaaagcattaagatcataatttttatattgtgtattttactacaatacaaatgttacaataaataataaattgaaaaaaaattgaaattaggcaaaccacctacttatacagtaagagataaaataaaattatttccaactaactatattatcattccttgtgtgaactccatattgatgggggaaaatatgtctggcttttcattaagtctccctaagccataaagcttttctaagaaacaaaagtgtggaaaagtcaataaataaatggattttgattgtttttatgaagtaattttataggtgtgatttttttgcctgatacttataaatcgtactaaaataataaaatacatccatatatccatatttcgcattttacttaaactccttagacagttttctaagaaattgattttttagtttttagtatctgtttgtgttttcacctgagtcttaagagcagaaaactagaagtagatattactaaaattggcaattggctgctgctaaacatactatgattcttattttttttttttctgttttccttcactacagtaattcaactgtcttcccagaaggctatgatgttgaacaatcatattgccaaggcttcatcagcaaaaggtctagagtagaaatgtgctttataaccctatgttacccctgaatgcgttgtaaatgtcaactctttagaaaaaagagcccacgtacccagaaatgcaggctcccacgtgcctcctccggtgcagcccactgtgggtgggcgcgcggggctgtaggatccacccgcctcgggatccacggagctgggtccccgccgcgccccgcggaccccacggcccttccgctccgctcggcctccaccaccctggcctcgagctgcagccgttccaaggacaacggccatccctgtggctgggccgccggctacgcaatgctgtctctcttgctgatcctctcaggcctgggccggctgacctccgcgggcccacgtaagtaaagagccctgcaggagaggaggccgcctttccgctttcgcctttggcaaggcctagaagcgcaggccaggctgggaagggggcc

SEQ ID NO: 40360 - DNA, 2300 bp, Homo sapien
atacaacctgggataaatttaccagaaaatataacctgggataattctaccagatttctctcatcttcattgccactaacttattttgggtcattgtgctcaatggcctgcttcttgtcaataataatttttgagctatctgttcaggcgtaccagcacttagcagatccaagttttagtcctgatcagtcttatttattttatttgttttttattttttgagatggagttttgctcttgttgcccacgctggagtgcaatggcacgatcttggctcactgcaacctctgcctttggggttcaagcaattctcctgcctcagccttccaagtacctgggattacaggcgcccaccaccacaccagggtaattttatatttttagtagagatggagtttcaccatgttggccaggctggtctcgaactcctgacctcaggtgatccacccatcttggtctcccaaagtgctgggattacaggcatgagccaccactcccggccctgatcagttttatttttgcacacaattttgcacacaatttttgcacacatattttgacacaattcatccctgaaatagggggtactggagtaaaaggcttgagtgtgatagatgggttgggttttggacatgtgccatttaagatatttgtcaaaaagttaagggaggcagttgcatagtcttctacagtggtctcaatttttctctctccccttgccttgctgcccttcctgtctccacagtttcttacttagagcttagagtcactgttaacaaaacagtcagattgcattgtaaaggttttcttttcccttagaacactatattataatcttgtgtagtaagcaaggtacacagttgaagtaaagtgctttctgattgtcttttcaagataaagttccattttcttgaattctctttatttgcaaaaataacactaaatattaaagctttcctttctctttcctccactgattataatatagttttatgagaaaaatacactgttgaagaaatgtgctttttgatggtcttagtgggatcaactccattttcttttctgcaaatttatttcaaataattttgtgtatttatagggtacagcgtgatgttttgatctatctatacattatagaatgcttcagtcaagctagttaatatacccatctcctcatcaatttatcttttctttgtggtgagaacattgaaaataaattttagcaattttgaaatatgcattattattaactgtgatcaccatgtagtgcaagagatcattaaaacttattctttcagtctgactcatattttgtacctttagatcaacattttccctttccccatccctcatcccaccttccctggcctctagtaatcatccttctataagatagactttattagattccacattcaaatgagatcatacagtatttgtctttctgtgcctggcatatttcccttagcataacgttctctggttccatccctgttgttgcaaatgaatttccttcgttaaggctgtatactattccactgtgtatatttaccacattttctttatttactcattcctcattgacacttaggttgattccatatcttggttatcatgaataacggtgaaatcgtaccagcattaaaaagttcaattttcttgatttttccgtatttgcaaagatatttaagtcagcagtagcatgtagaaaattgctagtaataatagctaataataatagctgttatttcccttttcctctttctcctccaccttagtaaataaaacctgccataaaactgtgatatggagaaacaaaattaccaacctcactaaagaaaacctcactaaaaaggaaaatctagcttatttaccccaatgtaactactgagggctttaaacaacttaaacgtctctgcaacaaattttgtgcaaacacctatgcttgcatctggcatttcccctccccgccctgcggaagtggcccagctctcagagctcctcagacctcacccccagggtcctggggcagcacagggtcctccctggcccaggcgcccggtggccgagagcctgcccgcgagctcaacgctgctcaacggtctctgtccttggctgtggctcctgcgctctggctgagccatgttccttctcctcgccctcctcactgagcttggaagactgcaagcccacgaaggtaagtccatgggagcctcccctttcttcttcgactttatagctgggctgggctcttactgggagcagtttcttgtcattctgggaccctccccctctccctt

SEQ ID NO: 40361 - DNA, 2300 bp, Homo sapien
cattcttttaaagttcgaaacattcaatgtaatgaaccatataatgggcaatgaattttctcttagtgaattgcaatgacttgaaattattcaaaatacaatctatgatcacaatggaattgagttagacatcaataaaaaagtaattaatacatgcttaaatatgtggcatttaaataacaccaataaacatgtggggcaaaaagaaatcatgatgaaaattagaaaacatttagaattgaatattaatgaaagtaaagtatatcaaaataaagtataagaatacaatggtgaagttaaagcaatgaatagatagaaatttggaaatacatggaaatttgtagtttaaaggcataggttaaaagaagaaatgtttaaaataaataatataaacttccaatcttagaagctagaaaaggaacattatgcccaaagtagaaaaaaggaaaagaacccaagaacaaaatcaacaaagcagaaaacatacaacagaaaaaaataaagaaatccaaaaccgagttcctgtaaaacttaataaaaattatacattccaagacctatttacccagtataaagagaaacatcacaaattatcaacattgagaatggaagaagagatatgtctgcaggtgctatagaccttaaaaagttgctagaggagaggaagtcattatgaacaacttttgtcaataatttaacaaccccaaagaaatggacaaattccttcagaaacataactttctcaaaccaacacgaaaagaaaaaaatatgaatattttaaagaaattagataaaaaagtaaataaatcttctcatgaagaaaactccaggtcataatcactccatttctaaatgctaagaaacattaaaagaataaatattcacagcattacactatttcaaagattaaacgaagagataacatttcttaatttcttttatgagggcagcatgtcttgatataaaagttggtaagttcattacaatgaaggaacattacagacaacacaacaacacaacaaggcattgatgtgtacgaagtggaattttcatatacttctggtgagagtataaattagtacagtcttggaaaacttgtcggaagtatctaccaacacataccctgtgatccgacaacttcactctagaaatatacacagtagaaatccttacttattacaccaaaaggcatgtagaagaatgtttatagctaaatattatttttaatagctggaacaataaacaaacaaaatattcattaacagtaaaatggaaacacaagtggtgttatatttaatgaatttgtaatatacaccaatgaggataaaacagaactattgctttgtatgaaccttacaatcatcctattaaaagaacccagacatgaaagagtagatggtgattgcttctacttgcgaaaagttcaaaaacagacaaaacgaatctttggttgtttagaagtcatggttgtgaggttggaatctggggatttgggtggttctttttcatttcttcatcgtggtactagttacgctgttttttttttccacttgaatattaattgacctgtgaacttatgatttattatatactttttttcgttttttgtttcgttcttttttttttttttttttttttttttgacggaatttcgctctctcacccaggctggagtgcagtggtaaggtctttctgctcactgcaacctctgcctcctaggttcaagcgattctcctgcctcagcttcccgagtagctgggatttcaggcacccgccaccatgcctggctaatttttttttgtatttttagtacagacggggtttcaccatgttgcggaaactggtctcgaactcctgatacgtgtttatatatattcaattgaaattttacttaagaagtgtttataaatcttcctgttcctcagctgttggaagtgattttgttgttgctgttgccttaattaggcatcacgtccagtggagtgcttgtcctgcaagagacagggctcaggagctcgcacgttccacagcgcaccacacccaacctcagcccacctgggctctcccagccgcctacctcttccaggctgcgtggccggggcgtcatctcgcgcttccaactgccctgtaaccaccaactgccattattccggctgggacccaggacttcaagccatgtggcgcgtcttgtttctgctcagcgggctcggcgggctgcggatggacagtagtaagcagaaaaacccctcctctggccttttgggaccctcagcgctactctccctttgcctccaagttac

SEQ ID NO: 40362 - DNA, 2300 bp, Homo sapien
ctgaatcacgttaattccctttcagagatatcatgaaagtttcctcataagccaattataaaagtaaaattagttactacaagcaaagtttttagaaaattcctgactctagtaagtgcccagaaaaatttgaatgtaattgatttgcatgaaaaatgctgtaaaacataataacataaacgttaatggtgaattcagtgatgttggtatttccatgacttttttcattctccttacatgctgtaaattattttttaaatgaaaattcttttattaaaaaaagctacattttataaattagtataacataatggtaaagagaaatgtgaatgtattagaaaagatgctccattgagaggagacacatttgtatttatcatgaccttgaatgaaggtccctctgcagatcctatcataatagtccttgtgtcagtgaagtcccctgtgaaactggataacaggattttaaggtagagatgttcctcaggcagatggaaatgtagtctatagctgtgaagataagtcaggcaatgaaataattatagagaaaaaataatgtaagctatcaaagacagatgtatacaagggagacagagtcacataaagtctcagatgtaggaggccatagagcaaaacgctgagttctggctttcaggagttttctaacataacaacctgatcaccagttaaaagctaaggagaaagatgaagaatcagtatgagatcataaaattatgatgctcttctaaaaatatgcgaaatgaggtttttagggaggtgtaggtatggctgaagaaaatcaaggtgaatgaagacaagatcaattgagaatgtagtttcagaaatagcaaagaagccaaagtttgaggaagttaagtggctagggataacattgaggcactaaagcattattggttctgcagtcaagggtaggatagattgttttttttttttttgagacggagtctcactctgctgcccaggctggagtgcaatggtgcaatcttggctcactgcaacctctgcctctcgggctcaagcaattctcctgcctcagcctcccgagtagctgggattacaggcacatgccaccatgcccagctaatttttgtattttcaatagagactgggtttcaccatgttgcccaggctggtcttcaactcctgacctcaagtgatccgccctcctcagcttcccaaagtgctgggattacaggcgtgagccaccacaccggggggtaggatagatttagtgagatgactggataaacggaatcaagaaaaagctttgtcaaaaacttatgcttcttaaaaacttaatcctgggacagaatcatctaaaacgttgttccatgtcttcactttgactcacccataaaaacttcaagtacaaagaatgaaaaataaccacatattttctaatgctcaatattttatttgtagtgttgttttctatatagatatgataggtcttcatgattttttgtttgttttccttgaactgattcccaaagtattagcctcatgaatcatgtagtcataagaaacacagtcattgtattctctttgctgtataattttggtttcagttttccttacatttcctattcaaggaacattttcctgtaaaatgacaggttgaagaaaacagccataatttagtagagaatagcgcgagagctattctagactgtaacgaaagccatatgctatcacaatttaatttatttcaagtactaataagctgatgacaaaacagcgatgtcttttagtttactcacacgaactatttctcttttctccttttgatcatctagaggaacgggcaacttggtttcttctttagcttccttgttctcattaagattgaacaatgcctctaaagtgaaccacagacttgcatgcaagctgaaaacctttaccaaatgcagtcttaatttgtactttgagaaaaacattttcaaggtattttatccttttctccaacttttgacatattacaaagtacccaaatatgccagactgttgcctcatcagccccccgcagtcaggtacagttagatgcaaggcaatcttcctaaaagttacttattagagatgtgagaagggcaaatgctatcattggaaaaactgacaaaagtcccaataggaaaaataaggaagtggagagttactatgtttctaatttttcatgtgcttctatttttttcctacttcagagccattgactaatagttgagtataacacaggttgtgtttccgggctgctgaaacatgacactaatattttcaaagaactg

SEQ ID NO: 40363 - DNA, 2300 bp, Homo sapien
aggcaatgaaataattatagagaaaaaataatgtaagctatcaaagacagatgtatacaagggagacagagtcacataaagtctcagatgtaggaggccatagagcaaaacgctgagttctggctttcaggagttttctaacataacaacctgatcaccagttaaaagctaaggagaaagatgaagaatcagtatgagatcataaaattatgatgctcttctaaaaatatgcgaaatgaggtttttagggaggtgtaggtatggctgaagaaaatcaaggtgaatgaagacaagatcaattgagaatgtagtttcagaaatagcaaagaagccaaagtttgaggaagttaagtggctagggataacattgaggcactaaagcattattggttctgcagtcaagggtaggatagattgttttttttttttttgagacggagtctcactctgctgcccaggctggagtgcaatggtgcaatcttggctcactgcaacctctgcctctcgggctcaagcaattctcctgcctcagcctcccgagtagctgggattacaggcacatgccaccatgcccagctaatttttgtattttcaatagagactgggtttcaccatgttgcccaggctggtcttcaactcctgacctcaagtgatccgccctcctcagcttcccaaagtgctgggattacaggcgtgagccaccacaccggggggtaggatagatttagtgagatgactggataaacggaatcaagaaaaagctttgtcaaaaacttatgcttcttaaaaacttaatcctgggacagaatcatctaaaacgttgttccatgtcttcactttgactcacccataaaaacttcaagtacaaagaatgaaaaataaccacatattttctaatgctcaatattttatttgtagtgttgttttctatatagatatgataggtcttcatgattttttgtttgttttccttgaactgattcccaaagtattagcctcatgaatcatgtagtcataagaaacacagtcattgtattctctttgctgtataattttggtttcagttttccttacatttcctattcaaggaacattttcctgtaaaatgacaggttgaagaaaacagccataatttagtagagaatagcgcgagagctattctagactgtaacgaaagccatatgctatcacaatttaatttatttcaagtactaataagctgatgacaaaacagcgatgtcttttagtttactcacacgaactatttctcttttctccttttgatcatctagaggaacgggcaacttggtttcttctttagcttccttgttctcattaagattgaacaatgcctctaaagtgaaccacagacttgcatgcaagctgaaaacctttaccaaatgcagtcttaatttgtactttgagaaaaacattttcaaggtattttatccttttctccaacttttgacatattacaaagtacccaaatatgccagactgttgcctcatcagccccccgcagtcaggtacagttagatgcaaggcaatcttcctaaaagttacttattagagatgtgagaagggcaaatgctatcattggaaaaactgacaaaagtcccaataggaaaaataaggaagtggagagttactatgtttctaatttttcatgtgcttctatttttttcctacttcagagccattgactaatagttgagtataacacaggttgtgtttccgggctgctgaaacatgacactaatattttcaaagaactgtggaagcctaaaaggaagccaatgagaaataactaaatgagagtttaggactgcagccttcattttcattcaaagatttaaaagtttccataaagtaaaatgttcttctccggccacctgttttcatagttctgtgttttccttcaggcctttctggcttcctatatggcagtaagaaaatgatgtgcttaatgattacaaatttcatatggaatacgaactttcagtttgtacatatgatgcacagagatgcttttgtggttttattggttttcatattacaaacaaagaaactagaaaatgaaaccattccaaaagtggaagtaatttctcactgcccctgtgataaactgtggtcactggctgtggcagcaactattataagatgctctgaaaactcttcagacactgaggggcaccagaggagcagactacaagaatggcacacgctatggaaaactcctggacaatcagtaaagagtaccatattgatgaagaagtgggctttgctctgccaaatccaca

SEQ ID NO: 40364 - DNA, 2300 bp, Homo sapien
cgattgaacccaggaggcggaggttgtagtgagtcaagatcatcctactgcactccagtctggcaaacagagcaagactccttctcaaaaaaaaaaaaaaaaaaaaaaagaatgaaagaaagaaattcatagtggtgtatttcttcacatggttgttttccataagtaaggataatttagcttaaaatatgtatcgttttcatatcaaggctcaaaaaagtattctgtagctcttgcctcatataattcagttttgcatattaaatgttgaagttatttatgtatcatttaatcctattttttcactctactatattaaatataatctcacaaggaaataagatatatttttctcggttcacgccactctgaacttctcatgccctttaaacaagagctagtgcagtcatgcagttgtaatggttggaaattaaagtttgctcatttccacataattgttttatgtcaataaacaataaacaattgaaaagttagaagttcacacaagccaaaaatttttcatataaacatacacttaatggtttataagattcttgccaaatatgagacaaaatggcccacacaggcagaaattccatctctagatcctctgggaaacagcaaacttatatttagaactcacaccatcaattactgctcctaatggtctttatataagtcatttaatcttcaaagcaattctatatattattactctcctcattttacagatgcagaggccaagaaatttgttcaagaatatagcaaggaagagacaatgctagggtataaatttgcatagtcaggctctaaagatgagctcttaattactataatatataggaggcaacgtatccagcttctgtgggaatacctctagagaaggggatgtcaataacacatatacagctcaactcccttttgcacagacactcactctttcagttgcttgacatttaaatatcaataaaaatgttttaactttctctaatctcaattagcatacagagacaagacatcatattgtgtttctttgggggtgattacctctgtaatcgttagactaacaagaaaattgtgtgtgatagaggcacaaaatagaaaatgattctttctgtttgaaaagttgaggaatgttttttacaggaggtaagtttgatacttaactttaaagttgaattgattggtgtaccttcattgaaaattttctcctgaatgcccagcattaaataaataagcaaacatataagttgcttgttgacctagcctcatatataatgcaagaagtaaacataaacatataaatgttgtaaatgagcatcagaatcatctaatatatagaatcttctgggagagctactttttaaaactataaattaatgatgatagctaataattacttaattctttcatatgcctcttactgtccaaaaagtgtcatatacattaatcacttgatcaaaacaatgaatctagagacaggtactattactagtacttctttttcctatatgggaattgatacccaatatagttcagtagttttcaagagccacacagctatgacaaagtaaaagattgaacccaggcaatctgactgcagaatacttcaaaccgctacacaatacaatctcctctcttggaaaatgttcttttacaagggaactaggttccttttgaactttgctatcacagtattggataattgactgcgcaagtctctcctcaaattcccaactcatgcatgactttttattacgttgtagcaataaaagagcagtggaggtggggtggaagaagactcatttttgtcttcattactgctatgtggagcaagggcccaagcttttaaaaacaagagctcagagacatggccctggccttggaagatgccctagagacgctgaggtggttgtacttttgccataggagtggcagccagagaactgagcccaatgaatgcaaaggctggtgcctggaaatattgtgactttgccacagaaagaagatggagaattttaaagttggaaatctgcctggtaagggatcatttgctggtgtctgcaaagttgagtccatacacactggtttggaaatttcagtccagatgatagttaagaaagcagtaagaatacagagagtccacaatgagatgaaaatgcactgccagttgaaacatcctcctacactggagctttataaatattttaaagacaaggattggattagatttgacattagaaatgtaccataatacagaaggcaatggacacctaaagaacagaatgaaaaccttctta

SEQ ID NO: 40365 - DNA, 2300 bp, Homo sapien
agctgagtgatgagtaaataagtgtttacttatgtctactctttaggttgtaaatagatattacatgtgtttatattcacggtgtacaaattcatgaaatgcttctaataaataggaagttataagatgcatttcaaagtgttcagcagaaaatagtgcaaacatgttgccctgaatcatgttgcagattctaaagaaatgttcacaatggttccgagaagctcctcaaactgcatttttgcttttagagggaaaatcacatatttggccctcccaaactgaggccagagactgtcaaaatgttagctgagtagcattaagaaaagggctgaaggtagagtacctttccattttgatggaaacccacaaattagtatttctgtttttagtccgatattatttctattaattcatagacttttaatacacctgtcatcagggacaaataattttgtgctcatgtcctcaaagtcatttacaattcagaacaaattgacttagaaataaaatgtgattaatattttttatttatttgtgagaaaagtattaataattttctaataatgtatctttcaaatgtgtctagacgtaataaaaataattatataacactcaaaataaattattaaacaacaatgaactaaaaaaaattttagaacatttatatgaaagattaagatccataatacaaaatgtattctatgaaatcagtaagatgaatgattgatggggaaagatgggcaaataatataagtagttaagacagtgaaagatatttgaattgatgataaacaggcaaaaatgctcaatctcaagaataaaacaaaaatgccaatgaaaacaatgaactacctggtttcggctaagagagtgtcaataaatttaaaatgtacttaataaataactgctgttataatgctcacctggttcttgttaaaaagcaacatctcaaggctgggcataagtaagcctagcactttgggaggccaaggcgggaggattgttccaacccagaagtttgagtttgagactaacctgggcaacatagtgagacccccatccctacaaacaattttaaaattagccagatgcagtggcacatgcctgtagtcccaggtactcaggaggctgaggcaggaggattgcttgagcccagaagttcaaagctgcagtgagctatgattgctgtactgcactccagccagggtaacagagcaagatcctgtttctaaaacaaaacaaaacgaaacaaaacaagtaacatctcaacagtactccctccttccagctgtgcctcccctgcaagcctagggcacattctagttgtgattctgaaagccaattttatttttatttttaatttttgtgggcacatagtcggtgtatacatttatggggtacatgagatgttttgatacaggcatgcaacatgtaataatcacatcagagtaaacggagtgtttgtcacctcaagcatttatcctttctttgtgttacaaacaatccaattacactttcagttatttttaaatgtacaatgttattgtagcctcctgttgtgctatcaaacactagctcttattcattctatctagctgtattttagaacccctggggatggtgaatgagagctcatttttgggaggaagaagtgcgcagtctggccatggggaggacagcgggtgaaggaccagcctgaggataccccaacctcaacccgggcctgcgctggaggagccccagctctgtgcccacgtggcggtgcctggagattaaaaggacaacaaaaacaccccctgccgccctcctttctggcgcttcggacccgggaggggaccacccgggaagatccagatcagtctgtgtctagagctggggagtgggctggggcgaggggaagaggcgagcagaggggacgcgcctggtagccgaattcagaggccgctgctgtcaggcagggcagccccgggcagcgcggagaaactgctgatacttgtttaccaagtgttgctttcaaccatgataccgcctttacgcgtcacagtgatgctgtgtcttccccattatggcaacagggctataggcatggagggcgggggtggagggggtgtgaaaagccccaggcagcgtcaggggttgtgctcctgctcctgtttgatagagagaggaacacccaccgcacagggctgttgcagggtcagcgatagcaagcaggccacagtgtttggataagacaggcttgtaaaagttgccatgcaagactcctaggaaataagtccgctcagtcctgggagttaagt

SEQ ID NO: 40366 - DNA, 2300 bp, Homo sapien
gcataaaaaatatactagaaggaaatgtgcctaaaattcacagtctaaaatttaacagtgattgcctcttccttgtatagataagggatttttttttactgtattttccagtctgtacataataaaacaagtaatgtgcaatgcaaacaaaacaaaatgaaactttatcaaatttcagtaactccttgaagtttaattttttttttgagactgagtcttagtctgttgcccaggttggagtgcagtggtgtgatctcggctcactgcaacctctgcctctgggttcaagggattctcctgcctcagcctcccgagtacctgagattacaggcacccaccaccacacctggctaatttttgtatttttagttgagacagcgtttcactatattggccaggcaggtcttgaactcctgacctcaggtgatccacccgccttggcctcccaaagtgctgggattgcaggcgtgagccactgcacccagttgaagtttaatagtgtgaaaaaaatatttctcatctcactatatcttctatgggaggccagattgcagattgtctacagaaaaatcccttcaaaagaccttgttattacatagactggagctcatggggcaggtctggtccacacatccttaggctccgcttctcctggaaaacaaaaatagcctctgatccagtgttgcctctcccatcaccaaacctcagcttctatcgccaaactcatcaaataagagtgtccagtagaaaaactgggcagatgggggcacagaaggtgaagacatcatttcccaagctaatgttgctgctggaacaatgtaagtcttgactttgtcttggtttggtttggtttgacattggtttgtttttcatctttgtctcatgcttaaaatgtgaagggcaaatatgatccttagagttaaggttttaggttttgtagatgttttactccatttaaatgacagcagatcatttagaaatgattcctctgtaacagccttccagatcccattcgattgtacagcattgagatagatagatagatagatagatagatagatagatagatagatagacggaatttggccctgtgttcccacccatatctcatgtcaaattgtaacccccacatgtcaggagagggatccagtgggaggtgacaggatcatggggttggatttccccaatgctattctcatgatagtgagttctcacaatatctcattattattattattattattattattgcaacagagtctcactctatctcccaggctggagtgcagtggtgtcatctcggctctctgcaacctcttgcctcagtctcttgcgtagctgggattacaggcatgccccgccatgcccagctaatttttgtatttttagtagagacggagtttcaccatgttggccaggctgatctcgaactcctgacctcaggtaatctgcctacctcgctctcccaaagtgctggaattacaggcgtgagccactgtgcctggccagttctcacaagatctgatggtttaaaagtgtggcacttcccccacctcctgccgccatgtaagatgcttgcttacccttccaccatgattgaaaagtttcatgaggcctcctagccatgcttcctggtaagcctaaggatctctgagtcaattacacctcgtttctttataaattacccagtctcaggtatttctttatagcagtgtaagaatgaactaatacacacataaacagattagaggcagcactggcctgagttgtgaaactcttcccagcctggtcctgcgattagctggctatatgaccttggacaagctgctttgcttctctgggccatggtttcatacctgcaaaaaaaagagcatggacttggctgttgcctgggtctctctagccctgtggagaatcagctacatctcttactaggaacttctcattcagccagttattccactgcggagatggtccaggaccattagggccatgctagacattgggaggctgcctgtcaggtgaacatgaaattgaacttatctgttctctttcctccctgaatgttgctgaaggtagatgcccatcctcagggctgtcttacggagaggagaaagttgtgcagtgattccaccctgcagttatctaactcggcagggaactctgggcagtgagtactcacggtacagtctccacacctctaatcatgtgctcctctccttcccaaggaacctggagaccatcatctcatttcctgggggagagagcctgcatggttttatactggtgactgctttggt

SEQ ID NO: 40367 - DNA, 2300 bp, Homo sapien
gggctcttctggaacccttggaaaaactggaacacacatgagctgcatggttggagagttgaccactggcacacctggaaatgtctttcaaggaggcatccttcagaagagatcagcctgggctcctgtttgttattcattcctcgcatctaatttttcagcaatcgtcttagctttaccttcacaatatgccagaattggatcagttctcactacctccacattctccctagtggaagccttcatcctctctttcttggattattgaacatctcctgactagtcttcctgctccccactccctgcttgcttccctgaaatctattctcttctaagaagtgtcagtaagcttttaaaattataaggaaaaccatgccatttctctgctccaaattctccaaagcccacctgtctcctaacagtgtacgagctaaatccacaatcaaagcctgtgaggttgcacacagcctgctcctgccctctttccactgcctactcgcccttacctcatctcctcccactctgccctgctcactctgctctgaccacactggtccctggctgttctccatacactctttgcacactcttttcttcaaccttctgcacttgcttctctggcagcacccttcctacagatatccatatagctgactgcctccttcaccaccttcaagtctttgcacaatgtctcattacaagaagctgtgcctgaatatcctaggaaaatctcaaccctctccttccactcctgtacaactctgcttcatttttactcataatattccttactctgacatgatatatattataaatgtatgtttctattgtctatttcccagtagaacataaacttcattaaggtaaaaaagggattctttgcatggtttggttaggttggttttgtttggttttctgtttcatttccaatgcctcaaaaagttctggctaataacacacctttaataaatattgattaaataaatgagtggataaacgagtaagtgaatgaatgaattaaaatataaggagagtctctaacttaatttcctagtgaggtaccttccccacggtgtctccctttgcgcattttctagatcttacttgactagataaaaagaaaaacgaaaagacctgtcctgctttcttaaaggactagaaagcggaccaggcgtaagatccacaaagagaatctccaggaccctttgaagctcacatttagcatatgacaactccataggtcagtgaggacactggctggcttgaatattgtggaagacaggaagaacacatttatatgcttccaaagaagttattgctctatgtctgggtaatgccaaaataaatttgaaaacaaaagatcacctcgttcattttgggcactgtgcacgtaaaacacttgattaacttttcctgctggcttttttgatagctattgttgtggatgtatacacaagcctaaggagatagcctctactattcatattattactacacccaaattacaatggtcttcagtgacacttagcacttgtacacaatctctgaaaagtcaccgtttcaagctgtgtcatgtcagcgttttgtatgtaaaatcccatcctagaattgatcacaccccaaattattatccttgattgctcagctttctctcagtagctctggagttgcccctgatatggatgtccaaagggcactgatgtggactgccaaatgtttgcagtgcactttaattacttctctgcgaacgaaagctttcctgtagttagcagaaccccttgttctaactgtcgtttgggaagatttgagagtctaagcaacctcgtttatgtcttatctttgcattttcctgtattcagctattttcttaaaggaaggcccaggtctgtattatcctactgccacataggaagtaaaatgagtactcacagccttgcgcctaatcactgaacacagcttttagtaatgttttacacaagaacaggatattggcaactcaactgttaagcctttctgtgattattcttccttgagatcactctgatgtcaccagtgtaatttgagcctggagcttttgttcacactttaaatagcagtcccagaatgatttcactacagactctctggaaagcctgggagctgaattccggaagatccccacatcgatgaaagcaaagcgaagccaccaagccgtcatcatgtccacgtcgctacgagtcagcccatccatccatggctaccacttcgacacagcctctcgtaagaaagccgtgggcaacatctttgaaaacacagaccaa

SEQ ID NO: 40368 - DNA, 2300 bp, Homo sapien
tcatctgaaatttgatattttaaaagctttctttaaaagacgcttttataattctctcttaaaaaattcagcccattttgtcctttgccatttttgaattgggttataggtcttgtacttattgatttataaaagctctttcattttagaaacattaataataaatattttacctagttaagaaaatttagctgccaagtgatgtcttttccatatggtgacaaatacattaaggagaggggaaggtcaaaatttgtgctttatgatttcttcttaatttttaaaaatttttaattttatgggaacatagtgggtgtatatatttatggggtacacgagatattttgatacaggcatgcaatgtgtaataatcacattagggtaaatggggtatctggcacctcaagcatttagcatttccttttgttacaaacaatccaattgtactctttcagttattttaaaatgtacaatatgttttgctgactgtaataaccctgttgtgctgtcaaataccagatcctattcattctatctaactctatttttgtacctagtaaccattccacccccgccccttcctagcctctggtaaccatcattctattctctctgtccatgagttcaattgttttaatttttagctctcacaaatgaatgaaaacatgtgaagtttgtctttccatgcctgttttatttcatttaacagaatgtcctccagttccatccatggtgttgtaaatgacaggatctcattcctttttatggctgaatagtactccactacgcatatgtaccacattttcttcatctaatttatctgttgatggacacttacattgcttccagatcttgtctattgtgaacagagctgcaataaacatggcagtgcaggaatctcttcaagatactgatttcttttttgggggtatatacctagcagtgggattgctggatcagatggtagctctatatttagttttctgacaaaccccaatactgttctccatagtggctgcattaattcacattctcaccagcaatgtaggagggttcattctcttttcttcacatccttgccagcatttgttattgcctgtcttttggataaaagccattttaactagggtgagactttatgatttcttggtgaacaaggaaaagtgtttaagctgtccccaccctttgatgggtatgttctctcttcacgtgcgtaggttgttgatgaaagtctaagcgattaatttaagccatgtcagaataaaccaaagtgagggtcccagcagaatcattcactctagaatgctcggctttctggacctcccagtgagaacagtgagaaactccagagttttatggattttaagaatagctcttctgagactctttggacagggtgcaaaggaaaattgtctcctcaggttgggggatgagggggactgtgagataaagtactgatagataaactccaggtatgcacctactatgctccccaagcaatctgccatgtccttcacatgtcctccagggtggccctgtgaaaagcattactccatcccttcagccctcaaccttgctcggctttctagagtctgtctcatgccggcagacaccccatagttattattctctctgccctcagcaacatttaccagttagggggaaaataaagccagaaaattgttgctatgggctctgttttgtggaagttaaaatgctagagcaagaatctgattgcttgatagctccatctctctctctctctccctcctaccctcctacccccccacagtttctccttcttttcctctcccctccacctccttcccccaccccgctcccccacattttcctactcctctcccctctctccactggcctcccggtcctgcccccacattgggctggaggagagccttacaggttgtcaatgaaacatggaattatttcctttgatggcttagataatagtaggagccaaagcaatgagtgaggtcggctgaaaccaatgcagtcctgcccgggactggagagccaatcgcaagagcagagggcggggcgtcggagccagcagataattgctaagtgcatcgctagcacagttggtccgagctgccgaaaggtctggtcgcagagacaggaacgtgtaatcctcagcgtgctccagcccacagcttcgctctactgctcggcagggcagctggcctctgggcaccggcggcccctctgcctcgcggaaaaggtacctctgcctgcgtcccgggggtgcagcgcctgcgtctccattgccagtggctttg

SEQ ID NO: 40369 - DNA, 2300 bp, Homo sapien
gcgcttctggccgtgggctcggccagcgagtacgactacgtgagcttccagtcggacatcggcccgtaccagagcgggcgcttctacaccaagccacctcagtgcgtggacatccccgcggacctgcggctgtgccacaacgtgggctacaagaagatggtgctgcccaacctgctggagcacgagaccatggcggaggtgaagcagcaggccagcagctgggtgcccctgctcaacaagaactgccacgccggcacccaggtcttcctctgctcgctcttcgcgcccgtctgcctggaccggcccatctacccgtgtcgctggctctgcgaggccgtgcgcgactcgtgcgagccggtcatgcagttcttcggcttctactggcccgagatgcttaagtgtgacaagttccccgagggggacgtctgcatcgccatgacgccgcccaatgccaccgaagcctccaagccccaaggtaaggctgcctcctcccacgtgcgcgagccgccccctccatcccccggccggagctgcaggagaacccgcgccaccctacgcccgcccgccgctgggtcccggtgctggggactgagggcccgaggttgctcgcatgctgtgcacgtgattcctaagcgcgtctggtctgtcccaggtatcgctcagcgcccctcgcgacccaggtgcacggcggggctggcccgggagcggcagctctgcgccttggcctcgcagggactcgctgtggtccccggagccgctcttcctgggatccaacttcgcctttcccatacctgaaacaaagccttgcgctttaaataacaggggagcttccctctcctctaggaggactccgagtccctatcgaagtttttaacctctgagacgggaggaaaaaacaaaaacccaaagcgtagaaagttcagaaaggccgagagaatgcttggagcagcttttgtttattttcataggttcgacaaagatttaaaaaataaaaccaagccctttccttcactggtcattcagtcaagtagccttgggattgctgcaaaactggctgagaaagtttaggaaccgtggggacttctgtttctccaccccttccaggtaccagctctgccctcggagggctgggggtggaaagtcttttctccctccctctagcgtaccccctgcttttctcatttacacaaatcctcagctcattagaaagataaaaatgtaattagctcattgttcatctcctcccggggagagcagctctgcaaaatgcagactttcctaacagcctgagggaccggcccgaggttcctctcaaaacccccttatgtttaaagagcaattcttgagggggaagaaaaaaaaatcctgggaagtcaaataaaatgaaatagatataaagataaaatatacacatcacagacctgacttctatagaagtaaattcaacccagaattctttagaagcgaagtttaggctctgaggtgtggagagggtcagggattggggagctgtaccccagctgcgcttagcacagacgcaggcttcctgagggctttttgaggagggcctttagggtgggggagaaagactgcctacacttagctcaccttaaagtgtctttaacctctgttattgatgctaaaagaggggagtgcagtcacctggctcctcagagtgaggatttgggcaggtgggggaaagggataccccaaattttagatgcttttgcttattctagggagggtggagatgggtccacagtgactgtcgttggatggctggatgggaacggcactgattgcccgcagtggccaggtctgggcaccgctgctctcagagtcaactctggtgttgggagtggagtgagggtagcggatgcatctgcactttgtgagcgagaactgagcagttacctggagcaaacaaagcgccttgtgttctgttggcttgcacccatcccctgcagcctgcgggaatttccttctccccttcctcagccagcggggattagcccagccctgccctgtgaggctgtgcccagccctgacctggagtccattcccaatggcttccgatggtctctttctgggaccgtctgcagacatgagtggacaccttagggggctcggctgcggaaaaggtgctgcagtccacagggaacatggggggattggacgggttgcctgaagaagagaggaaagaatccctcaccccagcccccaaaaggctgtgatgggatggggaaaccccataatcgctgtcttccggacaccttttgccccttggctgcagttccact

SEQ ID NO: 40370 - DNA, 2300 bp, Homo sapien
aactgaaaacgtgagtgagcggtcagctaagcctgggttcagaggtgagaggatgttatctgcaaacatccatctttgcagtgagcaaacagacgcatttggcttgaggtggagggcctggccctaggagacaaaaagaccccctaccaaacagcatttttctctaaatgccccttgaattgagacacagttgccgggtctcctgcggtcttattctctgtgaggaatgtcttcctcagctccacaggccggcctcaccaattgtcttgggattaacccttggccatcccgatcttgctctctcttctctgtgttttccttccagcctccatgtcaccttttgagtgtcaaggcatcttccattggccacgaaatgacagagaagtcatccatctgcagaagcctcctgtgtgcaccgtggaatcaccgtgtctgtacgggcacgaatgctttaagaaaacagccctgcttcttcacaaactctagtcatttcacttggaatctgtccatcaagaaattaggtttgcagagtccaaagcaagctccctagagctttacaaacaagctggcgggcaaggcagcgcgccctatagtgtctctgtggagcgctaagatctgtgacccctttgccacatggggtgtgcgctcagactgggctatgaatatatcagcctctctccacccgcacttagggacagaagatatggagactccaggaacttcatgaactatttgctgtggtcttctgtcccgggatagtccgggtctcactcccagctctccagagcttaaccctccctctcaggggaatgtttgaaacctacgaagaattctcaggaattcgaggtagaaggtggcagagagacttctgttcctgggggccgagctgttgtgctgataccgtcctcttggcgtctgccctagtggggacccttgattttaacttgaagttcctggactgggtctaaccttagcatgtgtgcctgagtgatggacttggtatttacaccagccacgctgataagtgcacatgtgtttttaatgttttggctttccacaccacaaacacacagatgtgctgtcgcccgggctaggacttgagtagggtttttctatttaaatatatattatatatttaaaaaagtgtcctcccagagctaataccgttgctagcagctcttcctgccgccacaccgggcaaagtccacccactgccccagtgttgagggccaccatgggcggccccacctggagaggtgctgctcacagcaaacagctccaactgcgccttcgcctcgccttccagggagcccagccaggcccactgggtatttacaagcagacctccctcgcttcagccttcctgaacccctgttagttgggaaaccacctgtctgcaccgcagctagagaaccgaggagaggagccgctagtctaaagggctgttggttgaaattaggaagcagtgtaaagaaaaagaaaaaaaaagtttgggaggccaaggcaggagcatcacctgaggtcaggagttcgagaccagcctggctaacatggtgaaaccccgtctctactaaaaatacaaaaaattagcgggggcatggtggcacgcggctgtaatcccagctactcgggaggctgaggcaggagaatcgcttgaacccgggaggcggaggttgcagtcagcggagatagcgccattgcactccagcttaggcaacaagagcgaaactgtctcaaaaaaaaaaagtcttcataatttcatgggtttgcaagtatgatccaggctccccgcttctctgcaagccaatgcgagttaattacagcgtccgccctggtctctctccaccccacgccgtgatccattccccttctttttctccccttgtctctttcctcctcccccttttatttatgtatttttggttttgttttttaaggggtgttgagccgcgtctggttctagtaaaccgaacccgctcgcgagggaggcgattggctcccgcgccggtgacggacgtggtaacgagtgcggctcgccccgccgggagctgattggctgcgcggggcggctccgagggctcggccgtaggagccccgcgcactccagccctgcagcctccggagtcagtgccgcgcgcccgccgccccgcgccttcctgctcgccgcacctccgggagccggggcgcacccagcccgcagcgccgcctccccgcccgcgccgcctccgaccgcaggccgagggccgccactggccggggggaccgggcagcagcttgcggccgcggagccgggcaacgct

SEQ ID NO: 40371 - DNA, 2300 bp, Homo sapien
agtcttttcaacaaatggtacgtaaacaactgaataacaactgcataatcatacggggggagggaagagtttcactctatacctatgggaggcagaaatgccctccccaagaggtccacaccctaatcccctcaaacccctaacgtgttaagagagtaaaaagacaaatcacagactgtgaaaaatgcatgcaaatcacatatctgataaaggatttttctccagaatgtataaagaactcaaaactcaaaaacagcccggccaagttctcacgcaagtataaaggcctcaggaaaacatctttaaacatacaaaaatccaagaattaaagtgccttaaaaatttaaaactgaccttaagcccagccaataaagatgtaaatcaaaacaaaataaaacaaaaaacccctcaacaacaggaaaataaaatacaaacaaaaaaatgggcaaaagttttaaatagacacttcaccagagaagatacatggatggcaaataagtacaggaaaatatgttcaaaataattagtcatggaaaaatgaaaattatagctgcagaagatattactacccaagtcttggcaaagatgtggagcaactggaactctggtgggaatgcaaaatggtgtcaccactttggaaaacagtttgtcagtctgccaaaaagttaaacgtgtttttaccgtacaatctagccattctactcctaggtatgtacccaagagaaatgaaagcattaaggtctacacacctatgcaaagacttgcaaatgaatgtccatagcagctttatttgtaacatcccaaaactggaagcaatccaaatgtccatcaacagatgaatggataaacaaactgtgggatggccatacaatggaatagctatccagcatcaaaaataaatgaattattgataacacaacaacagatggacttcaaaatagtctatgtgaaagaagccaggcaaaaaaagggggtacacactatatgattcaatttatataaaattcaaggaaatgaaactaatgttgagtgacagaaggtggatcagtgcctgggaaatggggtctgggagaggcaggagggagagattacacaggagctggaggaaccttttcagggcaatggagctttactatcttgattgtgacagtggtttatgggtgtattcatatgtccaaagttatcaaatccactgctttaaatgtgtggtttattgtatgccatttatatctcgaaaaagctgtttttaaaatacagtaagagaatttttcatatttaaaaggcaggatatttaaactatattaaatatataaaagacagtggtactaacaggttgtattagcaggagacaagggtaaggtggggtttctttggctgccttgcaaagaaatgctgagtcaagtaagggccagtgggcaacgagggcggaaccacttgtccccttggtcacctgagggatgtggatgggagctgggtggaaatggggggtgagaggaacgccgcccccaaagaagagtcggggcaggggcgcccaacgctggggcccaggcaggttcttcgtcctcacttcctgaccctttctcaagagtctagggaccaaatggatccatccttggagcctgctttctacttctgaacacaatgagcagtttgtgtttgagggtttggggagggggtgttgttttttctttatgttttgttttttgttttgtgtatgagttgggtggcataacccacacgtaagctgcgacgtccaatcaagaacgaaaatgacccctcacaatcagtgatcgggaaccacctgccacaatcactagggaagtgacacagccgggaaactccgcccctcacacccccgcgcgctcgcgccggccgcagccccacagctcgccccggccgcagccccacagctcgccccgcctctctccttccggaaacaatccccgcgcgggcggaaggcggggtcggccctggccccgcccacatcatttcccttcctcggcccagccccacagcgcgcagcttcggcagggtggctttacggccggaggagagggtgggtcccagacctgaggtaggaggccgagctgaggggcggggaagaggctttttgcggcaggacgtaagtgacggcgaaggcggtgcgacagcagctggagggcagaggaggcgggtttgtgtttcccgggccgaaccgggttgtggggggcgcggggcctgggccaggcggcagctaaggcccgcggtgacagcatgggtgaaggggagcggggcagaggaggccttgggctgttttcggc

SEQ ID NO: 40372 - DNA, 2300 bp, Homo sapien
gatcacttgagcccgagttcaagaccagcctgagcaacatgatgaaaccccacctctaccaaaaatacaaaaaattagccaggcatggtacacacctgtagtcccagctactcatgggggctgaagtgggaggatcacctgagcccaggaaggtcaagggtgcaatgagccgtgaccgccccactgcactccaggctgcgcgacagagtgaggccctgtctctaaataaataaatagaaggtgagaacatagaccccacctcttgatggaggagtgtcaatgtcacatggtaagaagggtatgtggggtgagatccatattagagcagctatgtttgggaaacacactctgccacaaccaaaaaccactggattaccaaaccgttgaaacagaccttgaaataaccacctatttgccactcacaaaattcatttcataagacacagctcaaatgtcccttccttttgggaatcccgtgctgatatgccccagcttacacagcgctttgtaaagatgcctactctctcactcggcttattctattgtcattttcataacaggattgtaatcaggcaggtacgatcatactatattagccaatcattttactagtcaatcaatatgacatcatagggcagctttgcaaagagccctcagattgatggagaagagatacttttagggaagccagaagcaacgctttgcacagaaaacaaaggacagcaaagagaaaagaatcagcaactcagagaagaaaaactggatcacacaaagatggaaaaaatatatacatatacagacatgggtttttgtgcttttcccctccagaaggtgagttgaaagcattgccccaaagcagtgattctcttttcttttttctttttttttcttttttttgagatggagtctggctctgtctcccaggctggagtgcagtgacgccatcttggctcactgcaggctccgcctcccgggttcacgccattctcccgcctcagcctcccgagtagctgggactacaggcgcccgccaccacgcccggctaatttttttgtatttttagtagagacggggtttcaccatgttagccaggatggtctcgatctcctgacctcgtgatccgcccacctcggcctcccaaagtgctgggattacaggcgtgagccaccgcgcccggccccaaagcagtgattctcaaacctcagctgtgtcagggtcaccgggagggcctgggtctggtgaaatacccccagtttctgattcggtgggccagggtggggcctgagaacctgcattttcacggattcccaggcgatgcttctgctggtcgtccgatcccaggcttcaagaaccagtacccactttgtgaggccgaggtgggaggattgcttggatccttgagttcgagaccagcctggccatcatagggagaacctccccacccccaaccccgccacagttctttttttttttttttttaattaaaaaataactgggcgtggtggcgctggcctgtggtcccagctactccggaggctgaggtgggaggatcgctggagcccgggaggcggaggttgcagtgagctgtggtggtgccactgcactccagcctgggcaccagaacgagaccctgtctcaagaaagatgaaaaggaatatactggagattctgaaggcaatgaccacactgaccacaggtgaaaccccgcaaagacggaggaacccaaagagccacgagagctgtgggtggagacggcccaggaggctgcagcggcctgctttcaacagcatacttctgggtgggaccccccggggcggacaccgccgctccccttggccgcggtggcgggcgccccctcccgacgctcttgggtagtgcaacccggaccgcacagcggagcggccggcccccaggtgggcggggccaacccggaccagcctcccgccgcctcaagtccttgggttgctgggactgcaggccgccgcgaagacagtccccgcccgccgggtgggcgggcccaaggagaccgccccgctcttccccccgggccttgattggtcagcgtcgcccttgcgcgatgacgtcgtgcctgggcggaaactttgcgagagtagcgcgggagctgagaagttgcagggttgagttggtcccggcaagtccttgagcagtttgttcctctgtcttcccgcttcctggtgccccgactgcgtccccacgaacgccccgtccttaccgccggctgctgtggagtgcctcgctgtctcccaggtccccgagtgagcgtcgaatgggacctctgt

SEQ ID NO: 40373 - DNA, 2300 bp, Homo sapien
tgagaacacaaagagagtacagcagatgagtgggctacttccaagactggttctgggggcagaaaaggagaccagacgaaggactccaaagagcagttgagatcctggtggccactttaaatccctatccctagcactgtggagaacacaacacaaaaatgtatgatgtctggtttcttcttcttttttttttttttttctgagatggagtctccctctgtcgcccaggctggagtgtagtggtgcgatctcaactcactgcaacctccgcctcctgggttcaagcaagtctcctgcctcagcctcccgaatagctgggattacaggtgcgcaccaccacgcccggctaatttttgtatttttagtagagacggagagacggggtttcaccatgttggtcaggctggtctcgaatgcctgacctcgtgattcccccgcctcagcctcccaaagtgctgggattacaggggtgagccaccgcgcccggtggtttcttctcttatggaatttaatgtcgttgacgattagacgtggccatgcattactcaatcttgaattgggatccccaaaaaagctgggcgagtaacaagggctcaatgaatggataagtgattgagttaataaatacgtgatcagttccaaatgggtaacatttagttatatttggtggagataagtagtccagtgttttggagctaagtggttattcttttttttttttttttttttgagtttgggtctcgctctgtcacacaggctggagtatagtgccacaatctcagttcactgcaacatctgcctcctgggttcatgcaattctcctgtctcagcctcccgagtagctgggattacaggtgcgtgccatcacccccggctaaattttgtatttttagtagagacggggtttcaccatgttggccaggctggtctcaaactcctggccttaagtgatctgtccgcctctgcctcccaaagtgctgggattacaggcgtgagctacccgcgccccgctccccccaccatttttttttaattttcaaaatttttgtagaagtgggggtctcgttacgttgccccggctagtctcaaactcctggcctcaagcgatcctcctgctttggcctcccaaaacgctgggattactggcgtgaactaccatactctgccctttattcttacagagattttgaggtctaagaatgtggactttaaagatttcattatcagattatgcatttagcacggaatgacaatctgacagccgtgtacagcgtaaaccggcggagagggcttggcactaaaggcaaactgtcttttaagaacaggaaaaagaaaggtaatatatattttaaggaggtcccattttaggggagataataagcttgggttaggcgtccgaagtcagaagatatagtaagaaacacacacgcaaactccagcagccaccagctagacttgagtagagagagcaggtccaagtggaggtggaagttggaaagttgcatctgccaggcagggcgaaagtggcctacacccactcctggagcaccctgcttgacgagcaaggtagacgaggctgagggatactgctggtgatgacggtggtcgtggtgatggtgctggtagctaacagatcttgagcgtaccaggccctgagctgagtcctctaacgggcagaatgtcgctgcatacggacagcagcctcaagaggacaaggtgatttagtgactctagcctcttcccgcggtgccagcctgatttcaccctctccggaacacacaagcgaacctccggggagggagccagtatcgggtcctaacgcagggaagcgctccgctttctgagagggacgcgccagcggagggacagccagggcccggcctctcctgctcctgccccgccccgcccccggcagtgccccctagtccgccagagggcgactccgcgggtcgcccaacccgcgaccggtccacgcggcacccgcctctccctaggcccccgccctgccggcccgcgcgcgcccgacgggagcgtgcggggcggtgggcgcagggtcacgttgggcggcgcagacaaaggcgggcgcgcgcacgtcctgacgcagcttgggcccgcggcggcggcaagggcgggagggagcggtcgccgcgggatttggagctgcctagcctcgcggtcggtgagtaggagggagctggccccttacctcaaagtctccgacctccggggagccgagagcgggacgtgggagccgggcttgggcggccgcgcggggcctgcggtctgggacgccccggcga

SEQ ID NO: 40374 - DNA, 2300 bp, Homo sapien
gggtccgcatgagagggtcatgatcgattgagcaagcagggagtacgtgactgggagctgcatgcaccggtaatcagaatggaacagaacaggacaggggttttcacgatgcttttccatacagtgtctgaaatctatagataacacaaaaagttaggtcaggggttgatttttaactactaggcccatggcacgatgctgggctatctgcctgtggattccatttctgccttttagattttatttcttctttctttggaggcagaaattgggcataagacaatatgaagggtggtctcctcccttaaaacattgcgcagattttaaggcgaagtcagtacttgttcatttgttcaatttcttgtacttctaagtgtttggaatagcctgaaggtgattagtgtgaagccaaaatatttgccagagagacttgataggatactcccaagttcagggatttggaatgtgcgatgtaaaattggaatacttttgtgagatatttgaaatagtggaatttcacaatgagtggccagtgtggggagaggctggaggagtttaatctctatgtggaaaatatggcaaggtcttgcaaatttaaaaatgtgtattttcttttcctctgcaattccatttctaggaatttaccccgaaaatatatttgctaagcacattttgtgtactaagtcatgcatgtacctggttattcgttacaacattatacaaaaaaaaaagtaaaaatatcagtgtttagccttaggagactggtgaactaagttgtggcacattcttaagttgaaaactttgcacctgcagagtgaaggagctctatgtgtattgatgggacattcttctaagatgtgttaaactaaaaacaaaaacaaaaagcaaggtgaagaataatacgtccttgttgcctggcctgggggccattggtgacggagaaccattgtgatttccttgtttaagcatagaatgtcttgggaagaatacaaaggtggttacaacctttggctgcatctgtgcggaaccactctgagtatctgggggacaggaaggagatgtactttccatagcacacgctttttatcttttaaatgtgtcttatatacatgtattttatattcagaaagtttgaccaccgatcatatcatttgggttgaaaactgtgaaacctctatgtttccctcccacattcatgtctgccacctgttgggtctgcctggtctctttgaccttgatgacttgagaagcagtcattgaccacactgacagttttaggcttaccctaaaacagtccgcctggcccccagcatattgacatttttcctcttgatttgtgtgactgacaatgtttctgtttccctcccccagctttggcagcatgtaagcagctgtttgccaagaacccaggtcactgctaagaaagggtgccttcgggagaagagtgtccagaggataccaatgccagatgcatctggagttacactcagcactcgcagtatgagacattgtgtgccagcatctctttccttctggcaaagactgtagctctccaggtaggaggatcctggaagctgtgagcaccaggagccttgccagaggaggatggggccagatatgaactctctaccatgaacatggttctcggcttatgaaggaattttaagtaaaacagttatttaatttccacatattcaagtcaaaagccttctgtgtgaagtgccagtgattacccctccacaggagttatcaggatttttctggcaccaagtttaattcttcttcgtacttctggtagtgacagatctgcaggacagatttatctgttgaatgctcttgggcaggaaaaccatgtaaaacctctggaagcagcatcaggacagcagagcagagcccccgtcctcactgctcacttgcacagaaactccatctggactcggatgcttttactgaagacccatctagcttcaatcatctttagagtccatccattctggagagacctggcgtttgcagttgcctcctgtggccgtgtttttctgtcattctgttcccaggccttctattcaggcggttgaagggtgtggactttggaatggggtttgctgttcttcgggaacttgcttcctttccctggctggtgctgtcaggaaggaccatctgaaggctgcaatttgttcttagggaggcaggtgctggcctggcctggatcttccaccatgttcctgttgctgccttttgatagcctgattgtcaaccttctgggcatctccctgactgtcctcttcaccctccttctc

SEQ ID NO: 40375 - DNA, 2300 bp, Homo sapien
agggtgggcccgtgatgccagtcagggttactggaggaggtggcagggcaggtgaggctctgctgggaggcagggaggtgagagtttttggaatcttctccgtgccaccgaagccctgcccacgtcaggcaggggcctccatttctgtctgatctccgggctctcctacgccaatgggggcttggggccaacctagggaaccccaaaagcacacctgtccccccatttgctactctgccttgccggtcacagtgcctgacagccacccctccatgggctgccacccatcgctgtgcccctgggggtgaaggcctcctctctcagatcctgttttaggcttggcttcaggggtgctttaagcctcagctgactctctcttccctccatctccccctcccctctccacatcccacacaccacctcttcagtcctgaatgcaggtacacacacagggacatagccaagaaagtcagtggctaatgaaggcaaaggcagagagacttgaacatgatctctcaggagggctcttcctctctctgtgcctcagtttcctcacctgtaacttgagctgtcagactgcacagaacgaggcctgacatgtgggaaccactgcccacagctccttcccgagcctgctgccctggccaggctgggggtcagggtctctggcctctgtgccaggctctccagggtggttgaagccacataacttccaggcctggtgacatggggaagtggcagcttggggcgtcaggtttgcccctccctggtttcctggagacctgggaagttgagtctcaagagcaaggaagttggcggaagccgggggtggagggaattcacaggccctggtccctaattataggaggagggtgacctgaagggacatccctgggacagagagggaactcctgttgcccctcaggggaaggcaacatcagcgagtattgagaactttagacagagaggcatgaggctctgctgcccctaagtcccattacactagggcagctgccctctcggagccctgcccatccaggcggggcagaggtcacagtcactgttccccaatatcaagaatgctgctcaggggaaaggaatcttggtgtcctggaaacctctgcaggagggagaggggcaggcatggtggttgccctgccagacgtgcctagccgcagggtccccacttattctactaaccccacacttccttcctcctgccagccccagaccccctgagtgacagcatacacaagaagaagcacacccggcccaccttcacggggcaccagatctttgccctggagaaaacctttgagcagaccaagtacttggctggccccgagagggcacggctggcatactcactgggcatgaccgagtcgcaggtcaaggtaagtctgtgcgggagatggcacctgccctgcagggaggagcctgccggacaggaggccactgcgttggagagaggtggccacacaacgcagccccccagagggcagctgtcctggtgtctgggcactgcctgcctgcctaaccctggagcctgtggtaattaaccatagccgggaaaggctgagccccattctcagagccttatgtgcggcacctcatttcatcctctcagcaacccggggggtcggtatcatcacccatttcgcagatgaagatcagtgtctcccggctgggagagctgggagagctggcagagctggggttcaaccccagatgtgggggactccaacctgaggctttccctctccccccgtatttggccaaaaattccaagcacggtcggcagtctctggcccagattcatgcttgatgctccagtcagcaaaaggagctgacctcagtttaccaatccttaagatgaagacaacgtctccttctactaagcaggatcagatgggcttcaggggcctggagccttgtcgcccacgccagggctagggagggtgagcccaggctctcccactccacacgcaggggccccaaatgccccctaaatagacccggggaaaccggtttctaccgccttagagtctgggggcaactttccccactttgatgctggctcagtgactcggcgacgggcctaaggatgcagcaggggcagctggcacctgggtctaggctttgctcagggccctggggcctccccgagctccaacccgctgcgccctcctcatcagccgctcagctgccctggggcgagagctggggggaagaagcagacactcctgcatgtctttctgcttctggggtgcgttcctgccctcttcaactatcccaagcaa

SEQ ID NO: 40376 - DNA, 2300 bp, Homo sapien
tgttctgtctctgttttcacgcctcatccaggcatggtgcttcctcctctcctctccttcctctctttctttccttgtctcccttctttcctacctcaaccttagactccaggactagggtggctctggaaggaaggccctgagctgccagccatagaactgctaggaattcagtcaggttttatttagaatgctcccctgccaagtatgtgccccgggcagggccagcgcctgtgtgcactcctcaccacaggcggcccgtccgtttcttccatcaggccctcctgggcgcctagttctcctgctcccagagcacacatgatcttaactgggtctcttctcctgaatccctggggaaagagaaagacgcctacagcacttttttccactgcccctctgtggtcagcctttggtgaggggaactggaagggccttctagatcacacatccaactccctcaattataaatgagggcactgtggaccagaggagccaagggctttctccagggtcacacagtggaccaatgtcagggaccaggagggtccagatccctcagttcccaagccctacatcctcacgtccagcatgcacgtgcaaggccagcatgcccagcctggaactggagacgccgatcagagggcctggcaggctgctgccggtgcccatctcacaggccccgagggctgataaggatgcccttgaaggtgattgatggtttgcaaagcacccacttattagtatttccactggacctctgaaaacagtgatggagatagagagattgcatgtaacttgggacttgggaggtggcctgaaatgactgtgacccagctgatttctctgaggacttaggaggaaatatctgaagttggactcttcttgactgggccaaaaccagatgcttccccggcttctttgcacatacttttccccgtgctttcttgttgaaataagcagcattgtggagtgagaggcatttggaatgtgactcctccgtttacttactcctccacctaggcagaatactttgcttctgtttcctttgtgtaaaatgggaagacgatagaacctccttggttaggactgtggtgaggtgtcagtgaattaatgcgaaatccacatagaaccatgcactatcacaagcgtttgccattatcattcatagtgttagcattcataagcggcatgattgtcccagcagccttgagaaagggtggggagagcactttaatccgtgcttcacagatgaggaaactgaggcacagagaaggtccccagccttcccaagaccccacagtaggtgagttgcagggttagtctgctgtgtcccagatctgtgttctttctgccatgctgcattgccactcagagaggaacaacctgatctagaaagtgaaattttttccagccgcagctgctgcggctacatttgtgaatcagctctgtaaatacaagtttaatacgcgttgttcctgctcagtgggcgttgatagcccagccctggaagagcctttaagaacaggccttaaatagacacaccagctccatgcttcagttttgggaggctgtaccccataaaggaagggtgcaagggcctgtgggctgacaggaattacagaccggcttccaggtggccccaccacctgtgctgggcccctgctgggctcacttgactgtccctgagcccatcactcacccttttggagcaatttttgaaacagaccgctaagtacccagggtattagctggtctcatccctaccatgccggggaacagcatttggatcaccgcagtagcagcccaaggagacacacaagtagctgctttctcggactgtattattttctgaaagtaagaaactttccctgggcagaactctttctagttcccatggggatgggcaggataggtgagaggccgagcccccacttccaggtctctgggcagggcggggttaggcagcagcgggtgtcactcacacagtgactttcacttgtgctttcagtgctcaggacatgggcacctgccggcttccttctagcccggttggacagctccggcagctggtttggggaggtaaaattataggagcgtgatgtcacccgggccactcagggcagagcctggctgctgggcagaagggcacttgggccgggctgcttcagccgagagggccattcggtgtcctgcccacagagagagaaacagtgagagaccaagagagcaaaccagagagatagggagggggaatgcaaggggtccctgggggactcaggagtcccagtggagaatgagag

SEQ ID NO: 40377 - DNA, 2300 bp, Homo sapien
cctttgaaatgagtgggtccagttccactgtaatttattcttctgttggtgtggagtggaaaagagcagtagcagttccttctttggtgccattgcacagctaaaagggctgttttgaattggaactaagcgaacaaagttctttctggctgtgtctttggcctcctgcaaagcctcaggcatctaagatgtcaggagctggctgccctgctctctatcccagagctggaggaccaggactgggcaaagacattgctcccagtctccttgcagcatcaagaccttccccactcctcaggagcaagcccccagaggcggagcgggaacagagcttttttaaaaaaagagggactcttcttcctctaccccgtcgctcacttgagctcttgctgtttcaggggaagaactcatcagcttcaaggctgagaggcgggattccagggatgttgatgaagagaaggagctgctggattttgtgccgaagctagaccaagtgtgagcagtgctcccgggagggtccccgggggtgccgagatgcaaccctgtggctcagagcagggattccagagggaggaaggacacagcaggccaggcgctgggctcgctgcccgcagagagagacggtttgcaccttaggatgagctagctctgcaccctagccactagggcaggcggaggcctccctcacaccgtgctgcctggacgcctctctgctcctcttccaggctcccctcctctcccacccaggctcccatcctctcccaggctcccctcattcacagccttatatccacaccccctctccctcttatccacactcaacttctcatccaaaagttgaagaagatggccgggtgcggtggctcacacctgtaatcccagtactttgggagactgaggcaggaggatcacctgaggtcaggagttcgtgaccagcctgaccaacatggtgaaaccctgtccctactaaaaatacaaaaaaaatagctgagcgtggcagcacgcatctgtagtcccagctactcgggaggctgaggcaggagaattgcttgaacccgggaggcggaggttgtagtgagccaagatcgcgccactgcactccagcctgggcaacaagagcgaaactccatctcaaaaaaaaaaaattgttgaggaagattcacattagaaactattgccaggctaagctcgaactcttgactgtatacctctgcccctgaggtatgttaggtacaagccaggggagatccgggtctgcctgcctggaccacatttctcatttccccctgtgactgctgtgagttatctcactgtggggcacagtgtacacagggacattttgcaaagcaatctaatatcaacgactttgtagaaacactgagccctaggtgttttctgaaaagatggaagtgtcccatgaacaagcagggagtgaaaccactgggccatttactccatttgaatttgctggacatctgttagaaagaaatacagagctgtaaccctgaccgtaagcaacttacggactcatttggtgggatcgaaatgcacaccaagtggtcatgtagcaacacagaaagatatattgttagccagagcgaggattctgtcaacaggttctaaaggtagagaaaggggcgacaagtgcaggttggagtcattggggaggacttcatggaggaggaggcggtccttccaccaggttgtgaagcgcagtcaggctctggagtggaaagccggagggagaggcttggaggcaagaggaagaggagctgtgtgcacatgtggatcagccctgtgatgttctggtgttcttggcacgcagggtggaatctccagccatccccaggattccctgtgccatgcctgagacagtggtgatcaggtcagaagagcaggagcaggtgagaagctccttctctgtggtttccccacatggagggcatgaaaaccctgggacagtgattgttgaggggtggcctgtacgtagcacaataggcactaatagctcacatgccactcactgtccaactggcattccacgcttggacgcctcataatggtgcaacattggtggcgctgggtgggcggcgtctggaagagatggtcagatggggccctttcctgtggtggcgcagtccttggatgcagcccaggacagcagcagtgagaaaccagtgggtccttgaccagcccactgtcttcaactcttggcctagggtaggaactccagccagcagatgtttactggattcctgctgtgcaccccggacaggctcaggcaggagggctggacacct

SEQ ID NO: 40378 - DNA, 2300 bp, Homo sapien
ttttctgggtgaagcattcataatgtttctcagcttctcaaaggaatgtgtgacccaaaaaaaaagactaaaaatcacttcttttttaaataacagttttatcgaaatataattcacctagaagtcaccctttcaaactctacaattcaatgttttttagtatttttacagaattcagcagcctatgatctaactctagaacactttcatcactccgaaaggaaacctcgtacccgttagcagtcacttctcatttcccccagagcccccggtccctcacaactgcaaatctttcagtctctaggaatttgcctgttctggacatttcatatacgtggaaccatgcaatgtgaagaaccacttctttgatgataaattcacatagcacacattcagaaaggcaagcattttcagggcaacttaagatttcttaaaaacctatagattttgtacaaaatctggcacattttgtacaaaatctggcacattttttacaaatttgaacaattgacccccaatgagcgaaccattctggtaggaccattatattcattatatctcatggcattctgggttccttcactgccccacttaatgtgagctttgcaaggagaccgtaaggtgactggaaacccactctgtcatccgcacgccgccctcacgaggcagattattggtgttagctcaagaatgaggcagagcgcccgcctgagaggctgacacagtcactcctcaaccgagggctgttctcattggagccacccccgcctgcctgcaggaggggcccacctgctttggctgcagcagtgtgtggtggggcatcatgactgcccacaagcctctgggcagcctgcggggtgtgcagaaggcagaggagggcaagtggagtcctgtagaggggacacggtctgtgcctgcagagaaatccgttttgttggtcccacgctagcaaagtgtattgaggcaaagtccaggggagagaagacttttctgacattttcatgtgggtgcccacatatcaaacaacatctctgataccttactgccttcctgacgaagctgtgatgccacctgcaagaatatggtccgttcaatcctggcgggatgctctgccctcttgaccgtgccagcactggctgtgcagtgataacagtatggtacattatttatttatttatttaagatggagtcttgctctgtcacctaggctgaagtgcagtagtgcaatcttggctcactgcaacctctgcctcccaggttcaagtgattctcctgcctcagccacccaagtagctgggattacaggcatgagccaccacgccctgcttatttttgtatttttagtaaagatggaggtctcaccatgttggccaggctggtctcgaactcctgacctcaggtgatccacctgcctcggccttccaaagtgctgggatgacaggcatgagccgccgcgcccagccatttaaacagcactgtgtgcctctcaatgtgcttcacctgtgctttctccagcgctcctcaccttgcccctgagatggatccatgataacccctattgtctagattaggaaaccaaggctacagggctctgaaattcaccatggaaatggggcattctttactgggaagtccataaagcaccaacgatgggaaagtgccataaagttcatctagatcagaagtcagcaaactatgggcccgtgggccaaatctggtccaccacttgtttgtgtaaataaagttttattgaaacacagccatgcccattcatttaaatgttagtcatatagagacatggccaaaaatattgatgatctggcccttaacagcaaaagttgccaacccctggtctagtgtaaccaccttactttttagataaggacattggggcccagaacaggaagagctttgcctggagccaaataactagttggtgactgcaaagttagcttcagctcccagacctcagagctctttacttgtggcctggaattctttacttgatagaaggtgatgaacgtctttttctttgcagagcggactcactcccctccatctggtagcacaagaaggccacgttccagtggcagatgtgctgatcaaacacggcgtcatggtggacgccaccacccgggtaaggcaggcagccggaacttcagtctgtgtggactccttgctcacacttcagaattgaatcttccacagagctttgaaaccccaaagacccagtgggacattcttctctgccacttcctagggctggcagtggagtttgaaaacactactcctaattacct

SEQ ID NO: 40379 - DNA, 2300 bp, Homo sapien
ttaaattctgaaatgacctggctcccagagaagctgtgctggcccgcctcaagcctgagggactggggaggcaccatgttgcccaccggaagcactgcacaaggaactagcaggatcctaagctttggaattatactctctacctacaggatgtttcctacatcatgtgacactctgtgttcatatgctggtgttctctcttctgagtgtgggaactccaaagagaaaaatattgttcctcctcttccttggatggtgaaacggcttctagctttcgtcactcctgctggtgacaaccacgggttcgttccagaagccattactgagcacttgctatgttctgagtcagctaatatttaagcttcattcttgcccctgagtggggtgcatgccacgctgccccctcatgagtgagcctggcccagtatgtgttgccaagtgagatcatctgtccttcggggaggctgtctgaaatcatgtctaatgtgacctgcttcttttacattttttagctttctggctccctcaaaacaaacaaacaacaacaacaacaacaacaaacagccattgttttgagtccaagtgcttcaaaaggctcctgcttaaggactgtgctgtggtagacatggcggttccttctagcccacatgtggcctagaactctgtcagctctgtcaggcactagtccccggggagatggcccagcgtccatggggtgcgctccagctgctgtggaaaacacagacgggtcatgaagctgatctcggtggcatctttccgcagcagctgtgccctcatggcaaggccagtttggtgctgcgggaaagctctaaagccagatggcggcctcgtcaggggacctggaccagcgtgggcccagcaggaggccaagcatcacgtgaggaaggctggagagacccttctcagggaggactgcaccagaggcccccagcggtgacacccacccctagaggaaaccatggagggagacagcccccaccttaatggcaccacccccagggtccagggaggctgccatgcccctggccccgcagctcagctcctcggggtcacctgttccctctgccagccaccaactgccattccaggatatggtgttctcactgataaagccattctgggcagatgacatctcatcccgttgttggacgggcggacgttgcaaaaggcggcttcctaggccaggcctgcaggagcttggcctgggatggtccagcctggctggtgggcagccccgaccttctggcagctgcgggaccgcctgggcgcccccctgcccgcgccatcccacgccctcctagccgctgtttgcggtgactcacctcggttcccaggaacgttgttatttttggccctggtgttattaagattgtgcccagattccctgcaaatcggccactaagcagcatggggccctagtgaaagcacgcggagaacagagggggcagcgcgcttcgggaggctccccggccttggagagctccagcctccccggggggcggaggggccggccagaaggactcctgcgccccacacccgcagcgccgacagggcgtgcgccctggctcagcgctccccgactgctcccaacccaggggcacccagggccgaagcttcctctacagagcctccccctccttaggaaacaaaacaaaacaaaacaaaaaccaggaaaggcaaattgtgtagatgccactaaaaagaaattcccgcttagtattgcttcccctgcacccagcgacttttagacaagcagaagaggagatgccctgcccgcgactaaaccggactccctttcatttactaccctctcagcgtgtggcctgatgtccaactctgggctctgaactcagctctccccggctgctctcgaccccggggcaaccaggggtccgcgccggccgaggcctggggagcggggcctcctggggttgggggaggaggtgctcttgtaatctgcggtccccaggcgggcgccacccctccgcccgcccgtgccgggagcgcccggcccgacagcaagcgcctctggggccgataaggccctcgggggcctggcccgcacgtcacaggccccgcagaggctgcggtgagtccgccagccccagctgctcctcctcaagcccccaaggcccttcggcgggcccctgctgaaagaccggcatgccctattctgtgggcttccgcgaagtgagtactgggcggctgctcgggtggacggggagatgtcaggagggggccacccaggccgcgccagtaggcagcacgcgagcaagagc

SEQ ID NO: 40380 - DNA, 2300 bp, Homo sapien
gggccatcaaggacacagcagcctggtagagggacaacatggacctgctcaaagcctgctgaggctggagcacagggaccagcacagacctgagtgagatgagtcagtgggtaggaagggcctgatcattcaggtcctcataggcggtgtaacagattctgatcttcaggagcaaaaaggaaggatgctaagtggagaagtgacaatagccacatctgtgatgtgcagtccatcctgcagtggagggtggacaggcggatggccagagggaatggaggcatgactgtgaggaggcccaggggaacagtggccctggggcctgtgctcaaggaatagtgctgtgctggagattaattatgtgtgttgtcggtaggttgattacagccccggccagggggtgagttggcctagggagacagtctagagctgtgctgtgtaatagagttaccactagtcaaatgtaactattaagcaattaaaatgtgcagggtctgaatttagatgtgatgtaagtgtgaaatacacactgaatgttgaacttagtaaaagaatgtaaaatgtcctattcataataaatccattgcatgttgaaatattttgaatatattgaattaaaatatattattaaaattaattttaccagtttttttttctaaagatatggctacttgcaaatttaaattccatatggaattggaatttgtggctcgcactgcgtctagagtgagacctcagtcaaggacccagccctgggaaatcgtcttcaaaacaaggcttttgccagaggagtgcaggtggagagggggatggaagggcaaagacagggttggggggggcggcggggggaggtcctgtgaggcagcgcttgcaggctgcagggggttagaggcaaggcccagttgctcccaagtttgcactgcgtggggcccagctcgcaggcccaggacgtcgttctctgcagcttggtagacgcctcctttctcggctctagcctggctgggtaaatgtctacagcaagccctcagcttaggggaggcagaaggaggcagactatttcataataactcttctccaagtctcaaatattgtttttcacaactccctccttagccgtttgtggaagaagtgctcgtcccacgggatggagagggagtgggtgggcggcagctcccgagccggggaccccggctggctcctgtgcggcgtgacggggtggttggctgagccctaggccccctccgcctgccgcaggctgggctggcgctgcggacccaagtgcagctcttccccgcggggcacgggcgcaggcggcgtccccagggaggcgtgcgcgggagcgccggggatgggggacgggcggggctggagcggggacctacttccttttctgtcccaagaggactcaaaggaaaacaattcacttgatcctggatacgttttcatctataattcggaaatatgcaaatgaaaggcccacatggtctgaaaggggcaaatcaagctcccagcgtgcggcgcggggaaccggctcttccccagggagccccggaggcgcgcgccccacgccgagggcgcccggggaggaaccgcaccccgggctcgggagtagcgcgtccgggccctcagcggccaccgcccgggggctccccaagcccggtccttgccctctgccgcccgccctctaggccgagcctccgctcccgcgatgtcgccgcgctcgccgccgccaggcgcgctggtccgccgggtcgcccgggcgcggggcgcgccgcccgccgcagcctcccctcttcccccggcttggccctgcggcccgcagcggggtccggggtagagcggccgctttgttcccgccgcccgacggcgcggggctctgcaaaggcggaagctcggcgctcgccatgaccccgtgcggacgcccagtgcgcccagcctcgccgcgccggccgggcccccgggccttcccgcgctgagcgcccgaatccgccccttccgcggccgctcaccgcccgccgccgccgcagtacgagccgcctccccgcccccgcccccccgcttcgccgccgccgccgccgcaggagagggagggaggcggagggagggaggcggcgggccctgcccagagcccgtcccgggcgccggcaagcgagctccggccgcggcggcagcgccatcccgggccgcgggcagccgcccctcgccctccgcgtccggaactgccttcgccttcccgcgaccccgcagcagccggccctcggggcgccacgaacgctgtcccctctgtggagcagagaccccct

SEQ ID NO: 40381 - DNA, 2300 bp, Homo sapien
gtcatcttggctcactgcaagctccgcctcccgggttctcgccattctttgtatttttagtagagacggggtttcaccttgctagccaggatggtctcgatcgtgatccgccggccttggcctcccaaagtgctgggattacaggcatgagccactgcgcccggcctaaccagaccatttttaagtgtacaattcagtggcattaaagacattcaccttgttgtgcaatcatcaccatcatctatttccagaacttttttatcttgcaaaactggaactctgtacccattaaacaactcccaaccccccacccctacccccacccctggtaagcatcattctgtcttctgcctttattaatttgtctactctaggtaccataagtagaattatacaatatttgtccttttgtgtctggctgtttcacttagcataatgtccccaaggttcatatgtattttagcctgtgtcagaattgccttccttgtattttttttttttttctttaaagacagagtcttgcactgttgcccaggctggagtgcagttgcgcgatcttggctcactgcaacctctgcctcccgggttcaagtgtttcttctgcctcagcctcccgagtagctgggactacaggcatgtgccatacacccagctaattattgtatttttagtagagacggggtttcaccacgttggccaggatggtctcaatctcttgacctcatgatctgcccaccttggcctcccagagtgctgggattacaggcgtgagccaccagcgcccaaccattgccttcctttttaaggctggagaatattccattgtacgtatgtaccacatttggtttatccattcatctgtcagtggatacttgggttgtaaatagtgctgctatgaacatgagtatgcaaatagatacccatatacaaagaactgctttcagttctgtggggtctataatcagcagtggaattgctagattatgtggtaattctgtttacttttttgaggaaccatcatactgttttccacagcagctgtgccattttgtattcccgccagcaatgggacaagggttctgatttttccacatcttcaccaacatctgttattttctggtgttttgcatttaaaaataataaccatcctaatgggtgtgaagtagtatctgattgtggtttgatttacattttcctaattattagtgatgttgagcatcttttcatgagcttattggccatctgtatatcttctttggagaatggaaagaaacttttccaactttttttttttttttttttttcgagacagtctggctctgtcacccaggctggagtgcagtggcgcgatctgggctcattgcaagctctgcctcctgggttcaccccattctcctgcctcagcctctgagtagctgggactacaggtgcccgccaccaagctcctcagctaattttttgtatttttagtagagatggggtttcaccttgttagccaggatggtctcgatctcctgacctcgtgatccgcccacctcagcctcccagagtgctgggattacaggcgtgagccaccacgcccggccttttctaactcattttgcaataaagtcccacttgacctgaactgagttactgacaaaaacatgatctgagctgatgtgagactatttgtattccttacttatgccagttaatgtgaatattcatatgctttgctaaagaaattttagtgtgtctgattatggagtgctgctccaaatcctactagggctatacacatgcatgtactatacacatatatgtactaatacttttctaaaatcagaaaaattcagaattccaaaacacattctactccagtccaagggttttgggttaaaagtttgtggacttgtagcttcatttctttggaaaaccaagttcccgtttttaaaaacttacccataaactttgggaatttagggaggaattagttgagggctgtcgttacttccgtcacatctcaacccatgtcattcttttctgtctttatgcttcactcgctgttcctgcccggtgcttttgcctcttaacctgaggcttatctgaggcttattttttcatctgcagagtgggtatattgttttctactttgaaggatggattgtggggaccaaaggaggtaacgacataaggctcaggtcagagtctagcacaataggtgctccacgaacatgattttctctagtccttaaattcatgctctctctgttgtggagcatgtgaattcattctttcatacctctttcatcatgtaa

SEQ ID NO: 40382 - DNA, 2300 bp, Homo sapien
tacattacacttctgtttctgtcagtgtcaggatattgattaggctggaccatgatctgaaaagttacgttattcttactgaatggtccagagtctaccgtatggagggtagggctatggattagagtggagacgggatagatagaaaagtttgggttccctcttgctgtgtctctcaggctggagtgtagtggcgatcatagttcactgcagcctggaactcccgggctcaagcaggcctcccgagtagctgggctacagcagcgccccgccacaaacggctttcttaacggcttaaaaaattgttcattcacgagcaacatttttttattttaaaccgcctactacagtacttgtacaacattattctaggtgctggagatgcagagtcattataggagagcatttaccagtgaatgtattcggaatatatatatatatatatatatatcacatgtaagtgcaaaatgactagagcaaatgatactactacagaagttcagaaaaggaagtcagcatggaagttaaggcagtgggtgagagggaggcccttaaaagctaaagctgagataaaatgaggtattgcgggcgacagtctaggcggggtgtgtcgtatggggttggggacagggcagataaaggtcaggcagcaggatacacgtccatgtcaacgattaaacatttagtgtctttttcatgtctactgtctttctagtgaatgcagaaaaaaaaaaaatgcatgacttggccaggtgcagtgtctcaggcctgtaatcccagcactttgggaggccgaagagggcggatcacttgaagtcaggagttcgagaccagcggcctggccaacatagtgacaccccgtctctactaaaaatacaaaaataagccaggcgtggtggcgggcgcctgcagtcccagctactcaggaggatgaggtaggagaatcgcttgaacccaggagacggaggttgcagtgagccaagatcgcaccacttgcactccagcctgggcaacagagcgacactgtctcaaaaaaaaaaaaaaaagtatgactcagtctctgcatcaaagagtttaaagtagatgaaaggcaagacaaagaaacgtccatacagccagtagtggacaggcaggccatgaagaaccgcctgctcgtggttccaacgccctaagtatggacaagagttccgcacagggcaagaagggaagaccggctttggaataagacaaatctcagtcccaggctcaggtgcgcgccacatactagctgtgtgaccttgtccaagtcacacgacccaggtctgtggagtctcccataaaatggctctagtgagctccaagaaccctctcagctgctgggggagggaagaaatgaagtcactgctgaaaggggttaagacgggtgcttctggttccaccctctccccaactcttcccaccgacacaggagagccgtcgggggctgaggcgagctgccaggggtgaggacgggaagccgcctcctctccgccccccaggccccgccctcgggctccggaaagtcgctgtgcaggcaaatgagtggggagggagggctcactaactgtaaacagacgccgccgagagttcccatcctgcgtggctgccggatttccgtgccacactgaagccaccccacccagactcctgccctcagtttccccagcggtggcatggggtgcaccagctcctcctctcccgggtcgccgtctgacttaaacgcgtgagacgggagaggaggaacccccgctccccagcctccagccccaccaagtcctcctcctcccctggctttggccttttgtaccggccccacgtgaccccgccggccggctcttccctgctgccccgccccgccctccggcctttcccggctctcggcccagctcttcccgctctcggccgccccccacccgcgctgccgggcctccgcctcccctcgccgcccgcccaggctcttccagctccctcccccaggccgccgttccctcgcgacgctcccctccccccgcggctgttccgccgccttgcctcccctccccccggctggagctcactgtctccaagatggcggccgtgtcagtttggggcatctccgcggtccggcccggggccccgggatctcggctgtccttcctcccggtaagtagccgaggggccgttcccggccgcccccggccgcccagcccgaggccgagccgctccagggcccactccgctgcctcgcggggtcggcgggccgctgcaggccccgccgcggcctgcgccgcctcccgctgctc

SEQ ID NO: 40383 - DNA, 2300 bp, Homo sapien
gggttcaagcgattctcccgtctcagcctcctgagtagctgggaccacaggtacgtgccatcacgcctggctaattttttaattttagtagagacaggggttcatcatgttggccaggctggtcttgaactcctgacgtcaagtgatccgcccacctcagcctcccaaagtgttgggattacaggcgtaagccaccgcgcccagctccaagagatttttgtcttttgtttactggtgttatgtatccaagcactggaacagtgcctggcgcatggtagggctcactaaatatttatggaatggtacttacaaattataaaacacagtgtatggcacacagtgttttataaatattaacatttccaaggttcacaaccactaggctccctacttacctttccagcctgatctccctgcgctcttcctaccattccagctcagctatacttaacttgctcatctgcagagccttccttatgtacttttttctctgtccatctatccctgcatttgagggatcctttctcattttcaggtttcaaggtagagggtcttccctgactctaggtcagccatctctacagcactcctcccaccccctatgcgttccttattcatcacactgcattgcaatcccttgcttctcatttgtctttcctgctgggccctgtaaccacagggacaatgcctgtgacagcagtcattgcagcatctccagcatccagcacaggtcgatacgtgggggttttcggcaaatgttaattcagtgaatgaatgagaaattctcacggcagcgactgcatttctgcaccttcgacacacattatcacgtgttattgtatcttgtgctgttccttagggcataacaattgctagcattttctaactcaatcctcacaactctaggagggaggtactattcacgttcttatttgagaagtgaggaacttgaagtttagaggagttacagttctttctcacggtcactcaggttgtaagtgttggagcgggttcaagccaagtcctctggcaccagcgtccctaagcccacccagagtcataccattctgccattttgtttctggcttttcttcatagttcaaagtcagccaactacctgcccttagcaagcgtggagagaaccccccgcaccacctcagcaaagggcttgtgtgtggaggagctgccacccacgctccatttcaccaaagtgacaactaatgctagggagggcgaacctctcatcggcgaggtcgccactgtcaccagcgcccactgctgggtccaaggctggcgacgcctcaccgcatctgggcttgacttcctgcgtcactggggcgacccctggtcctgacttccactccacgccttcgtggatcaggacgactgggaccactcaaaagcgtatccaagtcctgaggtctccaaagcggtggagagacccgcccagcccctcactccccggctgggaactgagattgtggagggtgggcgccctgccgcggcccagtggggctgggggcttccagagtcggggtccagggctcggtgtccgagactccaccgccagccgcgccgacctgacccacggccgggtacaacagagaaggcggcgcttcccaaaggcaccgatggagtgcagggtagccgccgccctcaggatttatcaaccgcgaggcgctgtcagcaactcgtgcccggaagccaccccgccccggcacacacatactccagcgccccctccaggcgcactccgcaaacacgcgagcgcggcgaccgccccagccctttgtgactggatgagtggggccgagcagcacgcactgtcttcgacctccaatcaggactcggggtctcggagctgtaccaatcggagatgaccgtggcctcaacagggccaatcgggggactcgagcccgacaacagggcaagccgccaacagcgatcaatcagaggggaggagcggctcccagatacccaatcagcggccttcaggcgcagatcgtgggcggagcggtagccaggccgcgggccggccaatcagcgggcgagcggctgcctcagcgcgcgcggcgggcggggcggggcctgtccgcgcctaggagcagtgggcgctgagagcagcaaggccaggtgaggagtagggacgaccccgagcctggagagggggcaggagtgggggcgcgcgagggtcggggcggggtctcaggatgcagccgggcggcctctcagggctgcggacgcggcggggagaggtgaggggccgggttcagagttcggggagggcgtccttcccggcg

SEQ ID NO: 40384 - DNA, 2300 bp, Homo sapien
ggctcggtgtccgagactccaccgccagccgcgccgacctgacccacggccgggtacaacagagaaggcggcgcttcccaaaggcaccgatggagtgcagggtagccgccgccctcaggatttatcaaccgcgaggcgctgtcagcaactcgtgcccggaagccaccccgccccggcacacacatactccagcgccccctccaggcgcactccgcaaacacgcgagcgcggcgaccgccccagccctttgtgactggatgagtggggccgagcagcacgcactgtcttcgacctccaatcaggactcggggtctcggagctgtaccaatcggagatgaccgtggcctcaacagggccaatcgggggactcgagcccgacaacagggcaagccgccaacagcgatcaatcagaggggaggagcggctcccagatacccaatcagcggccttcaggcgcagatcgtgggcggagcggtagccaggccgcgggccggccaatcagcgggcgagcggctgcctcagcgcgcgcggcgggcggggcggggcctgtccgcgcctaggagcagtgggcgctgagagcagcaaggccaggtgaggagtagggacgaccccgagcctggagagggggcaggagtgggggcgcgcgagggtcggggcggggtctcaggatgcagccgggcggcctctcagggctgcggacgcggcggggagaggtgaggggccgggttcagagttcggggagggcgtccttcccggcgccgcggctgcgggcggaggggacactgttgccatggcagcgcacgtgcgctcgctggcgcggcccggcacccctgcgctcttcaccccggaacgcgcgtgccccttcagccaggcccctgcccgcctgcgccccgcggcctccgtcgccgccggctctgggccggggcctgcgcagggaccgcctgcctaggccgctgcctctccctcgcaccccgggctgcctggctgtctctccctcctgctgtctcctccaggcggcgctgggcaccgcaggcctctgcgttttgaccacccgcgccggttcgcggaatggccacatcctggcgactggcaccagagagatgcaaccgtctgagggccttggggtgtctgtcccccagggaaatttttttttttttttggaggtggagggggcggggttctccctctgttgcccgggctgatctcgaactcgtgagctccagcggtctgcccgcggaggcctccctaagtactgggatcacaggcgggagccccaagggatctttttaaatgtcttactgcattaacaagtgcctaaggagtgctcagagaatagctctgattggatgaataaagacccccaagggcagctttccattcctcccaccaattctggtgggcagaaatagaaagcaaaccacatatgtaattgtacatgttctggtaaccactttaaaataataaaacaggttaaattaattttaatatatttgatttaacccaggatatccaaaatgttattacaacatataatcaatattaaattattggtaagatatttgaaattttttttttcatgcaaagcctttcagatttgtcgtgtgtcttacacttaacagcacacctcagtccgcaccagccacctttcaagtgctcgctggtcccatagtggctatcgtattaagctgcgcatttcttgtgtatgtgtgagctgttgccaaaacatgacatcaaattcagtgttcttggaagccctcttcaaagaacactgattgtgttgcagtcaggcaacgcaaaacatgaggcacggcccttttcttcaaggagtttgcggttcggttgagaaaatagacacccacagataagtagtattttaaatggatgcaatttgggcgatagtaaagataactgggagtatatgattgacagtcagatgactgatcattatcgtttcgaattcaagggagggctatcttcaggctcatgcaggaggggaagattgggcctggtcttgaaagatgggtaagtcttggactgttgggaaaagatggggagggccttttggttgaatggaactgaatatcgctgcttttgtttttagagttgaaaacttacagagtcctgaggctttcagactgaaaaaggctttcttctgtcactgacaatcgccaccatgatccatagtcttttcttgatcaactcctctggagacattttcctggagaaacattggaaaagtgtggtcagccgttctgtttgtgattacttttttgaggcgcaagagagagctactgaggcag

SEQ ID NO: 40385 - DNA, 2300 bp, Homo sapien
ttcttttcctcgaagtgatcccttgactaaaatcaaggctcccattgtcaccttatcagcctgcccatgcctaattctgcattctcaggcttccccagaatctgtccgagggaaaccaatctcaattcagaaggaacacagaggccccagtttctagggctgcaggatattgctgggtcttaatcattcgggtatatttcagcaaagctcagggcccctgctaatgatctgcaaaccctctcctctcagtctcccgttgtttagcccctatttataagtgagtgcatgtggttgttcactttctgtttctgagttatttcagttaggataatggtctccagtttcatccatgttgctccaaaagacagacttcattgttttttacggctttgtcgtattcctcggtgtatatgtgcattttctttatccagtcctccattgatggacacttaggttaattctgtgcctttgctattgtgaattgtgctgttgtgaattgtgtgtgataaacgtgtgagtgcaggtgtctttttgatgtaatgatttctttttctttgaatagatactcagtagtgggattgccgggtcaaatggatgttctatttttagtttgggaaatctccatattgttttccatagaggttcaggatccaggatttaagtgcaaccattcagtggaaaaccatcctctcaagagttcaaatgagagtcctcatgaccagcactccctgctgaacggcaatgccccaccccccaaaaaagcctccatcctcaccatcttagaccacattgcaggaaagcagccccatgcccaccagacaggcccacagctgctgctgctcatgggaggtctacctcccgtgctcagcaggcaacccaccccagtgccccttttctacaatgaccatcagcagggctgcagcttcataaaaatgtgaaaaacagtttgaaagcaatgtgaaaagcagttaggtgcctttcaacttcaaactcagcactcatggtttgacaaatatgagtatatttaggatcagaatgtatgaaatctggcctctcctgaatagtcggtcatcccacaatttcctctgccaaacttctcttccctccctgcgttctttctttcacctctctctcatttttacaaggtctggtctcagccagacatgaaccaatgatgatagatgctcctgctgagccctgtgatgtgccagggccctgacatgcgtggcttctctctgatcctcacgtgacctgcagatgcaaaagccagagctcagcatagttgaaaatcttgattgaggtcatatcccagttactggcacagccggatttaaacctaagactttcccctacacgacagggcttttatttctcagtcatctgaaaaggtgtcagcaagggaaatggcttgtctatttccaggggcattttacaagcaaatactgaaaggcttcggtgggcttaagggctgatggctttgatcgaatttcaggcatgttggccccaaggccctgtgtatattccctgggcccactcaaggggatgctggagccggaaagtccccggaggccacctactgcagccctgcactttacaaagaagagaaagattctccctaaaattacagaacagggccaaagatgcctaccggagcaaacccccatgggggcacctcctaccgcaggtgagcccaaggctggtcctgccttctcagtggctacccccctgagctcccgccaccacacaaagtgttccaatccttgtgcatcctccagtccttttaacctctcatgtcctgagaggccagagctacagccacagattccagaagacaccccactcccagccccaacctgctgcctttagaattataaacacttcttgtcatcacagggtcctgaaagtcccttttaagcctgggacactaggactctaaaggaagatgattcttaaggtcccatcccacttccaaattcctgcgattcaatgacatcacggctgtgaataatcagcctggcccgaagccaggatgggctgtgctgcttccaccgtgaacttcctccccctgctttataaaaacaggcctgcctcagctccctcatggccctgtccactgagcatcctcccgccacacagaaacccgcccagccggggccaccgaccccaccccctgcctggaaacttaaaggaggccggagctgtggggagctcagagctgagatcctacaggagtccagggctggagagaaaacctctgcgaggaaagggaaggagcaagccgtggtaggtcgggtttctgt

SEQ ID NO: 40386 - DNA, 2300 bp, Homo sapien
tggggaggctgaggcgggaggaccccttgaacccaggaggtcaagactgcagtgagccgtgatcctgccactatactccaaagtgggcgatagagaaaggccctgtcaagaaagaaaaaagaaagaaaaggaaagaaaaggaaaggaaaggaagaaaggaaaggaaaggaagaaagaaaggaaagaaaaaaaagaaagctagcagctgggaagggaaggggaggggaagcgaggggaggggaggggaggggaggggaggggaggaaaaggaaaggaaagaaggaaagaaggaaggaaggaggagagataggaaggaaggaaaagaaggaaaagaaagaaaccaagtagccgggaagggaagggaaggggaggggagtggaggggaggggaggagaggggagggggaaggaaggaaggaaaagagagagagagagaaagaaaaagagaaaggagagggaagaggggagaggggagaaaccgagcagccagcgtgcctagcacagccctggacaccattgacccctatgtttgggttgagatctgtccctgagttaacttcaaccccagggctgtcaggcactgctgctatcaatacctcatttgtccctcacaacaactctggggtggcctcctttctatgactttctatgagcccgcctgtccccctgctattacaatgaagcagatgaaactgctgatctttgttactgatgttttggctgttttcaatttccaaaaaatgacaattaaatgcaattcaacctaatattgcctaaattttaaaagaggaaataggttctcacagtgtttaagtaaccagcccccgtgcctcagaggtagtcaacagcagtatctggattcaaaatccagtttgcctccttctgaacttcttaacatgctacttttagccacggattaagaacccgggaaccagttgctagggtttgagtatcagctcatctacgtagcagccatgtaccttggaaataataataatgcagaccaggtgcagtggctcacagcctgtaatctcaacactttgggaagcccaggcgggtggatcccttgagcccaggagttggagaccagcctgggcaacacagtgagtgagaccccgccaccaggtatggcggccgcgcacctgtagtcaggagaatcacttgagcccaggagttggaggttgcactgagctgtgatcacaccactgcactccagcctgggtgacagagcgagataataataataatgatgatgatgatgcagtattttccaatttacagggttgccctgaggattgaataaggaaatctaagtacagagatttagaacagagccctgcactgtgtaagcactctatagatgtgagctattattatcatcttcaggttcctttggtagtttttttctgcttgaataaaatatagcaacacacacacacacctcctttgtccactaatgtaatcccataaaacggagaaactcagcagtgaggacattctgattccaagcaggaaggagatgaacgatgaacctcaggctgagcgcctcacggtttcctcatgtcaccggggctgggggtgcagtttggcttcacactgctaggtcttttcttgtttttaagggggcaggggctgtcacctctgaggagtcagctgtgattgatccttctccacacccagccaagcaccccccagacaggggagcgcccgcagtagggcggtaggcaagggcagttctagccaacagtccctaaatcatcccagcgggggcgcgggaaattccaccgaggtgaaagcctagggggccgggtgaagaaatccccatacccgggcccagaaaccgctccaggtggaagtaacttgtctaaagagaacagggtgtaacgggggtcatttcagggctgttcttttaaatcggtgagcacggtctgtctactttccctcagttgtctagagaccacacgccacccccgccccgggggagtcgcccggtcgagggtcccgggacaggcgcagcactcgcagcatccggacctggtctgcctcgcgccgggagcggcctctttaagagcggccgcggccaacgtgctccgtgacgtcagagcaggaagtgtttgaggaagtcgcgccgcgctgcccgcgttaagattcccgcattttaatgttttcaggggggtgtcatagccccgggtttggccgccccagccccgccttccccgccccggggagcccgccccctgccccgcgtccctgccgacaggtgagtccccctcgtgggtgcggcccgggtgccacctgcag

SEQ ID NO: 40387 - DNA, 2300 bp, Homo sapien
acgggcgtggtggctcacacctgtaatcccagcactttgggaggctgaggcaggaggatcacttgagcccaggagttcaagaccagcctgggtaatatagtaagctcgcaagtctactaaaaatttagaaattagccagatgtggtggtgcatgcctgtagtccagctattcaggaggctgaggcagaaggatcacttgagcctgagagttcaaggctgcagtgagtcatgatcacccccactgcatgccagcctgggtgacaagagcgagaccttgtctcaaaaaaaaaaaaaaaattctgttgaaaatatatggccctatatacatatgtgtccaatggttcgtaaagtgttccttcaaatcaacagctacttattgaccactggtacatgctgttggtacaaatacatgtatgtgacagtaaccaggcataacaccctccaaagttacatgatcctatagtaggtacaaaacgtgaaagtgccagtagtgtcgaaggcaggatatggttaattgtaggagagttattgtggttattctttgacaattgcttgtgtctctgtctccagttcaagagcccaagaggaatctcgccttcttccagctgaggaaggtgtggggccaggtctggcacagcatccagaccctgaaggaagattgcaaccggctgcagcagggacagcgagccgccatgtagcgtgccaggctttttttttaaacttaatttatttaaaattccttggtggctttggccacagggaggtggttgaggcagggacccagaagcaaccgttatgagcaacaaaaggaagacactggtttggatggacgggaagcggttgggtgggctggactgacggaggcccctttagacctggcgaggtgagtgtggttggcacagggtgaggagtgtggaactgaagctgggctggccaagctgtggctggtttgggaacccagaggagctcactaccatgtggattagcaaaactcccctgaccgtgctgctggggacttacggactctttcctcattgtgactcgtttgccaacattattggccttttgtgtcttcctttgcctgatgtcaagtttagtgcagaacctcaggcattgctgagggctaggaaattgtccttgggttataagtggctgctataataatagtgatgatgataataattatagcagggacctcccttgacatttgagggggttttgttattgtacaggaaatggaatttggatcccagagatgctccaagactgttccttgtggtccctgcaggatgaatctcctccgaaacaacagctgcctctccaaaatgaagaattccatggcttccatgtctcagcagctcaaggccaagttggatttcttcaaaaccagcatccagattgacctggagaagtacagcgagcaaaccgagtttgggatcagtgagtgtgcactttgcaatgagtttaaagacaccatttttttttctttttctctttctaaggtttcttttgtcctattataattgagttgcttatttctgtttcagttttgtggtgtttttattttgttttgttttgtttttccttctcaattttttttcagcatcagataaactgctgctggcctggagggaaatggagcaggctgtggagctctgtgggcgggtaggagactcattttgggtttcggaacttaccaagggggtgagattttgtgctcccacttttcactttctcatcaaacactgggtcgatctctgtcaaaaatcaggtgttcctcaccatgctttgagcttaactggaccagctgaaaagaggccaagagagtagccagtgaagggagcccctctgtggccagatgcaagagctgcatgaatggacagagatggtccaggtttaaataagaagcaagggttaggttcccttggggaaaagccaagaccatttcctgttaggaagggcattggattgatgatcaacactccctcttgtcgaaggtttttgactaattttgttgggatgctaaatccataggaaataaaaggtctaggcagaaagtctcagggcagcgtaaatcagatgtcaccaaaaaaagttaattatgaaggcaaaggaaatacatgtgacttaatgaacctcacacaaactgaaggttgaagtcaggctccggggctttttcctggacttatcctctgttttcccctgtgtacttgggcaaggatcttcacctgtgtcttagtatcgatttttatgaatcagtactgatggagtatatgtgtgtttaatggtgaatattaacc

SEQ ID NO: 40388 - DNA, 2300 bp, Homo sapien
aggtctggcacagcatccagaccctgaaggaagattgcaaccggctgcagcagggacagcgagccgccatgtagcgtgccaggctttttttttaaacttaatttatttaaaattccttggtggctttggccacagggaggtggttgaggcagggacccagaagcaaccgttatgagcaacaaaaggaagacactggtttggatggacgggaagcggttgggtgggctggactgacggaggcccctttagacctggcgaggtgagtgtggttggcacagggtgaggagtgtggaactgaagctgggctggccaagctgtggctggtttgggaacccagaggagctcactaccatgtggattagcaaaactcccctgaccgtgctgctggggacttacggactctttcctcattgtgactcgtttgccaacattattggccttttgtgtcttcctttgcctgatgtcaagtttagtgcagaacctcaggcattgctgagggctaggaaattgtccttgggttataagtggctgctataataatagtgatgatgataataattatagcagggacctcccttgacatttgagggggttttgttattgtacaggaaatggaatttggatcccagagatgctccaagactgttccttgtggtccctgcaggatgaatctcctccgaaacaacagctgcctctccaaaatgaagaattccatggcttccatgtctcagcagctcaaggccaagttggatttcttcaaaaccagcatccagattgacctggagaagtacagcgagcaaaccgagtttgggatcagtgagtgtgcactttgcaatgagtttaaagacaccatttttttttctttttctctttctaaggtttcttttgtcctattataattgagttgcttatttctgtttcagttttgtggtgtttttattttgttttgttttgtttttccttctcaattttttttcagcatcagataaactgctgctggcctggagggaaatggagcaggctgtggagctctgtgggcgggtaggagactcattttgggtttcggaacttaccaagggggtgagattttgtgctcccacttttcactttctcatcaaacactgggtcgatctctgtcaaaaatcaggtgttcctcaccatgctttgagcttaactggaccagctgaaaagaggccaagagagtagccagtgaagggagcccctctgtggccagatgcaagagctgcatgaatggacagagatggtccaggtttaaataagaagcaagggttaggttcccttggggaaaagccaagaccatttcctgttaggaagggcattggattgatgatcaacactccctcttgtcgaaggtttttgactaattttgttgggatgctaaatccataggaaataaaaggtctaggcagaaagtctcagggcagcgtaaatcagatgtcaccaaaaaaagttaattatgaaggcaaaggaaatacatgtgacttaatgaacctcacacaaactgaaggttgaagtcaggctccggggctttttcctggacttatcctctgttttcccctgtgtacttgggcaaggatcttcacctgtgtcttagtatcgatttttatgaatcagtactgatggagtatatgtgtgtttaatggtgaatattaaccatagaagggctgagtgctcctccccatcttgggactcataatctgtgaaataaaacagtctgggcctccctgcccgggtagcatcaggatagacagatgaagagaagagaaagtaatgtgtcttgggcatcttctgtatgccaggcaccatgccagaggctttaagtacttcatcttacttgactcctcagatggccctgttagaagcctattttatgcaaaaggaaactgtagctgggggtaagtaacttgccaaggggtcacacagctagaaagcggtggaccctagatgcaggcgcagccattcagaccccacagtccacattcctttgagccagtccattgagggtcctcagggaatgtggcgggtcccctggtctcgctcccccgcagatcttgcatctcagcatgcgcctaccacatcagttgacattagcacagcttttccattaggagaacgaagtgaaactcctggtagaacggatgatggctctgcagaccgacattgtggacttacagaggagccccatgggccggaagcaggggggaacgctggacgacctgtgagtactggctggggggcccctctgtgcccagcacacacagacagccctggagcttcgg

SEQ ID NO: 40389 - DNA, 2300 bp, Homo sapien
aactggacaagttggaaaagctggttagaagactgaagtgtgaagccatttcccataaaggctggagagtggaggaggagctgggaaccagtgctcaggcgcacatgtgcgcacacacacaccctgctgaggactggccagtgaggaaaaaggaagcccagagcatgtggaatcttagaagccaattgaagcaagttatttcaagaagaactttgtgaagcagatcaaatgtcggttgttctaagacgataaggacagataatggattattttccttggtttctctggcactaattttaaaaatatagtatttgtaaaaatgggctaggtgcagtggctcacgcctgtaatctagcactttaataggccaaggcgggtggatcacttgaggtcaggggtttgagaccagcctggccaacatggtgaaaccccatctctactaaaaatacaaaaattagctgggcatggtggcaggatcctgtaatcccagctactcgggaggctgaggcaggagaatcacttgaacccgggaggcagaggttgcagtgagccgagatcgtgccattgcactctggcctgcgggacaagagtgaaactctgtctcaaaacaaaaaaatttgtaaaactgatcccacaattccctacatttgtaacttttaaaattcagaggtaaatacatttttatttaaggaggaataattcttcagagcaaaataatctgaatatcacctggaatagagattggacagaaaaaagtgtgaacagggaaaactaggacaagtcatatatgtaaatgagagtataaagagtaaatgagagtggtcactgctcactgcagcttaactaatcagatagttaagttgcaggcataaagtttttttaacttttattcctcaagtaataaattgaggaaaatacaaatatgtacaaaatttttacaaaagctatccataaaagggcaagtagtaatatatagaaaagatctaccagattagtaacaaactacccccattaggaaaatggtaaatgatatgaataggaaattcaaaaaaagaagaattacagatttccaataagcataacttaagatatacactgatattgtaaggaaacacaatcaccacaaccttgctaatcaaagaaactaatgatatttattggaaaataatgggaatttttaatagactgggttagaagactagaagtgtacgtcccaaaatattaatagttcagctgtagggtgagatcactgattttaattttctccttttatacatttttccagatttctctacagcaactacgtatcattttgtaataaattttaatttttcgatgcacaaagcaattgcctggaattgcagttcgatatgaacccaggagttacgcttgtaaaataaactattgctgatgtgacatttccatttctcaagcagactgtaaatttctcagatgtaggtcatcatgttataattagggttccattgctcatgatctagatgaaacacttctccctttcttgtggtctcttcattaatttggtccctaccgcaaaggcagggggattaaaaataaaatatcttttgacactggttggcaggtgtactaacacgtgtgcgggaggattcctgttctcggcatggttcacgccgggctccggcagcgccctagtacgtaaggggctgcactggagtgtggactgcccggtatccttagagaaagttttgacagtgtgacgccagtgtcgcctctaaccacgtacaaaacgcgccatgcattgggtagctattacagtgcacatttttgtgcaggaagctaccccaccagcgcaagtatttcagaatcaagatcgcactcccgtttccccttctagggaaaggattccagataaacactgagaaaacagatttaatatcttaggtcaaaactccaggtcttcccataggaaggcccctgggctgtcattctgaggtgcctatttcccccgcgccgtgtccacgtccacgagtccacgaaccctccgagttctctctcctcacctgccgagggctcgcccctctagccccgccccgccccgcccaggacgcgtgacgtcacaacaagcgccgtgcgccccgccccccatcgggggcaaccattgttccgccggtcgcgccggagctgggttgctcctgctcccgtctccaagtcctggtacctccttcaagctgggagagggctctagtccctggttctgaacactctggggttctcgggtgcaggccgccatgagcaaacggaaggcgccgcaggagactctc

SEQ ID NO: 40390 - DNA, 2300 bp, Homo sapien
atgttggctatgacagccttcctggatttatttatttctattttaattttacttttttggggtatgttgtatggttatatgctttcacataaaaaggtatactctaagacatctcacttccacagtccctatgcactctttcctactccttctaagtcccattaagaaccacttccctatggattcttgtaacgtttcttcatgaaaatacaactaaatactagtataccatctttatttctttcttctctccctttctttcataaagttacataatatatatacaatactataccttgcttttttcacttacaaataacatcctagagatttttccatatcaatatatagaaaacttccttatttatttattttttgagatagggtccctctctgtcacccaggctggagtgtagtggcgtgatctcggctcactgcaacctccgcctcccgggctgaagtgatcctcccacttcagcctccagagtagctgggaccacaggcacgtgccaccacacccggctaatttttttttttttttttttttttggtagggacatggttttactatgttgcctgggctggtctcaaactcttggctcaagtgatccacccaccttagcctcccacagtgctgatattacaggcatgaaccaccatgcccggccccttattcttttttgtagctgtgtaacattcagttgcatgcatgtatcatacttcatttgtttatccagtccgctattaatggacccttgggttgtttctctttctttgctcatacactttgtttttgttttttttttaataaagtgaaacatttttgttggtaggcggacagtgaaagacatccagcttttaggaggaggaaatgagaacaagagaaggcaatagaattttcttgattaaaatagtttccatggatgtccagtacacattcagtctagtcttctttttttcttttttttttgaggcagagtctcgctttgtcgcccaggctggagtgcagtggtgtgatctcagctcactgcaacttccacttcccaggttcaagcaattctcctgcctcaacctcctgagtagctgaggttacaggcaaacaccaccatgcccggctaatttttgtattttttttttttttagtagaaaaggggtttcaccatgttggccaggctggtcttgacctcctgacctcaagtgatccgcccaccttggcctcccaaagtgctaggattacacgtgtgagccaccttgcccggcctggccttctttatatttaaatatttggttaaggcactgtggctcatgcttgtaatcccagcactttgggaggctgaagtgggaggatcgcaaagacactgcaagctctttagttaccaaaagggtgtttggcctctgttgtacttatcaaaatgaaagggaggagatagattggattcttttatgctgtataccaggcactatagtggatgcttttacatatgttcttatttacttacacaatagcatatgaagtagtttttagtagtttacatataagaaaactgaggtctagaggaatgaagagtcctcacttgcaacactgaaaaaaaagtaaaatgaaaaaattccatctcagtggagacagaatttcatagaatataggaaaagaaaggtttaaatagctgtatataacttgcctgaagctatgtggttgtagagtatagacctattaattgagttcaaccataagaattgaaatgagttttctttttaaaaaaaaaaaaaagagagtgcctggatctctctgtgttgactgggttggtctcaaactcctgggctcagcgatcctctggcctcagcctctcaaagtgctgggattacaggcatgagccaccgtgcccggctgaaatgagttttctgattaacctttatagagttagagtatattgtttaatttgagatttttacatatagagttgttcataggtgtattttaaagctattttaaaatattgtttttattcattattgagtagttacttaggtgcatttttaatacattaaattaactcgttgtatgcaatgtatatctaatgccaattactgttgtcatcacagattctgctgtctacatcaatacacctgaatagttggacagaaaattgaaatcttttaactaattctaactatgaagcacagtgaaatagaaagttaggctgtaagaagtaaggctcttctgtgtgtcatcagcttggttccatttgcccaattgatacatttacatggacaatctcatatgtgtcttctgtcatcacagg

SEQ ID NO: 40391 - DNA, 2300 bp, Homo sapien
ttttttgagatggagtctcactctgttgccgaggctggagtgcagtggcaccgtgttggctcactgcaacctcggtctcctaggttcaaacaattctcctgcctcagcctcccgagtagctgggattacaggtgaccaccaccacgcccgactagtttttatatttttagtagagacagggtttcaccatattggccaggctggtctcgaactcctgacctcaggtgatccatccacctcagcctcccaaagtggtgagattacaggcgtcagccaccgcacgcggcctacttttttttttttttttttttttgtggagacaggatctcaatatgttgcccaggctcgtcttgaactcctgagctcaggagatcttcccaccttggcctcccaaagtgctgggattacaggtgtgagccactgtgcccggccattggagtttcaaattttattcctaacatgtaatccgaggctctgttccatgccaagtgctctaagtgctcagtggctgtttgtgccgtgttacaggagttcccgtcagttctttcgcctgtgtatattgccaggggcctttggtaacctgaaattcccttacagtgaggcagcaggaagcagagaaacccggcagagacagaaccctgggggctctttcctttatccttggtcataattgtacaacttgaaaataaattctgtaacacccctagtcaccagggttatcatgctatcaaagggtgttgtttgatgtcagtttaagggattaaaacaagtaacttccatacgagaggtagacaagcaataccaacccaaggacaagggccaagtagtaggaaggctcgaatcacctgcatcaccctcggaatggcactgcattactcaaaattgagaatgttcccatgcacagaatgctgagattcatgtcaatgaattgatgttaggttgttctgcaggaaaatgtagtaaataataagattatcatttatggcatagaaaaaatgcattttagatgactctatgctaagagcaatgaaacaatgaagagaaaaaatgattttttgatccagatctagattgttctacccttaaagtatttaagacagtgataagcacatgtctaaattacctgactaatagtccaaatggaaaaaaatcagacaggaaagggatgaagcagaagttttaaaaaattcgtattaggaaaattggaaatacatgaaatttcatctgaaatcagccagagacttggatccttgttctgcttaagtgagttttacataatgcaacacaaattaaatatgttgctgataaaatggacccaaagcttcgtactgaattgtgtaaaatgcgctatcattgttcccaccattgaaaaatgggattttcataaattacattattttcctaataaccctaacttcaaacagttcaattttcatttaaaggaaagtaatttcccaaatggcatttagtcagaacaggtgctgttacgttcacaacttttaagcggttgggattttgacatctggatgccagagctaatcagggggcgttttctctttttctatctgtcctcactatctgaagcccagtttacagcttctcagtgtattttgtacctcattagtttttggcatcctctatagcatattggccagtatgattcatcctttctttgagcacaattagctgtgaaaacagatcttagggcagactccctccctacccccaaaggattactgaaggtaggaaatgcaggtgattatcagagtttgcctttgatacagacatcctgctctgccgtggccctttgaactaactttgatatgcaataattaagagggattgaacccctggaggagaagccgcatggccctgcctcttctctccttctattgagtccttgttttgaactattgatcaaacagatttgaagggatttgttgaagcctgtgtggggcaggaggaaggaacggagcggggaggaggcacatctggttataaatagtttcaggaggaacctgctggtcagactttgctcagccgatttcacgcaccttactcagactaaggtttacttctttcagaaaaagcagtgacaaacagacgacgtgctgagctgccagcttagtggaagctctgctctgggtggagagcagcctcgctttggtgacgcacagtgctgggaccctccaggagccccgggattgaaggatggtggcggccgtcctgctggggctgagctggctctgctctcccctgggagctctggtcctggacttcaacaacatcaggagctctgc

SEQ ID NO: 40392 - DNA, 2300 bp, Homo sapien
atatttgctttttctttttttctggatcatttgagggttagttgcagctacatgatatttcacttctaaatacttcagcatgcatctcctaaaatcaaggccatttctgcataaccaacgtacactatccttagaattttttttttttttttagacggagtcttgccctgtcacccaggctggagtgcaatggcacgatcttggctcactgcaacgtccacctccggggttcaagttgattctcctgcttcagcctccccagtagctgggattacaggcacccgccaccatgcccagctaattttctgtatttttactagagtcggagtttcaccatgttggccaggctggtctcgaactcctgacctcaagtgatccgcccccctcggcctcccaaagtgctaggattacaggcgtgagccaccgcgcccggggccccctcagaaaattttacattgttgccacactaatctactctccattcaaatttccccgattgtcccaataacgttcctcagtagctggttttgtttgtttggtttttattcagggtctaatttaggatcacacattgcttttagtgccatatcttttgcttcctttttttttttttttttttttttgagacggagtctcgctctgtcgcccaggctggagtgcagtggcgcgatctcggctcactgcaagctccgcctcccgggttcacgccattctcctgcctcagcctcccgagtagctgggactacaggcgcccgccaccacgcccggctaattttttgtatttttagtagaggcggggtttcactgtgttagccaggatggtctcgatctcctgacctcatgatccgcccgcctctgcctcccaaagtgctgggattacaggctgcttcctttaacctagagcagttcactagcctttttcctaatctttcatgaaactgacatttttgaagactgggcagttgtcttgcaggtctctcagtttggatttgcctgattgtttcgtcctgaagagaggcaaattacacacttttacaagaatattatctctgtgtccctctctgtgcctcacaccaggggcatatgtcagtccctaccatcccccgtttgatcagtctctttgatgtgaaggtacccttttctctttagtgagtaatctatgggggtgatactttgaaaccatatgaacatcctcaacggtccactgatcatttcagcctgaatcaattattatcatggtggttccaagacgatgattttctatttctgtcatctattctacctttattagttggtcttctcctctacagaagagctttttctcctccacatcctctgcccctttgaattatcatctctcactacttgtgggatcttgaatcaatcacttactccctggggacctgtgtattctcatccttaagacgagatgacctaagagtgacactcttgaagtctggtcagtctgaaatgaaattcccataagaggctgggcgtgggctcaggcctgtgatcccagcactctggtaggcgcaggcgggcggatcacttatgccgtggagttcgagaccagcctggaaacatagggagattcccgtctttaccaaaaaaaaaaaaaaaaaaaaattaaattagccgggcgtggtggcgcgcttctgtggaccctcctactcaggaggcttaggcaggaggacggcttgagcccaggaggtcgaggctccagtgagccaagatcgcgccactacactccggcctgcggcatgcctcaaacctggggtccggcaccctgcggccttttcgcggccgcacccatggcaacagttaactagcaacctcgcgcattctcgcgagaatgagtcccctcaagggcacaggtgcggtccccagcctcttgggcccccagtcaacctcactgtccacaccgagccctcctgcgcacgcgcgctgcggagccggacagttggtggtgctggcttggcccggctgttcgtctccgcgccttgctccgaagcgcgcgaccgtggcgcgacacgccggcgcacaggcgctctcggggaggggcggcgcgcaggcgcggctgggggtgcgaggctgcgcaggcgcggacggcgttggtttgaagaccttcagcgttgccctggcggagcagagacaggccctcggggtggaggtgaggagagctgaggccgcgcgggctccagtcccggagagcggtgggccgcggccgagcagagcgccaggcgggaggcgggcctaacggaggctctgtgggcagggagcaggctaccggggcgcggggg

SEQ ID NO: 40393 - DNA, 2300 bp, Homo sapien
gcaaagcctcctgcaatcaccagacgcctcccaggttgctgacttaagagactgagccagtgaaagctgaggacgccttctgtggtgccaagtcctgaacatgggaattggcatcaatatggatggggttttttcgtttctgcattttattttttctaccctctattcttcttgcttcctggttcttcttccaactgtcagaagacaattacgatttttaataaaagtctgactttttctatacatggccttttttttccatctcttctttcccccatcttttggctgcagttggcacattcgctaaaaatatcatcttactgggagagtaaattatcctagggaaaattaaactgtgtgatgaatgagactctaagaataatataaatactaatataaatacttcatagggttgttgtgagaaataaataatgtaactgtattgaactgagctttatgtggattaatccttctagtcctcccaactactcttggtaattggcaatacaaataacctcattttacaggtgggaaactgaggcagggcaatgctgaatacccaaggtcctgtaactaataggatgcagaaccagaatttgaaccatgcctccagtcctgagccctggggtcttagttgtgacattatacagatgtgggaggtagtttaaaacactacatataatacctggtatgtaatatagcagttaatgataataaaaattgcatcaaccttaacaaatttttttttttttgagacggagtgtcattctgtcacctaggctccagcaatctcggctcactgcaagctccacctcctgggttcatgccattctcctgcctcagcctcctgagtagttgggactacaggggcccaccaccacacccggctaattttttgtatttttagtagagatggggtttcaccgtgttagccaggatggtctctatctcctgacctcatgatctgcccgcctcagcctcccaaagtgctgggattacaggcgtgagccaccgcgcccagcctcaaccttaacaaattatttctcttctcttaactctctttaaaatgtcttctggtatatttgggaacctggagtgcatgcgcacgctctctctctctctctctctctctctctctctctctatatatatatatatatttttttttttttttttttagacggagtcttgctctgtctcctaggctagagtgcagtagtgtgatctcagctcactgcaagctccatctcctgggtttagggattctcctgcctcagcctcccaagcggctgggactacaagacgcacgccaccacacctggctaatttttaatttttagtagagacagggtttcaccatgttagccaagctagtctcaaacccctgacctgaggtgatccgcccacctcggcctcccaaagtgctgggattataggtgtgagccaccgcgcccagctatttttgtacatatttaatatactagttagtgtgaagaagcagccacctcctaattaggaatataaaaaatctgggctggtcatggtggttaacacctgtcatcccagcacttaagaaggctgaggaggagcatcacttgaagccaggtgttcaagaccagccttggcaacatagcaagaccccatctctaccaaaataacaataataataataataattgtaaaatctgtataagggagtaaaggctgtcgtgaactatgatcgtggccctgcactcaaccagatgacaaagcgaggccctgtctcaaaaaaaaaaaaaaatctgtgtaaggatcttgaagttcattattccctcgaagcacaaccagtatttattcccagtcctgaagttagcgttaggttctgtagttgggtggctgttctgtcaggaatgtgacatcacctcccctcccaaagtcttattcctgattataaagtaaggccaggagtagcatctccgttcgagggacactatagtccctgagataatgaaggtggggtacctggcacagtgcccggcacataatcaatgcttcatacagtcattggtccctccctctcctcggagattggctgtaggacctccgtagataccaaaattcggccgggcgcggtggctcacgcctgtaatctcagcacttcgggaggccgagacgggcggatcatgaggtcaggagatcgagaccatccttgctaacatggtgaaaccctgtttctactgaaaataaaaaaatttgcccagcgtggtggcaggcacctgtagtcccagctactcgggaggctgaggcaggagaatggcatg

SEQ ID NO: 40394 - DNA, 2300 bp, Homo sapien
gggggcatcgggcatcaacagtcactgaatctaaatggctccacagataggggagtgtatacatcaccacaccagctgtccaggaattaggaggaagtgcccttgaatgaagcctgggctgcaagcctggttagcagccagggaggacacacacacgttgcaggtacagtattctgtattacacagattgtttctactgggaaggatatcatatcatttatcttgggggtagcttcagaatttgagtcagtgatgaaatgacttgctgctttcgttatgctcccttaagaagaacatcatatatttcgggatggcctgcataaaagaaacttgtaataatgaatattgacctataccttgtgttctgtttaagtatctgaggaagtaatttggaaaacttgagttaaaatagtctatattgtagtttttatccaatttgcacgttagccctaatcttcatttcagactcttccctgaatgggaaacttttagggaaagagagaatgatacactgattaatttattttcagcctacgaagctaggataatttaatgaaatctctaccagtcccatgttatgaattttagggttggagagctggattctggacgtgatctattctttaactaggaatgtacagcagaatgacccagggtttatcctgaaagtagcagatgtcttcacttaactcctgagacgcaaatttggtagagctgctgccacaggccccggacatcagtattaaaccatccttaagtgattctggtgccttttctccagtaagaagaaccagccctgtattttatatttaagaaaacctgggcaaacaaatgacttgcctagatttggttcagtggtaccaagatttagtcaccagataatacagtttcagaatcctatggctggaagaagtttaccaagtcatcaattcagtagttcatcttacagcggagtgtaaaccatgcttttcaattatttgcggttcttttactgtataccctgtgatgcccttttaagtttttttgaaaatattgtatacttaaaactgaagtgaaacattaaaatttcttattagaattatttttcagtcttagctgaaatacaatattgtatgaaaatttgcactgcattattagtttttttttttaatctagttgattttcaacttttcttttttaaaggcatctccttggaaacaatgccatctttgaatgtgagagataaacctagtttcagcatgtctgcagcagagaccagtacatcaggcttattcccacaggaagcctcctaaagcctgtggcgcggcaaccatttccaggactaaataataatgtgtcagatgcctgtgagtggactgcctggccaaatgactcatgaagatattcacggaagaatagtcaaaaaccaaagaaaaggcatattctagaagcaccttcaattccatcgaggatttttgagcagctgaagaagaaagttctgaaaatatgagtgacaggactccagcacattttttttagttgtttcttacattatctttgttaacccatccgcttttgtgtataatattaagttattttccactactgcaatggctagtaatttacttaggctcagagttttactctgtatggacagagaaataggaggtaacaacagtgggagaacaaataggaacagttcactgggatgttggtccccagaaattggctttcattgaataattcctaaagggtgtcgtgtgctgaattgctttttcatagtgatgtgctgcttcttgttcatactcttatgactttaatttcacctttatctactcccagcctctgtatatgcctacgtttttaaaaataatttttggcactgaagatctgattaccatattttttcagtttaaaaattaaatcctcgcaaatagatctttggtatagttgcattctaccctaggttattttctaggatcaagaatagaacaatttctgttctttccagcattactctttactattcatatgttcttgttcagtgttttgttgttctcatattctaggtggaaatgaagggtaatctctatgttctattttcagttttctaggaaaccagaaaaacatgggtagtagaaatgtatagaaaatgtatgaggtctcttaaccattgtgttaaacttgcattaagcttcttttttagcaatatcgatgtcagtgttacctcttctttcctttttatttattttttttgagacagagtctcattctgtcgcccagactggttggagtgcgatgatgcgatcgcggctaactgc

SEQ ID NO: 40395 - DNA, 2300 bp, Homo sapien
gacacacaaatctttcacaactagctacaatgtaaataacatccttaacatttaaatgcccagtaaaactgtgctagactcatcaacaaagtaatagccagtccactgttttttatttttttagtttggtattggaaaattagccttgtttcattatgtttgtttacccttaattaggaatgtcacttagaaattaaatatggaaagagggggccatttaagaaaggaccattagggctttctcaatatttacctttttccaatgtcctagcatagcctgttcactgggtgacaatgttatataatagaaactctgataaataagagacacggggctttggaaactattcagcacctaaataaagggactaattgtacttctatgaatttttaaagccatcttccaacttgaaaaacacattaatttactctatgggtaacattttatattgccaacactcttattttacaaaggcataaacaagcatttaatgcacacgtttgcccggcgcggtggctcacgcctgtaatcccagcactttgggaggccgaggcgggcggaacacctgaggtctggagttcgagaccagcctagccaacatggtgaaactccgtctctactaaaaatacaaaacttagctgggcgtggtggcgggcgcctgtaatcccagctacctgggaggctaaggaaggagaatcgcttgaacccgggaggcggaggttgcagtgagccaagacagtgccattgcactccagcctgaacgagagcaaaaccccgtctcaaaaaaaacaaaacaataacaataatgtacacgtttcacatttggacacactgaaatcaaactcacgtattcaaatttttttagattaagttacataaagcatgcacaccatttggcacaggcccggcaaacaatcagtactcaacatcacctgttattttcctgattttccaactttagagtcaaactaaatgttatagaattatatgtatgattatgtatatacaatatatataaatacatataaataccgtaaattaagctagtatgttattgcgtaaagtaatggtcttaccctagacgaaggtgagtttaattgtaacagatgaaacaaagaatagaaaacttgttaagaagtgttcaatgtaagctctcatctctgcagggtttcatgtgacttataattaccagtcagctggtcctagagaacttaatcaaaatgtatagtaaagacgaactacgtggaccagtggccatttatctgcaaggtggcaccagccactgacatctgatcacttccatactgatgctgaaatcctatgcaaattcattacttaggtcaagctgggaaacacttctgtcaagtcactacacaattaaataaaaatacccaaaagggacttacactgacaatgctatagcatcctggccatatccagttttgaaaacactacggtgtcagccacgcaccatttaggacggggagaatggaaagccagtttggagaacagacgctttcttaagagtacacgtgaatatgaaaagggactctatgctctcaagaccaaaaaagaaatcctctgcgccgcccggctacattgcgcctggtgggacaatgtacacgacccctcccccgccgagtcccaccccaagcgcgcacagcggagcaggaggcgcccggcactcgcaggtaatgcccggtccctgccacttccgtcgagttttcgcaaaggcgccgcacggcaagcgacggccaggtccacgtgggccagcaggcgcgggggacgcaacccgccgccgccgcgagccccgccggcgccgaccagccctggcccccacccgcgggagcccgggagtcgggccgggggctcgcgggaggcggcgcgcgcagcccgggcgggggtcgcggcgcggtaggggaaaggagcccggctccactcacgcgcccgggggcggcactggggccgccgctgcgtctctccggctcaaaaaactgaaaaggggaaaggaaaaaaaaaaaaaaaagacctggctcctcgtttcatccggaaaccgaccggccggcaggaaatgacgaaggcagagggcgtccaggtccgctcggtaaccgtttcccgcgcgcccggccccgactccggggtaaagagccccggagcggagcagcgctggccgcgtgccgcctccggagccggcagcgtgagtggccccgcgtccccgcttctcccggtccccggcggggccgcgtcacccggccccgccccgcgccgcccgccccgccccggacgcgggggtaagggg

SEQ ID NO: 40396 - DNA, 2300 bp, Homo sapien
ctgccccaaatatgcaggtctttaattacacttaggaaaaaatttctaattactgctgacatagaacggtaaaattttaacgtgaattatacaacctatattatacaacatgattggtatgtcatgaagtcactcttctgcgcttccaggcacatgcacttgagttatttttaggagtgtagttgtgaaagatttgcagaggggaggcctttcccgcccagtcctcaatcatgatcaatggcatgactttataaggctgccaggagtaaggagtgctctggtcctgagtcacagtacagacccacagcccacaggcagcctgaactatgaccccgtcccctcctccccggcatgccacagtgtaaccaagtgtacacacatacacctgctgcgtgcttactgcataccaccacagccttcctctggaatctaaagcaagacaccatttttcacattttcctgtaatgtaatgcttgaactatttcagtaaggagaggctaggatgggctgaattaagtctcaagtaaacaagagtatataaacttgccaatatattacaactaggggttggttttagattgacaaacttttaggatgagaactacttttttttttttttttacaaaaacagggtctcactctgtcacccaggctggagggcagtggtgcgatctcggctcactgcagcctcgacgtcccagaatcgagggattctcctgcctcagcctcccaagtagttgggaatacaggcaagtgccaccatgcctgggtaattcttatttttttttttttaaagacgggggtggggtgggggtcgtctcactatactgcccaggctggtctcaaaactcctgagctcaggcaatccgcccgcctcagcctcccaaagtgctgggattacaggcgtgagccaccgtgcccagccgagaactactttttctagggactaggtcactgtatcataagctttaaaatctgtgtcgtgattttgggttcctgatgtcacgtctaggtgattctaaaattgaccaccgcttgtcatcgtgccttgaatgttatcatttttgtctctcacttagaactttgttactttgatacaaattcacattggaaccacttagttcctagagtcccttacaacaaaatcctctgcatcaaaaaatgggatttctttctctcatccctctgaaacactaaaggcttggtattctgaagccaaagggtacatacaagctcacaggccttcacccaacatccaggaaagcaattcacaggtgctgggcagtccacagagtcactgaattatcccaacaaccctgctgggcggcactaaagctccattttacaggagaagaaactggggtggcggcggtggttatataacttgtccaaagccacacaggcctgggcgtggaggcgcggggctgttatacacacgactcccaaacctgaactcttccagtcttggccccgatcctgcgagacctgctccttccggaagaaagtcaagtggagcagggagaaaatgtaatcctctcccaggaagcagcccgggtcccagggcggcgaggctctagggacgtttccgccgcccgcaggctgcgcgtgattcagcctcaaccctcccgccgagcccccgccgccccggcagatgggccgccgcaactggcccgtgtgcgcttccggaagcgggcgactcgcagctccacgcgacgccgaggggctccgcgccgggaccgggcgggtgctcggagtttcggggaccgcacgggaccgagggcaggcgggcggccaccccccttacccccgcgtccggggcggggcgggcggcgcggggcggggccgggtgacgcggccccgccggggaccgggagaagcggggacgcggggccactcacgctgccggctccggaggcggcacgcggccagcgctgctccgctccggggctctttaccccggagtcggggccgggcgcgcgggaaacggttaccgagcggacctggacgccctctgccttcgtcatttcctgccggccggtcggtttccggatgaaacgaggagccaggtcttttttttttttttttcctttccccttttcagttttttgagccggagagacgcagcggcggccccagtgccgcccccgggcgcgtgagtggagccgggctcctttcccctaccgcgccgcgacccccgcccgggctgcgcgcgccgcctcccgcgagcccccggcccgactcccgggctcccgcgggtgggggccagggctggtcggcgccggcggggctcgcggcggcgg

SEQ ID NO: 40397 - DNA, 2300 bp, Homo sapien
agacatggaaacttttggaagcccagacactataactgtctttataatttatggaatctcaaacttcgttggtgccaaagtgtaaaatagcaaccaccaccaccgtgtttggcaaaaaaaagatgactttatgtgtctgatttgagatgctgcagaaggcccaggacaattatgcagcaagggaggcagctttcaggattgagagttattaacaaattaggcaagaaacggggaaccatacagcactggccactagaacatttcacgggtgtcatttatctgacaaattaaaaaatgtttcctattttctaatgacaaaatggatcagaaccaggttaatttcttactttaatttttcacaagattctgttcatgtgccactcagtaaatggtatattcctactcaaaagcgctacttcctcctgccccaaatatgcaggtctttaattacacttaggaaaaaatttctaattactgctgacatagaacggtaaaattttaacgtgaattatacaacctatattatacaacatgattggtatgtcatgaagtcactcttctgcgcttccaggcacatgcacttgagttatttttaggagtgtagttgtgaaagatttgcagaggggaggcctttcccgcccagtcctcaatcatgatcaatggcatgactttataaggctgccaggagtaaggagtgctctggtcctgagtcacagtacagacccacagcccacaggcagcctgaactatgaccccgtcccctcctccccggcatgccacagtgtaaccaagtgtacacacatacacctgctgcgtgcttactgcataccaccacagccttcctctggaatctaaagcaagacaccatttttcacattttcctgtaatgtaatgcttgaactatttcagtaaggagaggctaggatgggctgaattaagtctcaagtaaacaagagtatataaacttgccaatatattacaactaggggttggttttagattgacaaacttttaggatgagaactacttttttttttttttttacaaaaacagggtctcactctgtcacccaggctggagggcagtggtgcgatctcggctcactgcagcctcgacgtcccagaatcgagggattctcctgcctcagcctcccaagtagttgggaatacaggcaagtgccaccatgcctgggtaattcttatttttttttttttaaagacgggggtggggtgggggtcgtctcactatactgcccaggctggtctcaaaactcctgagctcaggcaatccgcccgcctcagcctcccaaagtgctgggattacaggcgtgagccaccgtgcccagccgagaactactttttctagggactaggtcactgtatcataagctttaaaatctgtgtcgtgattttgggttcctgatgtcacgtctaggtgattctaaaattgaccaccgcttgtcatcgtgccttgaatgttatcatttttgtctctcacttagaactttgttactttgatacaaattcacattggaaccacttagttcctagagtcccttacaacaaaatcctctgcatcaaaaaatgggatttctttctctcatccctctgaaacactaaaggcttggtattctgaagccaaagggtacatacaagctcacaggccttcacccaacatccaggaaagcaattcacaggtgctgggcagtccacagagtcactgaattatcccaacaaccctgctgggcggcactaaagctccattttacaggagaagaaactggggtggcggcggtggttatataacttgtccaaagccacacaggcctgggcgtggaggcgcggggctgttatacacacgactcccaaacctgaactcttccagtcttggccccgatcctgcgagacctgctccttccggaagaaagtcaagtggagcagggagaaaatgtaatcctctcccaggaagcagcccgggtcccagggcggcgaggctctagggacgtttccgccgcccgcaggctgcgcgtgattcagcctcaaccctcccgccgagcccccgccgccccggcagatgggccgccgcaactggcccgtgtgcgcttccggaagcgggcgactcgcagctccacgcgacgccgaggggctccgcgccgggaccgggcgggtgctcggagtttcggggaccgcacgggaccgagggcaggcgggcggccaccccccttacccccgcgtccggggcggggcgggcggcgcggggcggggccgggtgacgcggccccgccggggaccgggagaagc

SEQ ID NO: 40398 - DNA, 2300 bp, Homo sapien
gcaagacagcctcttttcctgtgtctatttgatgtccgcttttccccccaaagtctaaactcaatggagagatgatttgaggtttctacagtgggatggtgaagagttgagtatctttgcagggagaaaggtggctgtaaagtgagacagaaaagaacttcccaaggcataggaaggggctggcaggtccttctggcagcaggaccgtgccctgctcagggttgcactcaaggggtgcagtcctcagcaggccagggttgtgtgggacccagggaggcagggtcctgttaccaaggcctccggtattggcagaatcctgggtcttggcagaatccttggcatcggagaaggcaaagagcaaccgagctgttggctccatgggaccgtgtgggtggggcatggaccccagctgtggtcaaggcagcctggaggatacaagactgtgccatattttggggaccacaaaaggcttccagattcagttgctcccctagggagaaggctgcagggcctgcaatgactgagattggatttccagccagttccatggaaggctagcttcattttattcaatttcttgaaaataaaggtgaaacttcctgcacacttggattggcggtggctgatttactcctgagaccattacaaattctcagcaggctgggagcacagttgagatggataggaggaaatcagtgcatggctccttccttcctccttgcattcccacaacgttctcaagcatttgcaggtgtcaggccctggacacagagagatacagaggagactccagagggctggagaccaagccctcctgcaggagctggtggtctaggaagggaggccaggcagggcagcgacattgtgatgtgaggggctctgagacaggggccctgaggaacagacagggctcaagagctcagggtcccggggtcctgggctagacctcttttccacacatgatgcctccttaccgagcaccctctgggtgtctcaaactcactaatggcacacagaggagggttaaattaagaaatttaaaaattggactaaatcactgccgctaagacagaattcctccatgccctggagtgggttcctccagcactcagttcccaaccagataggtcttggctcccacctggccctcttgtctgtctagccctgactttgtacttgccattcatttgatgtatcatgcatttatcaagggccctctgggtgtgcacagcactgaactagatgaaatctgatcaactgtgaagaagaaaggatggtgttattagtgtccaagtctcatacataaaacaccactaacctcccaccctactgtcccctgcagtgaccagaaggtgggcctggtggggtcaagggagccacagagaatgtgctgatattaacacatgtgggaaccagcagaatagggaggctccaggacatactcatgacttcaggtccaactggaaaagagaatagagaggctgggcgcagtggttcatgcctgtaatcccaccactttgggaggccaaggcgggcggatctcctgaggtcaggagttcaagaccaacctggccaacatggtgaaaccctgtctctacaaaaatacaaaaattagctgggcatgatggcaggtgcctataatcccagctactcaggaggctgaggtgggagaatggcttgaacctgggagacggaggttgcagtgagccgagattgcaccattgcactccagcctgggtgacagagtgagactccatatcaaaaaaaaaaaaaaaagaataaaaagaaaaagaaaagagaatagagaaataacggggatgagaaacttttcactatggatgtggtaaagtgtggttcttctgtacgcagatctccaactgtaagaaaaatagcacagaacattcagaagttgtctagtttcatcctttctccagtgccccgcatctcttgcaagggagtaaattaataagtcaggagttaggacccagagatatgttttagacttacacgatctgacagctgactgcaaatcaatgaagtgcactttgagaagcggcacactcggcgagaggggttgagattgttttattccactccaggtgttgctgtcctcttgggttccacttcggattttgaacccctgtattttcttttcaaaacccccttttccagtggaaatgctctgttgttaaaaaggaagaaactgtctttctgaaactgacatcacgatgctcccagattttatgctggttctcatcgtccttggcatcccttcctcaggtaagcacaagtcacagtaa

SEQ ID NO: 40399 - DNA, 2300 bp, Homo sapien
tctgactccagagtccatattctctctcctgcattcctcgcctctgcagagctcttctgcaacctccagacatgaagccccccatcctcctgctctgcacccttggtatacggggacgcagttcacctactcctagaatggagcaagcgctgacttttggcgtattccaaaggactcctcctctagagtggctttttttttttttttttttttgagaatgggtctctgtcacccagtctggagtacagtgacacgatcaaggctgtctgtagcctcgaactcctgagctcaggtgatcctcctacctcagcctctcaagtaggtggaactacaagtgcatgccaccatgcccagctaattgttttgtgtaatttttgtagagacagggtttcaccatgttgctcaggctggtcttgaactgagctcaagggatctgcccgccttggcctcccaaagtgttgggattataggcgtgagccaccacgcctggtctttcttgagttctaactcctgtttaaccaacactgatatctggtcagaggcccaattaattagaaaccccctgacatggccgggtgcggtggctcacgcctgtaatctcagcactttgggaggctgaggcaggcagatcacgaggtcaggagatctaggccatcctggctaactgggtgaaaccccatctctactaaaaatacaaaaaatcagtagggcgtggtggtgggcgcctgtagtcccaggtactcgagaggctgaggcaggagaatggcgtgaacccgggaggcggagcttgtagtgagcagaggtcatgccagtgaactccagcctgggcgacagagcgagacttcgtctcaaaaaaaaaaaaaaaaaaagaaacccactgacattaaacttatacagaaaagaggaaaattataagaaaaccagtttaacagggatatttatttatttatttatttatttttgagacagggtctcactctgccacccaggctggagtgcagtgatgacatctgagctcactgcagcctctgtctctcgcgttcaagtgattctcctgcctcagcctcctgggtagctgggactacaggtgtgcaccaccatgcctggataatttgtgtatttttagtagagatggggtttcactgtgttagccaggatggtctcgagctcctgacctcgtgatctgcctgcctcggcctcccaaagtgctgggattacaggcatgagccacttcgcctagcccatttatttatttttgagacagggtcttgctctgtcttccaggctggagtgctgtggtgtgatctcagctcactgcagctttgatctaccgggctcaagtgatcctctcaccttagcctcccaagtagctggggccacaggcatgcccaccacgcccagctaattttctattttttgtagagatgaggtttcactatgttgcccaggctggtctcaaactcctggccttaagagatcctctgccttgtcctcccaaagtgctgggattaatgcatgatccaccatgctttgcaataagaatatttaaataaatgtgaaaatatccaggtggtatccattcctctcattctctgacatctagtctctagtcatggatcatcactgaactcaaaaaagagaaggcactggaaaccctggagtcagaaaaaagcaaaacaaaaacaaatttctgttctctccaagctgcactcattaagacagaaatgaggattcatattttagaaagttttctaacaaggttgagccttgattaactggagaactccatgagtcagaacaaacttgttgggacctagcatgagctttacctgtagttggagctcagtgaattcccctaagattacggttgagattgcaccacagaaagatctcagccactcacaggtgttcatcctcccggggtcctgtctgccccagcatttcttttctgcttttcttcccctttcttgcatgaagagacatctaggctgtcaggaaatgtgatgactcatctgacatcagatcgaatcttttttattcgcccttcatgtctgcctcagtctctgatcctggtaataaccgtgtgaagtcccggggatgttttgatttctgagaagacacacacggattgcagtgggcttctgatgatgtcaaggttggatgcatgtggctgactgatagctctttgttttccacaatcctttgcctaggaaaaaggaatccaagtgtgttttaaccatgctgaccagcaaggggcagggattccttcatgggggcttgtgtctctggctgtgtgtgtt

SEQ ID NO: 40400 - DNA, 2300 bp, Homo sapien
gaggagacatgaagagggatggatttaaggggcatttatttatttagtctacaaaattaacctggtcatcaacgggttttatgggtgacaaaaaaaatccaagatgactccaaggtttctggtttagacaactgttgaacagataattcacagatgataattcacagatgataatcccaaaggcagaacggatatacaaaggaaataaaagatgagagaattatggtatttggttcagtttaaggagcagggtgtttaggagttagaggagggcagaagatggaaccctggggaaacagcaacatttaaaagggcaggaaaggtagagaataagggccaagggattactcaacagtccgctctccaggtctgcctggctcagatctatataaagaaaaggagcagggaatgaagtaaaactgttacaggaaaggggtcccaatccagaccccaagacagggttcttggatctcacgcaagacagaattcagggcaagtccacagtacaaagcaaaagcaagtttattaagaacgtaaagtggtgaaagtacagctactccacagacagagtagggcattcccgaaagtaagaggaggaacgcgtccaccctaagtacaacacttagtttatatataggataaaaaaagatcatggggagatgtgctttgctacaagggtttgtgataaaggattaattactatattatgtaagaatcgatattatctttatttatgagacagagtcttactctgtcgcccaggctggagtgcagtggtgcaagcacggctcactgcaacccccgcctcccggattcaagcgattatcctgcctcagcctccagagtagctgaaattcgagggcatgtgccaccacacccggttaatttttgtatttttagtagagacgttttcaccatgttgaccaggctagtcttgaactcctgacctcaagtgatccgcccgcctcggccttccaaagtgctgggattacaggcgtgaggcactgtgcccagcccaatattattatctttaaagcaaaattaggaatgcttctgttctcaaaatatcgggatatctggacacttggtagtctgggtctgtgtagtaaacattatcaatctgttgccttaatggtatacacatctagaggctaggaatacctaacttcccgggaatgcagcccagcaagtcccagcctcattttcctagccctcactcaacacagagtcgctctagttcgaacccctctaacatattctctctcaggtgtgaaaattgctgcagcagttcgctatttgcaacacagcacatggaaatcacagcaatggagagccttcagaaaagcttctggggagggacagcctggtggctcaactcctgtaatcccaacccatggggaggtcgagatgggaggatcccttgagctcgagttccagactgacctgggcaacgtggggagacaacgcctctatttatttaaaaaattacatatatatatatatatatacatacacacacacatatatacatacacacatatatacatacatatacatacatatatataaaacgcttctgcgttggcaattgagatgatttggcgagtgtgtcttttttcattgctaaaaatctgtcacgttggctctcacagaaacttgtgatacctgaagacacaggtaatgggataaagattagcactctgggaaaaggttccacaattttattaatcatacaccatctgtgtccgcccttttaaagaaatgggcgcaatcagccaacgacctcggctttacacctgttctccaagaggccctagttgttccctactgtaagctgccccagaaaaggtccgcatcaattaacccacgggaacagcccggggctggaggatgccccaggaatccggcctcccgccgcgcctcctccccccacaagcagttccttcctgcctgccggaagctcagggctccgcccacttcggcaactctgaagccaccgccggaaacacctggcctcagccaatagttagcttcccaggaaacgttacctctgacctcggggctaatcagagacagtgggacgcacccctcgcgagaggtgaggttgaagctgcctccgccatcttggagatgggagacgggcgatggctgtggtccttctgctaatgcaaacaacaaaacgggcacactagtcacccccgagggaggccaccatcactgtaactgttggccaaagctacaaaagaagcgagggaatccaaccgagcgcagcgacactgagaacagcttcccctgccttc

SEQ ID NO: 40401 - DNA, 2300 bp, Homo sapien
gtgatccgctcgcctcggcctcccaaagtgctgggattacaggcgcgagacaccgcgcctggccacgtatgtgtaatttctaaaggtttctctgcccttggtgtagggaagaatgtttgaaaaaaagaccattgagaatacttcaggtaagtttttttttttttacacttacaaaatgctaaatgatcaggggtcaactatcaagtggtactctgtaaggcaaccttaaaaactcactgctgacccaggctcggtggctcacacttttgatcccagcacttttgggaggctaaggcgggcggatcacttgagcccaggaatttgagaccagcctgggcaacatagcgagaccccctctctacaaaaaataagaaaattagctgagcatcgtggcctgcacctgtggttccagctacttgggaggctgaggtaggaggatcacttgagcccaggaggcagaggttgcagtgaaccaagattgcgccactgcactccagaacgagaccctttctcaaaaaccaccatcaacaacaacaaaaaaccccactcaatgctgtcttggcagttttcagtgctcaatgagaaaacctactcttaatggaaaaaaagtgggggaaaggggttccaggaactacaaagcaaagtgtgtcttgggaagttagctttgttgcactccaaataaaaatttggcattgggtggtagttatgcatactctacgcatcgacaattctctaaggactccaaagtgcatgtcctggaaattccaacatatttgcactacgttccaggtacactagaatgtttatagccatgttctgagtggcctcagtctgaacaaaatgcccaaccagagtagaatggattcactgttctattcacactggaatactaggcaacaattaaaattacctatacatacacagtacaccaatttaatactgattgaaaaccacaaaacaacacactgtgatccacccgcaaaagttcaaaaacaggcaaaggaaaacgacatcgcatgcacacatagatggtaaagctgtaaggaaatgatcacactagtcaggctaggagacaatcaggctccgaaaggagcacagggcatgggtgagaaactcctggggtgccggtaatgcccttttcgtttttatctgggtgttttattaattcttctttaaacgtgtatgtcgtatgcacttttctgcgtatgctatatctgttaaaaatttatcggcagcccagcagacagattcgtgcctctaaagaggtggaagctccagaacgatccgcctcgccattaagcgaaggcaactccgaacgctgagaaacgcaggcccggggtcggccggtgtccttacggattggcgagcgggcgcacacccctcctgcattaaggagagttctcagggtcacgctccgagcgaccctagagggagcggcggtgtcctcgccgccgccaaacccacctagagccgctctccgcgtcggcccctccaccgtcgccggcgactccggacagccgcggggcgattctggggcttccagacgagggaggggcccggggggaaggaggcggcgactcccgccgccccgcagagcctcggcggccagagctaccccaagaaggccagaccccgccgtccgcggctccgcgggccccgatagggtgggcgtggccgccgcgcgccggacgtacctctccaccgcgaaggaactacctcgccagttcccggcgacagaggacagattatttccaggaccgctcccgccacccctcccgggcaacccactagacgtcccctttctaatttggagtgcgggtgcgggcgcacgcgcactgccgagcttccgcgagggcgcgaccggacggcggaggaggacccgtcgccgcagcctccagggcggagcgcgtgctcgcctcgacacgcagcgaactggtggcgggggcgcgcccggcggcagcggcggcggcggcggcggcggcggcggcgcggcggcgcgggtcggccggggcgcgagcgtgcgcagtggctcctcggcctcggctccagccagggcggcggcgctggggaggagcggtgtgggcggccgggggcggggacgcggggcggcgggcgtgtccgaagtcgcgcgcggctggcgcgcggtcccgagtgaaaggagaaggaggggcgctgggggtgacggtgcggagccgctgccagcgctgggcgagagtcggcggccggatccgaggagcaggcgggcctgaggccgagtcagctgcgcgggcccccggatcccccgacagagcggcggcggt

SEQ ID NO: 40402 - DNA, 2300 bp, Homo sapien
tatgaaatgcattttcaacttacggtattttcaacttatgatgggtttaccgggatgtaaccccatcgcaagttaaggagcctctgtacacctctttatttccatgtcttctttctccctagattttaaacaatgtagccctacttagattcaattagcttcatctttgccttctggctgcttcttctagcataaagggaagcactacttgcacagtctcaaaaacttaaatcttaagttcctcagcattctgtttacagatgtacagattctgccaaatctattccttccacaacatcaaagaatttagtaattctttcctctctctctctcccctgcctagtcagaaacctcagccacattatacaacttaccagtcttcctcttttctgaaatacagcagtgaaagccatctccttgcctggagggagaactcatcagaagggtaagctgcacgctaactacatactactgctaacgatctgaaatcccctaaatggtctgatatgcaactggctactcaagctctaccaagtctgtttcagaggacagaaattgattcgtgacgtagccaaactataaaaacctcagactatttttattaatttttttaacaaccaacgtaaggcaatacttctccagcctttccagcaaagtgccttgcacaggatcgtgacgtctacactccagggatcctgactcgtaacccaagacaccgctaaagagaatttctctcacattcgtgttttacctttaaaagtaatacaaatgctgtagtagccttcataaacacatccgtaaacatttaattaacattctcagcaatgagtgaaacggaggctcccgaaggcagcgcggggtccgcccgggctctgcgcatccctccccctccccggccgcgccgcggcgagaacgactggaacccgggcgtcggttcccctgccgcgtcctgaagacccggcttcaggaaggcgcggcagctgacgtgagaggtgaacatgtatttacttcaaagtatgaggaatctaaaaccgtttaagaattcaaaatcagaatcccacgactctgtcccccaaggccttcgagttccattgttgacgcccagacacctccagactcctttaaacgtctgcccgacgcctctgacaggcgtccgcccctcgcgcactcccaccgccagcggtgccttgcatccgaaacggggtccccgggcgcctcccgcattctccccacgctccctcacaggtcctttcagttcccgggccggagccgggcccgtcctccgcgaacgcggcaacaaaggcgaggagcggcggcgggtcctggacgcggggcagtcaggctcggccacccccagagcgcagcgcagccccagctgcgagcagccgcacggatcccagagtcgcccgccgcgttcccagcccagccccggccggggtccgcccggaacagcgacgcctcaggcccggcaagtctctctcggaccctgggccgagcctcctcgccccgcccgccccaggccccggatgtgacggcaccgtcgcccgcagcgctcgccccacgggccgcgcgtggagggtcccggtaggtggcggggggagggggtcttcccgccggcccgcggcccccacgtacccaagtgaggaggctctcgcacagctccgcccgctccagcgactctacgctgaacatcttccccgccgcggccaggcagcgcctaccgcctggccagacaccgccgccgctctgtcgggggatccgggggcccgcgcagctgactcggcctcaggcccgcctgctcctcggatccggccgccgactctcgcccagcgctggcagcggctccgcaccgtcacccccagcgcccctccttctcctttcactcgggaccgcgcgccagccgcgcgcgacttcggacacgcccgccgccccgcgtccccgcccccggccgcccacaccgctcctccccagcgccgccgccctggctggagccgaggccgaggagccactgcgcacgctcgcgccccggccgacccgcgccgccgcgccgccgccgccgccgccgccgccgccgctgccgccgggcgcgcccccgccaccagttcgctgcgtgtcgaggcgagcacgcgctccgccctggaggctgcggcgacgggtcctcctccgccgtccggtcgcgccctcgcggaagctcggcagtgcgcgtgcgcccgcacccgcactccaaattagaaaggggacgtctagtgggttgcccgggaggggtggcgggagcggtcctggaaataatctgtcctctg

SEQ ID NO: 40403 - DNA, 2300 bp, Homo sapien
gagtttccagtgacatttcaaaaagcctattctacaatactatactccctgacctctctacagctgataatgtggattactcgttttcttgacattttaggagattctaaatagattctctcatgttgtcaggttctgtcagcaggccttcaaacttctaagatttctcctgtatatttttatcagcatttctcacttaaataaatgcaattactacctaccatattttgtggatacccttcaaatacagacggtccccaacttaggatggtttaacttaagacttttcaactttacaatgatgcaagatacacattcagtagaaaccatactctgagtgcccatacaaccattatatttttcattttcagtacagtgttcaataaattgcattagatattcaacaatttattataaaacacgttttgtggtagatgattttgcccaattgtaggctaaggtaagtgttctgagcacgtttaaggtagaccaagctaagctaccgtttggacggttaggcgtatgaaatgcattttcaacttacggtattttcaacttatgatgggtttaccgggatgtaaccccatcgcaagttaaggagcctctgtacacctctttatttccatgtcttctttctccctagattttaaacaatgtagccctacttagattcaattagcttcatctttgccttctggctgcttcttctagcataaagggaagcactacttgcacagtctcaaaaacttaaatcttaagttcctcagcattctgtttacagatgtacagattctgccaaatctattccttccacaacatcaaagaatttagtaattctttcctctctctctctcccctgcctagtcagaaacctcagccacattatacaacttaccagtcttcctcttttctgaaatacagcagtgaaagccatctccttgcctggagggagaactcatcagaagggtaagctgcacgctaactacatactactgctaacgatctgaaatcccctaaatggtctgatatgcaactggctactcaagctctaccaagtctgtttcagaggacagaaattgattcgtgacgtagccaaactataaaaacctcagactatttttattaatttttttaacaaccaacgtaaggcaatacttctccagcctttccagcaaagtgccttgcacaggatcgtgacgtctacactccagggatcctgactcgtaacccaagacaccgctaaagagaatttctctcacattcgtgttttacctttaaaagtaatacaaatgctgtagtagccttcataaacacatccgtaaacatttaattaacattctcagcaatgagtgaaacggaggctcccgaaggcagcgcggggtccgcccgggctctgcgcatccctccccctccccggccgcgccgcggcgagaacgactggaacccgggcgtcggttcccctgccgcgtcctgaagacccggcttcaggaaggcgcggcagctgacgtgagaggtgaacatgtatttacttcaaagtatgaggaatctaaaaccgtttaagaattcaaaatcagaatcccacgactctgtcccccaaggccttcgagttccattgttgacgcccagacacctccagactcctttaaacgtctgcccgacgcctctgacaggcgtccgcccctcgcgcactcccaccgccagcggtgccttgcatccgaaacggggtccccgggcgcctcccgcattctccccacgctccctcacaggtcctttcagttcccgggccggagccgggcccgtcctccgcgaacgcggcaacaaaggcgaggagcggcggcgggtcctggacgcggggcagtcaggctcggccacccccagagcgcagcgcagccccagctgcgagcagccgcacggatcccagagtcgcccgccgcgttcccagcccagccccggccggggtccgcccggaacagcgacgcctcaggcccggcaagtctctctcggaccctgggccgagcctcctcgccccgcccgccccaggccccggatgtgacggcaccgtcgcccgcagcgctcgccccacgggccgcgcgtggagggtcccggtaggtggcggggggagggggtcttcccgccggcccgcggcccccacgtacccaagtgaggaggctctcgcacagctccgcccgctccagcgactctacgctgaacatcttccccgccgcggccaggcagcgcctaccgcctggccagacaccgccgccgctctgtcgggggatccgggggcccgcgcagctgac

SEQ ID NO: 40404 - DNA, 2300 bp, Homo sapien
aaaatgttcatacactttttgacctagcagttttacttcttttctaacccaataaataaaaatttgtgtgaagacatatggtcacctgagtgttattcccagtattctcattgtctgtactgagtttagcttcatccgtgttagtatataaacctactcaaatgggtcttcctgtctctttccctccactccttccttcatactgcagccggtatgatctttttttttttttttttttttgagacggagtctcgctctgtcgcccaggctggagtgcagtggcatgatcttggctcactgcaacctccgcctcccgggttcaagcgattctcctgcatcagcctccagtgtagcttggactacaggtgtgtgccatcaggcctggttaattttttgtatttttagtgaagagacaggatttcactgtgttagtcaggatggttctgatctccagacctcgtgatccatccgactccgcctcccaaagtgctgggattacaggcatgagccaccgcccccggccagatcttatattaatacaatgcaaacctcatggctcactcccctggttcaaatcctttgcttactttattcatagaataaggtcctaatgtggcttctaaggttttacatgttaattcttcagttttttgccctgtctttcaccgttttaattctcccctgttctgtttcttcctccaattcttacccctactcgatctgtaccaagctgctcttcatacctaaattgcatcccactctcacttctcatctttatgcctgctgttgacacttctattatactgtttcatttttcctagttgtaagttctatgagaggatggcctgtgtctgtctgttctcagggattgatttccgtctaaatcctgagtacactactgggtagctggctcagctacattttcttactttgagagagaatttatactattagggaaagtacatttcttggctacatcatgttgattagtacaaagtttcagaatatatttgaaatcaaaatgaagtgaatatctaacctaaccattctaagtgtgacttctacatctgtgtaaagatatttggcctccgagtaacagaaactgcaacctcaccagatgtaaagaataaatgaattcatctcacataccgggaggcatcaagatttttaaattcagtagttcagtttttacctttaggacatagttctttttttttttttttcctgtttctttttttgggggggggggtgccgtggtggaggggatatagttctttctagctcttctctctgcctttcactgcattggcctaatcttaagatgattgcctttgtagtcatgagatgacggctcacagtaatggaggcagcatacttaaatcaacaggagattggcttttctttcccagaagcatctccttatctctctttagtccaaattgtcttttccctgtgtgtccctgagtcagtcactggtagaggggatgaacgtgccgtgattttcatagattgatcttgtgtgagtagaatggatgctgggaagccacccagtatccaccacgatttctcttttaccagtggggaagaattacagtaatacttggcaggacatttcccttaaaggcaaaagtttccaattagacttctttttaaaatttattccaatccctaagatgagataatcaccaaaaaaaaaaaaaagcctaagaaattttcagccaggtgcggtggctcacacctgtaatcccagcacttcaggaggccgaggcgggcagatcacctgaggtcaggggtacaagaccagcctggccaacatagtgaaaccctgtatctactaaagatacagaaaattagcagggcgtggtagtgcgttcctgtaatcccagctacttgggaggctgaggcaggagaatcacttgaacctgggaggtggaggttgcagtgagccaagatggggccattgcactccagcctgggtgacagggctagactccgtctccaaaaaaaaaaaaaaaaaaggcctaagaaattttctacagaggtaaccacagaatctctcccccccccctctttttttcccttcagatccagacatttaatgtggatgcaccatgccagaccgtggaagatttaacgaatggggttgtgatggcccaggttcttcaaaagatgtaagaataaattgcttatctttatgtgtattcttatgcatggatatttgttaggttgaaaacatggattaaaaaagtacttacatgaaacgtgtgtagagtaagagttgtaggcggcagcagcactag

SEQ ID NO: 40405 - DNA, 2300 bp, Homo sapien
tcccagcactttgggagggtgaggtgggtggatcataggtcaagagatcgagaccatcctggccaacatggtgaaaccccattgtactaaaaatacaaaaattagctggacatggtgttgcacgcctatagtcccagctactcgggaggctgaggcaagagaatcacttgaacctgggaggtggaggttgcagtgagccaagatggcgccactgcactccagcctggcgacagagcaaaactctgtctcagaaaaaaaaaaagaaaaacaaaattagtcaggtgtggtgccgggcgcctgtaattccagctacctgggaggctgaggcatgagaattgcttgaacccaggaggcggaggttgcagtgagccgagattgcgccactgtactccagcctgggcgacagagcaagactcagtctcaaaaaaaaaaaagattattttttaatgttacagcatgtttaaaacaatttatgatgtttcaaataatgctactgatcattttgtgtctgcttactggcttgatcagagagagttgtatatctcctcccagcaggcacacagatagatacacatatactgtctccagtgtcatgagtaaggcagtggtagtatatggagatgggtagaaaagtttatcatagtcttaatattcaggactgaacttcttattctctatattttatgctttacttcagttttatgatgccattgattaaagacaagatatacgaccgggcacagtggctcatgcctgtaatctcaacattttgggaggccaaggtgggcgaatcacctgaggtcagaagttcgagaccagcctggccaacatggtgaaaccccgtctctactaaaaatacaaaaattagccaggtgtggtggcaggcgcctgtaatcccagctactcagaaagctgaggcacgagaattgcttgaacctgggaggcagaggttgcagtgagccaagattgcgccattgcactccagcctgcctgggcaacagagggagactctgtctcaaaaaaataaatacataaataaagataagatgtagctttttgtgatgtgatttaaaaaactaccattttaaatgaatggtagttgattttcaaggcatctaatttcaaatattaaaaatacgggaaaatgaacatcctagaatgaaagaaagcatattatatgcattttccatatctgcaaatttttgtagatgtttaagcatgttaattttatgagacctgtaaagataaataagcaagttttcagtttattttcttccttacaaataaatatgcctttaattaagtactggatcacattgctgtgattcaggctcttatttgaaagcctcagtccctactagcttcttttctaggatgtctcaactacagacaccacccagggacagctagatcaataaaataatcaatagaactatatcacatacccatttaacctaacaaaactgtatgagttgggtcaaacagaaagaaaaaaattatagtttacaataaatagggcaggtgattctgcccattcttcacctaacattatggctcataaatacttactttgatgtttgactaaagaaacaatagtttttttttctggtaggggaagaatttagagacattatacttcatgggttattttaaagattattttactataatttttgcctaatactctctttagaacttaatttctatatagatgcagtttgacttttctagggagaatagctctgaactcaagtcttcattaaggatggcatatttttactttacccacagaaaacctaaataatttaatcttattgttaagtctcattcagttaccctccagttgttttcagtgtggtcataacattgaaaattctacataattggagacataatttgttttataaatctcttggattatatagtagtactttttgatgatgatgataattcaaatatgcttttgaattttatttgttaatatttactttatgattaactgcagtgattggttggctcagaaattttttatgttaaattatgttttgatctgtcttgccttttacccagttgttttctctctctttaaacagataagcaatttaaagaaaattttaaaaggaatcttggattataatcatgaggtaaagacttttttctcattctgcttagaagtgttactatcggatagtttaattttataatagtttcaagttaaggaaaaattgctttcaaaattaataatcagtttgtcgttcattttatagtttctataataggatgatggttcaaccaaccat

SEQ ID NO: 40406 - DNA, 2300 bp, Homo sapien
aacagataatagaatcacaaaaatataaaacagtgccactcttctcactttttttgttttagaaaatagttatttttcataaagagtatgttgtttttattaacataatgggtttattactgtaatccactgtgccagaccatatgtgttaattttataataaaaaaagcccttaaattgtatctgcaatatttcagaaaaatgttgcatgatgtcttgctttctggtagggaaatagtaaccagttgtcaccgttcccaagacttgggacagtggagttcatttttatgacagttagtgcttgagaatgcagcttgtggccactaacatgggagacatactcaagaaggctttattctcatgctttatatctttcttttactgttctaaggagaatgaggaggcagtaaatagtgctttcttggtctattttatatcggttacagactagaagcagccaaagatgattatcgaatacgttgtgaagagttagaaaaggagatctctgaacttcggcaacagaatgatgaactgaccactttggcagatgaagctcagtctctgaaagatgagatcgacgtgctgaggtaaaaacctcaccttcaccgcccagcacagtttggctctggtgttagaaactctagggtttctgaggatctagcaaacttaagagccaggctacctgggctgggatcccgggtctactgcttatgcaacctctgtatggctgttttctcatctgcaaaatggaaacaatacacatgcctacctcaggtttatatgaggagttgagtgaatttatatttgtaaacacttgcaacagtgtctggcaattaagcgatacacaagtgtttgtaaaatagaaattgtgaccatcacttcttacttgtacagctctggagctgttcttccgccacgcccgcaaggcctcattttcttgctgggccttgttattaccccttcagttctctcatgaggtgcctcactccctgtcacctcattttttcacccctctgcttgtacagtctcctatcctctgttgattatctcaaccatctacattttccacttttgctctttgaatactgagaacaggggaaatgcataattgatagttttgtgctcctgccaattggtggcttccttctgagctgggttcttcccaatggcccgccctccccttgctcattgtctcactcatagccattctgattcctcaggattctactccccggctgccctccacacacacctcccatgacttagtctcaatagatgaccttgtctcctatagcagcgaagaaagaggccgtgaactgctgaactctccatgtcttttgtctccaaaacctctaaacttccctgggttcccacccaccctttctttagtgagtgtagacctgttattcttcctcctgttcagggctaattccttcttcagtgttctggacctctacctttctggcctacgcggggactgtgttacatcaatcctcatttcttttgccttttgaatctctctccttcatacacatgcacacgcgcatttaggtctctttaatcttaaaaagagagggagttattactctctccttcccactagaaccaaacttagattacataaggtaaaattgacattctctcctcaaccccactatctgcccacactaccccactgaagctgctattctggtggtcactgataattgccaaattattcggacactgttaaacttacttttcttttgtgccacatgtgactctgctggctgccctctcctgcttggtttccttaaattattattctccattaaacatttagttgtaacttaggtcatatttgttaacctgtgcagaaaattaacctggaatcacttttgtcttatttcattagatgtgtgtttcctggcaatccttcttaacactgaaacaactttacaagtgtggatgtgtttctgatttttttaatttcccatctaattctagacattcttctgataaagtatctaaactagaaggtcaagtagaatcttataaaaagaagctagaagaccttggtgatttaaggcggcaggttaaactcttagaagagaagaataccatgtatatgcagaatactgtcagtctagaggaagagttaagaaaggccaacgcagcgcgaagtcaacttgaaacctacaagagacaggtaaaagaaacacagcatcttgatgatggtttcaggcaagctctcagttatgacatgtagcttaccaaaattactaatttgttttcatggtattctgttttttaccttttct

SEQ ID NO: 40407 - DNA, 2300 bp, Homo sapien
tttccatttttgccaacgtagtggatgtgtatggtatataaagatatttctaatttgcattttcttgattactaatgagattgatcatctcttcatgcatttatttgccattttgggttttctgttttgtgcagaatcttaagcttttatgttttgcctttcacattgaagtctatgtagtataacgtagggatgcaatttcttttcctctgtgggtgcccaattgacccagcaccattgttcagaacaccgtccttttctcaatcttctgcaatgaagcctttgtctagtctcaagcatccacatatgcatggatctgtttgtgagttctctactgtgtcccattatttgatgtagctatttctgccctaatactataccctatttgaacaaaaagaggatgatttaatgctaatatatggagtggagaaattcaacaaggcctgtctgttcaggtttccttggcctcactgttcctccctgcaacacccagtggaagaggagccctctggaactagggtttagtttctttacagccagctgtcacatagaaaggcagggctggaggaaggttagagtagtattttcaggtgccacggctggctttgggggaaaagggttctggtttctatgacctgccagggggaagagagattctagttgctgtggcttgcttcagagaggatgagtggccacagagaggagggcaggagaaggtcagagagagactgtgattgtgaagctgatgcttagaccttcatttgggatattcttttctgagccccaacaacatacattcatatgacccattgttaatgaaaagagtcaaactctggaaaatatttgaagagatttattctgagccaaatatgagtgattaatggcctgtgacacagcccttaagagatcctgagaacatgtgcccagggtggttggggcacagtggggttttatacattttcgggaggcataagacatcaatcaaatacatgtaagatacacattggttcctttggaaggacaagacaactcaaagtgtagggagaggggtgcttccgggtcctaggccgatttaaatatgttctgattagcaattggttaagttgttatcaatagaatgtccaggttgtgataaggggttgtggagaccaaagttttattatgcagatgaagcctccaagtaacaggcttcagaaagaatagattgtaaatgtttctcatcagacttaaggtcggccttgatgttaatgacccaccctcacccccacctccttccatcatggcctgaacaagtttttcaggttaactttggaaagcccttggcagagaggaagggtctattcagatggtttggtgttgggttcagaattttattttttggtttacaccattatatccgatcatatataaatacaaacaaaaacttcaccaaatattactttctttttctaatggtgtgtgtgttttgggacaggatctctgtccctcagactggagtgcagtggtgatttctgctcactgcagcctcaaactcccagctcaagcgatcctcccacttcagccttccgagtagctggaaccacaggcacccacatgatgcccagctaatttttgtatttttggtagagatggggtcgcattagattgcccaggctggtctcgacctccctggctcacatgatcctcccgccgcggcctccgagcggctgggatcaggcgttaatcaccgcgcccgggctttatatttcgttttgaaaatgctgagatggacgcaaagggctgagtgctcagtgtcccccagtcaccctcagttgcagcttccgtccaaagaaggaatcgccctctccctgctggggccactaacagcactaacacggtccgaatggcatcggcaaagctcgggaacggcgacagatgggaagacgcgtgggagcctgggggatctcgggagagccgcgcaaactcgcggcggacgcagccagcacccgcagccagcacccgcacactcccacccataccccggcagcccgccaagactctctggcccgcacctctatggtaggaaacccagaaaacaggaagtggcctcgagagggggaagggaggggcggggcctccgccaccacctcagctgcggaccgaggcgagatggcggccaccgagggggtcggggaggctgcgcaagggggcgagcccgggcagccggcgcaacccccgccccagccgcacccaccgccgccccagcagcagcacaaggaagagatggcggccgaggctggggaagccgtggcgtcccccat

SEQ ID NO: 40408 - DNA, 2300 bp, Homo sapien
ctataccctatttgaacaaaaagaggatgatttaatgctaatatatggagtggagaaattcaacaaggcctgtctgttcaggtttccttggcctcactgttcctccctgcaacacccagtggaagaggagccctctggaactagggtttagtttctttacagccagctgtcacatagaaaggcagggctggaggaaggttagagtagtattttcaggtgccacggctggctttgggggaaaagggttctggtttctatgacctgccagggggaagagagattctagttgctgtggcttgcttcagagaggatgagtggccacagagaggagggcaggagaaggtcagagagagactgtgattgtgaagctgatgcttagaccttcatttgggatattcttttctgagccccaacaacatacattcatatgacccattgttaatgaaaagagtcaaactctggaaaatatttgaagagatttattctgagccaaatatgagtgattaatggcctgtgacacagcccttaagagatcctgagaacatgtgcccagggtggttggggcacagtggggttttatacattttcgggaggcataagacatcaatcaaatacatgtaagatacacattggttcctttggaaggacaagacaactcaaagtgtagggagaggggtgcttccgggtcctaggccgatttaaatatgttctgattagcaattggttaagttgttatcaatagaatgtccaggttgtgataaggggttgtggagaccaaagttttattatgcagatgaagcctccaagtaacaggcttcagaaagaatagattgtaaatgtttctcatcagacttaaggtcggccttgatgttaatgacccaccctcacccccacctccttccatcatggcctgaacaagtttttcaggttaactttggaaagcccttggcagagaggaagggtctattcagatggtttggtgttgggttcagaattttattttttggtttacaccattatatccgatcatatataaatacaaacaaaaacttcaccaaatattactttctttttctaatggtgtgtgtgttttgggacaggatctctgtccctcagactggagtgcagtggtgatttctgctcactgcagcctcaaactcccagctcaagcgatcctcccacttcagccttccgagtagctggaaccacaggcacccacatgatgcccagctaatttttgtatttttggtagagatggggtcgcattagattgcccaggctggtctcgacctccctggctcacatgatcctcccgccgcggcctccgagcggctgggatcaggcgttaatcaccgcgcccgggctttatatttcgttttgaaaatgctgagatggacgcaaagggctgagtgctcagtgtcccccagtcaccctcagttgcagcttccgtccaaagaaggaatcgccctctccctgctggggccactaacagcactaacacggtccgaatggcatcggcaaagctcgggaacggcgacagatgggaagacgcgtgggagcctgggggatctcgggagagccgcgcaaactcgcggcggacgcagccagcacccgcagccagcacccgcacactcccacccataccccggcagcccgccaagactctctggcccgcacctctatggtaggaaacccagaaaacaggaagtggcctcgagagggggaagggaggggcggggcctccgccaccacctcagctgcggaccgaggcgagatggcggccaccgagggggtcggggaggctgcgcaagggggcgagcccgggcagccggcgcaacccccgccccagccgcacccaccgccgccccagcagcagcacaaggaagagatggcggccgaggctggggaagccgtggcgtcccccatggacgacgggtttgtgagcctggactcgccctcctatgtcctgtacaggtaacgcccccgcggcggccgcggctcgggacactccctggaggcccagcggccccaagacccgcggcgcgcgcttccggccccggcgcgccaggccgaagttcccgtggcgccgcgtgggccggtgcatggcgctgggcccgggcggctgccgggacgtcgccgcttcccagggcggcgccggcgcgagaccgcggggacgcgaagcagcgaggtctcggctttccgcctgctttaagccacgcggaaactgctgcacccttgactgcactcgttcagctgttcaggcgtcgcgattcgtaaatataagaaatttcccgctctct

SEQ ID NO: 40409 - DNA, 2300 bp, Homo sapien
gaggacccttctttgtccccaaccgatcacagattggatgtattttactgtatttcatgtatatctcatttatataaaatacactaaaaatcaattactttaaaaatgagtctgggtacagtggctcacgcctgtaatcccaacactttgggaggcccaggcaagtggatcccgtgaggccaggagttcacgactagcctggcaacatggcaaaaccccgtctctacaaaaaatacaaaaaaatgagacgagcgtagtggcgcatgcttgtgttcgcagctactcaggaggctgaggcaggagaatcacttgagcccaagaggtggaggctgtggtgagctatgctcacgccaccacagtccatcctgggcaacaaaatgagaccctgtctcaaaagaaaaaaaattaaaagtgaaatacacacacacacacacacactactactcaccagtcaaaagaaatgaatgatccataccggcaacaacttggatggatctcaagggtatgatccttagtggaaggggaagtctcaggtttcatactgtatggctccattgagataatatccttgaaacagcaaaattatagacgtagagaacagatcagaggttgccagggtgagggaaaagggggtacagctataaaggggtagcatgaggtagtttctgtgtgctgagggaatagttctccatcttgattgtggtagttatactatacatgggattaaattgtgtagaattatattctacccccactcctccacctgtcccacatacccacaagtgagtacatgtaagatctgaataaggtgagcggttccattaacaataatgtacagatgtcattttctggttttgggattgcactttagtaagatgtttaccatttggggaatctaagtgaagggtacacagggcactgtgttatttttataacttccatgagtctgaaaacaaatagaaacatatgtatagaaaacactactctttgtttttcattattagactctacagacattaaattgttacattgatacaaaagcttgtaggtgtttactctctatccttagcatgctggagactgagaacagtgggaggacaccaatcagtgcccacactaggcactagttcctgaactccactaggaactttcacaaaaatgttactttccttaatgcgtttatttttatgatcacctgtaaaatcggggactatcataggagattcttacttttttgctgttaccaaataagaaaactccattatcttttttataatgtcccctactttcaaattatttataagttttttttatcattttcctcttttaaattatctttattggttctcttcccccatttttttttattaagagagctttataatataaaaaatttatattgcctgggtgtggtggctcatgcctgtaatcccagcactttgggaggccgaggtgggcagattacttgagttcaggagttcaagaccagcctggccaacatggtaaaacctggtctctacgaaaactacaaaaattagccggttatgttggctcacacctgtagtcccagctacttgaggagctgaggcaagaatatcgcttgagtctgggagttggaggttacagcgagctgagactatgccactgcactgcagcctgggcgaccaagtgagacgctgtctcaataaaaataatagaaatttatatctttgtccaattgtgtatatttcttttctttttctttttcttttttttttttgggacagggtctgtttctgtcgcccagagtgcagtggtgcagtcatagctcactgcagccttaaactccggggctcaagtgatcctcttcagcctcctgagtagctgggattctaggcatgtgccacgatgcccgactaatttttttatttttattgtttttattttttggagacagagccttgctctgtcccccaggcttgagtgcaatggcacgatctcagctcattgcaacctccacctcacgggttcaagcgattctcttgcctcagcctcccaagtaaccgggattacaggcgcctgtcatcacacccggctaatttttgtgtttttagtagagatggggtttagccatgttggccaggttggtctcaaactcctgacctcaggtgatccacccacctcgacctcccaaagtgctgggattacaaacttgagccaccgtgcccggactgtctttattatttttccagacaagatcttgttatgttgcctctgctggtctcgaactcctggcctcaagtgacctttctgcctcagcc

SEQ ID NO: 40410 - DNA, 2300 bp, Homo sapien
ttgggagttcaagaccagcctgaccaacgtggagaaaccccatctctactaaaaatacaaaattagccaggtgtggtggcgcatgcttgtaatcccagctacttgggaggctgaggcaggagaatcgcttgaacccaggaagtggaggttgcagtgagctgagttcacgccattgcactccagcctgggcaacaagagtgaaactgcctcaaaaaaataataataagatatattaatatcaagtcacatcaaatttatatctatactgtggtcactccttctcttactagtgagtttggggtttttttccctcaaaattttcttggatgtcttttttcctgctttctgtatgtgtctttccaggctctatcatcaatttcatacttgtatccccctctatttcctttacttgcagctatcactaccttctgaatttgtgataaatcctgtgtcctcagttctaccttctttgttgtagttttaatttattttttattcataaataatgggacatttctaattggatgatttttctaaatttttcctttaggaatttaaactttgggataatgagctgcagtatgtggaccaacttctgaaagaggatgtgagaaataactctgtctggaaccaaagatacttcgttatttctaacaccactggctacaatgatcgtgctgtattggagagagaagtccagttagtaatctccttcacttgctcattcgttacaaacatgtttgcatgcctaccatatctcaggcactggggatacagcagatcaagatcctaccccatggaactaaaagaggacagagtactgagtggaacataggatgatagatttacaaataatgtagcatacttctacttcattgtatcttaagtttcttgaaatattgctactggagattggaaagaaatcttaatgttatggggtattgtctaagaagctttattttaaaaccatctcattaaattttgttgcattttagataatcgtccccagatgccatgttaccctagtgcagagtttggggctggataagtttttgttgtaggtggctatcctgtgttttgtagggtatttagcagcatcctggccttaaaacaaaaatgttttcagacattgccaaatgtcccccgagcggtaaagtcacccccaagttgagaaccgctctatacaaagagctgttattagagctagacatttctgaattggcatcaatttctatattgtatccataaacattagtagccacgatttttgtgaccttatttgtccattgtgtctgagtgtctgttttacaatttgaacaggcttgttgttttcagagcctgatgagatgggagtcataattttagtgtaaatgtgtttgaacaactgttgagtggagctgatttgtatagtgcatctcctctcttccaagctcttgattttgcctggatcgaggcagcttgctcttcttttatctgctctatacaggattctggtgacttaaaatttataaaaggctttaatccatgtctcaccttaacactctgctctgggcttttgtctggagcgtgcactacccctcaagcacacttcatgctttttttctagtgctctcctatataaagctgtacaggcatacctggttttttgagccttgtatatattatgttttttttttttgtttgttttttgttttttttaacaagttgaagcatcttgagcaatcttgagttgagcatgtcttcattgccattctttctaacagcatgtgctcacttgtgtctccgtgtcacattttggtactcctcagtatttcacattttttcataatcattatatctgttccagtgatttgtgatcagtcatctttgatcagtcatctattgtaattgtttgggggtgccactaactgcacccatataaaacagagaatatcactgttgcatgtgttccaccatctctctccctcacctcaggcctccctattccctgagacacaacaatattgaaattaagccaattaaccctacagtgtcctctgagtgttcaagtgaaaggaagagtcacagcctctcactttaaatcaaaagccagaagtgattaagcttagtgaggaacacatatcaaaagctgagataggtccaaagctaggcctcttgcaccaaacaccaaactcataagaaagagttcttgaaggaaattaaaagtgctgctccagtgaacacctggacaaaacagcattattgctggtatagagaaagtttgagtggcctggataaaagataaaaccagccacaacatt

SEQ ID NO: 40411 - DNA, 2300 bp, Homo sapien
gcagtgctactgaatggaaaggactatctctttccctcagacttttggctgctgaagctttttgctctggccttgggcttgactgggggctggagtgcaaagaaaagaagaaaatagaaagaacagggaattttcttcactccctctgagggttaggagtttccttttctgctccacgagccagaatcagagggtttctcccgagtctctgtgtgtgcccccgacactcagttccaggctttggactaccttcagcttgaagatgggtgacacaaccagtttgatggtgcgtcaaattctgctgttctttttatttttaattttttgtttgaatttaattcctctaatttttcatcagtgttaaaatttcaccttttcccagcacccccaaaaagcctgtgggcacaaaatggtggccacgtggcaaagaactcagcaaggagagctgctggttggtttctatctttgtttgtttgagacggagctttgctcttttgcccaggctagagtgaagttgttggggaaaccagccccacaccacccggcgggtaccccgagtccagcgaagacaaaggaattagaataagagtttaaaaggcgggtccgggggaccggagcgttggaggcttgctcacggccccgagctctcggcctccacccaatttattggtgtatattcacactgttgtgcaaccatcacccccatccatctccaggactttaccatcttctcacactgaaactgtgcacccgttagtatttttcatggctatgtggatgtaatataatttctttcagaaacccctattgttatacattcaggtttctttttttctctattataaatatcttttatcagcaatgcttcagcaagatctcttgtgcatacatcttgcagacatattatttctttttctttttttttttttttttttttgagacggagtctcgctctgtcacccaggctggagtacagtggcgcgatctcggctcactgcaagctccgcctcccgggttcacgccattctcacgcccgccaccatgcccggctaattttttgtatttttagtagagacggggtttcaccgtgttatccaggatggtctcggtctcctgacctcgtgatccgcccacctcggcctcccaaagtcctgggattacaggcatgagccacggcgcccggccacagacgttatttctgaaggataaattcctagaaatggatttgctagggcacgtaggaggaattccaatttacactcacttgtatgtgtgaggaaactttcagactctactgtaacgacaggaggtattaccgctgtttgtccatgtgataggcaaacgtttctgttaattttaatactgtttggatagctagtaccggctcagtttttttaacccacaccatgttactgtcttgattctggactttcgcagtgtgtcagtgtagaagcagctaacgcttccgatgtacacaacctagacgttccatgacccagctgacttcgatgctgcaagcctccctttcggtttcccggagcaagcgcccgagtgcgtgttgggctcccggcagggctcctggccggccctcgacggacttccccgcctttgcccagtcctgcccctccgcggaggcttgccaaggtcttgtctgctgcgcttgatgtgtgcagctcagctttactgcgtctaggctaagccccacagtttcttttacagagcgattgtccaacttcaggcatctgggtccccgagtggcgggtctgggccggagctgggaatcagcctttccagcaaggtccctgcagatgccgcgggtctgaggactacgctttggaaggcctcgcagtgcgtctagatctgacagctgctctgcatgagcctggctccaggctgaagcaatagtcggtcaacacaaaatcgttctcccaagttagggaagcagaagccagacagggagactgggtaggtgcgcgctggtaccgccgcggcgttcgctccggcttcagtgcacggccggaggaggacgccagggggcagcagcgccacgctcacccgcccaggacgcgcttccgaacgcgcaagcgcagtaggcccagtgcgtgctggcccggggtggcaggagccgcagaggcttgggctgcaggtaggtgctgcggcgaggggtgagagggcgaaggggcgagggggcgtgcagctgggtttcccgggggaccctgtacgtggcctgggccgcaccccccgcagccccggccgcctgcccgcggcctgtccggaggctccctaggaggctgcgctgg

SEQ ID NO: 40412 - DNA, 2300 bp, Homo sapien
taaactggctggcttaggattggtttcaggggaagggaacccagaagcccaacatgccagcaaaagggtaaagttgtttaccattcggacttttggcccccttctccgtgtacaaattggtaaaaagcctcaggatttttgagctgtccttatccctccccttgtttcttttcttttctttttttttttgagacagggtctcactctgtcgcccaggctggagtgcagtgatgtggtcttggctcactgcaacctccgttcaaacgattctcctgcctcaacctcctaagtagctgggagtacaggcaggcaccaccactgctggctaatttttgtatttttagtagagacagggtttcaccatgttggccaggctggtcttgaactcctgacctgccaggctggagtgcagtggcataatcttggctcactgcaaactctgcctcccggattcaagtgattctcctgcctcagcctcccaagtagctgggactacaggtacttgccatgacgcccggctaattttttgtatttttagtagtgacagggtttcaccatgttggccaggatggtctcgatttcttgacctcgtgatccacctgccttggcctcccaaagtgctgggattacaggcgtgagccactgtgcccggccatatgtgtttaataacccagtttgtctcttcttgccttcaggacatcaaacggtcatgctactggaagctcggaccatggccccttctgctgggcacccttagataggcctctgagggagatctgattgccattttcccgaaacagtgccccctatcagcaggaagcagttaagatctgtctttgtccctattcttatcctagtggcagttagatagacttctttagagcgaggaatgagccagatgggaagggttccctggtaaaactccaactggcctgtgcactgctctggggtggagccacagaagttcgctcctcagtttgcagctgggaggagcctggccctcctcttcctcgggagaacctgggatttaatctgtgaggtgggaagcctacaactaggagaactctggctctgctgagtccctgttcccctttttcttcctttacacccaataaaaccctgccttacccttcaaattgtctgcgagcctaatctttcctggcgtgtgacaaggacctccaccgtctttagctgaactaaggaaaagtcccgcaacattttcatgtgtgcctttgtatttttattacatatatggatgtccctaaacaacatacattattgttttgctttatatattaaaaaggcattctgcaatttgcattttccccagccttgtgttttgagatttatccatgtggatgcgggaagctgtagagcacttcccctgctgtggggcagtttgttttctcgctggcggacattcagcttgttgacaaggttttgcaattacaagcacctctgctataggtattactgtacctgtcccttatacctgcgatagtgtctcccggcatacagccaagaatgggtgtgcacactcctcgacctgctcccttccacttcgtcagcctggccgggggctctttcaagaggtggggccgcttggtggcttctaagtcgtgcctctccctctgggtaataaacgccttgggggcagggactttgcagtcttgcttattgaggcgttttccaaaacagggaccgagggctctaacacccgtgcggagggtggccggcgggggcgggagtttggcagaatgcggctggagaaggtggggcgagggaagaaggctcctggcctgcaggggcctctcttccggctgtttttcctcccgaagacaaacactcccaacgcaggggcgcagagcctcggcttctttcctggccagctccctcaaggcagggcctagcatggcccggcccagcccctaggttcccccgcccgcggctcccgggcgcctccgcctcccgcggtgactcaggcggcggtgacggcagcggagggggcgatgacgggcgcgcgggcgtccgcggcggagcagcgcagggcggggcgcagcgggcaggcaagggcggccgagcgggcggcgggcatgagcggggcgggcagggcgctggccgcgctgctgctggccgcgtccgtgctgagcgccgcgctgctggcccccggcggctcttcggggcgcgatgcccaggccgcgccgccacgaggtgagtgcacacctcctaccgccgcccggccggctacgagcgcagcgtctcctctccgcggcgccgcccctatctccgtgcgcggcgcc

SEQ ID NO: 40413 - DNA, 2300 bp, Homo sapien
tgcataggaattatcattgtgaatcccaattattgccttggtccatgtaagtactttttccctctgttatatatattcaggttgaaatatggaaactatatgttgtaatttgagagaaatgcaattcctccatctcaggtgcctgcaaatagaataatcattaggaaagtatatacaatggttgtctaactgtgagcattattattattatttttgaattttagacctgggaggagcctctgagactactcaaacccttctcttgtgcagaggaaaagtctgaggccaagagcgattgaaggttttctctggattatctgagtgtagtgagaggcacagcagggaccagaccaggccgccttggtctccaactttgccccctgctaatgtgatttcatcagctttcttttttttttttttttttttaaatttatttatttattttttattgatcattcttgggtgttgggatttggcagggtcataggacaatagtggagggaaggtcagcagataaacaagtgaacaaaggtctctggttttcctaggcagaggaccctgcggccttggccttccgcagtgtttgtgtccctgggtacttaagattagggagtggtgatgactcttaacgagcatgctgccttcaagcatctgtttaacaaagcacatcttgcaccacccttaatccatttaaccctgagtggacacagcacatgtttcagagagcacagggttggggataaggtcacagatcaacaggatcccaaggcagaagaatttttcttagtacagaacaaaatgaaaagtctcccatgtctacttctatccacacagacccggcaaccatccgatttctcaattttttccccacccttcccgcctttctattccacaaaaccgccattgtcatcatggcccatccccaatgagccgctgggcacacctcccagacggggtcgtggccgggcagaggggctcctcacttcccagtaggggcggccgggcagaagcgcccctcacctcccggatggggcggctggccgggcgggggctgacccccccaccaccctcccggacggggcggctggccaggcagaggggctcctcacttcccagtaggggcggccgggcagaggcgcccctcacctcctggatagggcggctggctgggcggggggctgtcccccccacctccctcccggacggggcggctggccgggcagaggggtcctcacttcccagtaggggcggccgggcagaggcgcccctcacctcccggacggggcggccggccggaaggggggctgaccccccccacctccctcccggacggggcggctggccgaccccccccaccgcctccctcccggacggggcggctggccggacagaggggctcctcactttccagtaggggcggccgggcagaggcgcccctcacctcccggacggggcgactggccaggcggggggctgatccccccacctccctcccggatggggcggctggccaggtggggggatgacccccccacctccctcccgggcggggcggctggccgggcagaggggctcctcacttcccagtaggggcggccgggcagaggcgcccctcacctcccggatggggcggctggccaggcggggggctgatccccccacctccctcccagacggggcggctggccgggcggggggctgaccccccacctccctcccggactgggcggctggccgggcggggggctgacccccccacctccctcctggacggggcgtctggccgggcagaggggctcctcacttcccagtaggggcggccgggcagaggagcccctcacctcccagacggggcggctggccgggcggggggctgacccccccacctccctcccggacggggcggctggccgacccccccccccaccgcctccctcccggatggggcggctggccgggcagaggggctcctcacttcccagtaggggcggccgggcagaggagcccctcacctcccggacggggtggctggccgggcggggggctgaccccccccacctccctcccggacggggtggctgctgggcggagacgctcctcatttcccagacggggtggttgccggacggaggggctcctcacttctcagacggggcggttgccaggcagagggtttcctcacttctcagacggagcggccgggcagagacgctccccacctcccagacagggctgcggcccagcagaggcactcctcacatcccagacagggcggcggggcagaggtgctccccacatct

SEQ ID NO: 40414 - DNA, 2300 bp, Homo sapien
tgactagtgccctcccgactctgatactcattcaaagcagagggctcacaagccttccctcagctctgctgtccctgcgcaccactaaactaatgacaaagatattactccttccagaaacccagctgccatacaagtgccagtgaaggtggattcgtgaactgccgcacactatcgaaagctgatgaaatgctctccctctccctctccctctccctctccctctccctctccctctccctctccctctccctctccctctccctctccctctccctctccctctccctctccctctccctctccctctccctctccctctccctctccctctccctctccctccacggtctccctctgatgccgagccaaggctggacggtactgctgccatctcggctcactgcaacctccctgcctgattctcctgcctcagcctgccgagtgcctgcgattgcaggcgcgcaccgccacgcctgactggttttcggttttttttggtggagacggggtttcgctgtgttggccgggctggtctccagctcctagccgcgagtgatccgccagcctcggcctcccgaggtgccgggattgcagatggagtctcgttcactcagtgctcaatggtgcccaggctggagtgcagtggcgtgatctcggctcgctgcaaccacctcccagccgcctgccttggcctcccggagagccgagattgcagcctctgcccagcagccaccccgtctgggaagtgaggagcgtctctgcttggccacccatcgtctgggatgtgaggagcccctctgcctggctgcccagtctggaaagtgaggagcgtctctgcccggccgccatcccatctgggaagcgaggagcgcctcttccccgccgccatcccatctaggaagtgaggagcgtctctgcccggccgcccatcgtctgagatgtggggagcacctctgccccgccgccctgtctgggatgtgaggagtgcctctgctgggccgcagccctgtctgggaggtggggagcgtctctgcccggccgctccgtctgagaagtgaggaaaccctctgcctggcaaccgccccgtctgagaagtgaggagcccctccgtccggcaaccaccccgtctgggaaatgaggagcgtctccgcccagcagccaccccgtccgggagggaggtggggggggtcagccccccgcccggccagccaccccgtccgggaggtgaggggctcctctgcccggccgcccctactgggaagtgaggagcccctctgcccggccagccgccccatccgggagggaggcggtgggggggggggtcggccagccgccccgtccgggagggaggtgggggggtcagccccccgcccggccagccgccccgtctgggaggtgaggggctcctctgcccggccgcccctactgggaagtgaggagcccctctgcccggccagacgccccgtccaggagggaggtgggggggtcagccccccgcccggccagccgcccagtccgggagggaggtggggggtcagccccccgcccggccagccgccccgtctgggagggaggtggggggatcagccccccgcctggccagccgccccatccgggaggtgaggggcgcctctgcccggccgcccctactgggaagtgaggagcccctctgcccggccagccgccccgcccgggagggaggtgggggggtcatccccccacctggccagccgccccatccgggagggaggtggggggatcagccccccgcctggccagtcgccccgtccgggaggtgaggggcgcctctgcccggccgcccctactggaaagtgaggagcccctctgtccggccagccgccccgtccgggagggaggcggtggggggggtcggccagccgccccgtccgggagggaggtggggggggtcagccccccttccggccggccgccccgtccgggaggtgaggggcgcctctgcccggccgcccctactgggaagtgaggacccctctgcccggccagccgccccgtccgggagggaggtgggggggacagccccccgcccagccagccgccctatccaggaggtgaggggcgcctctgcccggccgcccctactgggaagtgaggagcccctctgcctggccagccgccccgtccgggagggtggtgggggggtcagcccccgcccggccagccgccccatccgggaggtgaggggcgcttctgcccggccgcccctactgggaagtgaggagcccctctgcccggccacgaccccgtctgggaggtgt

SEQ ID NO: 40415 - DNA, 2300 bp, Homo sapien
ttcacaggtctcgagtcagaggaattctctttccctcttccttctcctttgaggcctgctttgcatggggagaggagattggcacgtgtccagagtgatttccctgtgggtggtgtgagggtcagcttgaatagaattcgggcctcccaccttcatagtgtgggagcagtttgtcagtgagcgtgcatgagccagaaggacgttttagctggctcatgtttggggctctctgaattgggctgcatacatagccaatataaaccatgttttttttttctctttttggagatggaatcttgctctgtcgcccaggcaggagtgcagtggcatgaactcggctcactgcaacctgcgcctcccaggttcaagcgattctcctgcattagcctcctgagtagctgggattacaggcgcacaccaccatgcccggctaatttttgtattttaatagagacggggtttcaccatgttggccaggttggtctcaaattcctgacctcaggtgatctgcccgccttggcctcccaaagtgttgggattacaggcgtgagccaccgtgcccggcctgaggtttttttattcttgtccctctgttcgcccttatgaggtcttgtcatttacatatgcttttcaccttcctagtggttatcttggtcctgggggcattggagattttggcaagtatccaaattgcactggaggagctgcaggctacatcgaccgcctgctgctgggagacgatcacctttaccagcacccatcttctgctgtgagtgagactcgagttcgcttagaactggaactcaggctttcagaagtgaaggaaagtagaaagagccagcaaacgttaaaccatgcccatttaagaaaacacactgagaactgatgattatttgaaaagtcagctaacttaatgactttagggatcactgtatggcagtgtgtaaacattattttggattttaaagtgagaatgtggagctggacacagtggctcacacctgcattcccagctactcgggaggccaaggtgagaggattgcttgagcccaggaatctgagaccagcctgtgcaatagtgagaccccgtctctgtaaggaaaaaaaaaacaaaaaacaaaaaaaaaagcaagtgagaatgcattgtgtaaatgatcatagcacagtgcttttctgtacgtctcaggtcggatttcctggcagcagaccctgagacagagggtcacatgcaggaagtggatcaggcagtccttgcgggggaataaaggaggcaggaccgtgcagagggagaagttgacctgcacggtcaactttgtaggtagccccagcaaaggccccagccaatcttgggggcaccggggtggcgctgcagaattgttctgaattgaggcaaaggtttgggcccttcctacccctggatggtgcggaaggccccctgcagaaggctgatccctggagaggtagctctctttagtcaagggcagatccagaagaggcacctgtctgagagctgtggtcatgaatacttccagcagctggaggaatgaaggttttgtgctgaaagggttggagggctctgagggtgtgtgacagcacctaattacactgttcatttccagatttctacaatttctgcagtaacatttattttataataaaaaaagaaacatatttaaaaatgttatttgccttaaaagaagataggaagctgttgttgctacagtagggttgaccaaaaagaataaatctggaaattaggaaggtaccgtgcattgcatttgaagctggtcaggaaggcgtcatgtcacaaggcctggagccagcgctgtttgctgcccccgctgcaatcacagtggctgctggactgtgacttgtccctgggagtctctgttccctgctgagtgtccacactgcacactttcttagccggaagcattctgcctgttatccctataagttggcaatgaatttctgcagcaaaaacagaaaaccatgacatactggagtgtattcaggtttgtatttggtctaggagctgtttgtacgtgttttcagatcagtgagtgagtgctgccttctgcttctgtttgttaaggtactttaccacaccgaggtggcctatgaccccgagggcatcctgggcaccatcaactccatcgtgatggcctttttaggagttcaggtatttgttcatttcattaggttactttttctgacaatttatgatattttattcactcatttaaaaaccatttcattaaaataattggaagcatattctctcttgtgctatgggccta

SEQ ID NO: 40416 - DNA, 2300 bp, Homo sapien
tgacctcaatcgtggtcattgttttcttgtgtgtatttgttgcacaatgactttaaatataatgtctgaaaaatcacagcatggggctgtgaatactggttgccctgtatagctggagatttatagctcctgtcagtctcccagggatctctgagatggatttaaggtgtgagtggtctccacactttctgggcggctttctcttctctacccagtgaaaccgactgctgtgatgagctggggttggagctgtggctggggctgtcaagatactcttgttactatgatcaatcacagccaggtccatgaagcagttgctagttgagctcagcaatgggattagccccttttttcaagtacttatttagttttataaattttagttgacaaaaatatatatttaaggtgtacaatatgatgttttgaaataagaatactttgtggaatagctaaatcaagctaattaacatatgcattacctcacattttttgtcgtgagaacaatgaaatctactcttagcaattttcgagaatatgatacattgctattacctgtagccaccgtgaagtgcaatagagctcttaaacttgctcctcctccttgtctgaaattttgtaccttttgtccaacctctctcaattctgtccctcagccccatcctccgcagcctcccttccactctctactcccataagtttgagtgtcttcaggtaggtgagatcttagggtgctcggcttcatgcatctggcttatgtcacttaataccatgcattcagggttcagccctgctgccagagacagcagggtttgcttcttgtttaaggatgaacatcgctgctgtgttcatgttccaccccattatctgtgtgtcagctgatggatgcttagggtgattccatgtcgtgtttgtttctgtgaacgatctcattgatgcctcatgcatgccacctgagtcccgcatgtctggtgctctctgcctctgaaatccctggccagcatccgggcacgggggcctgcagggcagatcccagccccactgcctccagagtctccacactgagcaccttgcagcctgccctcctggcacagctgcctccaggaggagccgctatgggaacgtttttgttctcagtaatttaaggtgcttgctgagagcctgatgagaaggaatttgtagcataggaagcctctggtgaaatttctccttggcattattgggaccaaatccccatagtgtcacattgaagtcaacgcaacaaatgtgaactgaaatgtcgcagtgtacccgatcctgtggcccccgagtgccctgtcgctgatggtccggtgttctgggtgcggaccaaggaggagccggtggcaaaggcgcctcaggcaggccctgggctccatgggcggcttgtgctccgcgattttgaggccatttgcagcagctccgccagcccaccgctctgagctgcagccgctgccagccacaacagcaccaccacgagtgtcttgggggctttcttcagaggaggctgtcagcgtcctcaagttccaggcgctctagcctgctacaacaggctttttcccacctgcggcctctcctcaatggcctaaaagcttggccaactcccacaaagtttggcagtaacacaggctgtcactgacatttgtggcgccaggacttgcccacgcgggttgcaaacgtcagccactgtctgtgtcacgtgcagtgacgccgcccgaggtgcgcacggtgcgcacaccgcacgcgcacgcccacgtaacggcttggctgggcacccccgcttggcttggtggtcctggtttggattggctttaccctggcattcctttgctgggcttgaccttttcttgctgggcttggcattcccctggctgggctgggtgtttccccggtggggcgtgcactttccctgggtggtggagggggcgtgggctctccccgggtggtggggggacgtgggatctccccagttggtggtgggggaggggtcgtgggctctcccagggtggggttttggctgggattgacctttctcccctaacagattggaaactcgtaatttcccgctttttggtgaaactcgttgacagacaccatctgctcgctactaccaggctgttgaaagcagatggtggctgaggtttctccaaagctggctgcctcccctatgaagaagccctttggcttcaggggcaagatgggcaagtggtgctgctgctgcttcccctgctgcaggggaagcggcaagaacaacatgggtgcttggagagaccacgacgacagcg

SEQ ID NO: 40417 - DNA, 2300 bp, Homo sapien
atgctttatttttattaagtattctctggttatagggtttttaggtttttctttgaaactttctcttatttatggagccctagggctaattattaggggtgctgtgggttgtgatatactgttgaattttggtgtgggtttcgtggggttaatagtctttttgatttatttggagggcatgatgattgtttttggttatactatggctatggctattgaggaatatcctgaaatatgagggtaaagtattgacatttgaggggctttcttattaggattattaatagagttgatgttggttcgatgaatagttgagtacgatgtggtattcacgattgattttaatagcgtagagagttgggttattttttagcatgagggggcagggttattgcctgaggattctgtaggtgtcgctgcctcattcaggagatgaaggcctagtactcaggtgttgagactttttggcttaaatttcttcccatgggtgcactgtgacatatcaccgagttagaattgtaataatgtgactcttctgcctggaccctgccaacaggggatattatcacatatatctgggcctataagggggttatttgtctctcctgcctctgcccccagaggagattgtgtaatatcgtttgacttaacatctagggtaatatgaccctcctctcctgcctgggtcctgctcaccaaagaaattgtgacataccactgatagcaaaacctaaatgatgtcactgtccttcatattctagactctgccaagagagaggattactacatattgcagagcccagcacctaggtggagtgactttcctcttcttcttccctgtctatggtgggcttggtgacatactttgaggttgtacccaggagatgtgactcttctggctagacccagcctacaaatgagattatactgtatcactggctgagcacccaggtgatgtgactctgttggcttgtccctgctcacaggtgaaattgtgacatatacctgggttaagcacacatgcacaataataactctcatacctagatccagaaagtagaaataattgacactcatagccagtctcgtggccatgggtaaagtcctcagtttttcacttgtataaagttcatgaagggttaagagtgtcataacagagaccagcaactaagtgagaatatgattcttctatgcacatctggctgacatgattgtcgtgctcacacatgaacagggcctaggaatgaggtactaaatctcacacataaaaagcagtcaaaagttgaaataattactcttatacatggatctgattcacaggtgaattggtaatatttgaaccatgattcagcacacctgtggtgctgtgagttctttactggaacacaattttcaagtgggattggggcagttatacatggatcttgcccattgttgagattgtgactcctctacttccacccaaaccacagaaagtgttgactcacatacaggaaaccaggatttgtgtgggatatgaaacttatttctgagcctttctgagagcgtgattgggacagttaactttgcccagcacatgaataatttgactgtcttttctaggcccagaacacagatgaaattgtgccatatgtggaacaagcagctaagcaatatgtaataccttccttggcttagcctacaaagggtacttttatatatcactgggaccatcatccaggtgatgtgagttatctgcctagaacctgcctacaaagagaattgtgtcttaaatctaggtctatcacataagtgatgtcactcccttctactgccttagccctgcacttacagtgcattgtgacacacaactgggcacttcacacaggtaatgtgattctcctttttgggttctgccaacaggaagcattgtaacatatcacttggctcagcacgtgatgtttctttgcttttgactgggctctgaccacagggtattgtgacatattgctgggttcagcacaaatgtgaggtcactctccaggcttggtactgcacagaacagacattgtgacatatatctaggcaaattgcctagaagtgaatcccctctcctgcttaagtccttcccacagagagcggtttgatatgtcactgaaaccagcatccaggtgatgtgattcttctgccagggtcctgcccacaaggtggattgtgacatctcactggacctgcacacacataggtgatgtaactttcttgccttctctctggctgcaggtggtattgctccatatgcctgagaccctaacaaaagccta

SEQ ID NO: 40418 - DNA, 2300 bp, Homo sapien
cacacagcaccgcgaacccagcagcccaagcccagcggaccaagcagccacccccgggagccgccactgcctggagcagtcaccggcgggagcctccatttccaggagccgccaccgctgggagctgccacagccgggagccgccaccgccagaagcctccatctcccgggagccgccatcgctgggagccgccacctccaggagccgccacggccaccgggagccgtcaccgcagggaacctccatctcctggagccaccaccgctgggagctgccacctcaggagcagcggcagcactgggacccgccgggccccctcgcacccagcggctctgcaggtgccctacacccgggaggggccgagggagcccacgccgccggcgggaccgcagggatttgctggctctttctgcgctgaggggtcgcggcgcggggcggaggtcgggtggggaaagctggagccgcagggaacgcgcaggacaggctcgctgggtgtcgactctagccctctgtcagagaccttgggacccgcgcaatgtggcagtggaaggcgcagggtctgaccccggccgcggccgccgcagcagctgatctgtcaaccccggccagagccgagccgcctgaggcctgcagtgttctccatcaccactgtgatggcatccgcttccgtgactgtcactgtgcaccctccgcctgtcctgggcccacgcaggacccccaagcggggctctgcacaggccaggagggctacccagggactgaccacgggttgttcatgggtcctcacctgcttttccaggtccagggtgagaggacgaatttgaaggtagaagtcacagagttgcaggatgtggagtgcgaggagtggccccggggaagcagctccaactgagggtgattaaaatctgaagcaggccgggcgcagtggctcacatctgtaatcccagcacttttggaggccgaggcaggtggatcacctgacgtcaggagttcgagaccagcctgggcaacatggtgaaaccccgtctctgctaaaaatacaaagttagccaggcatgatggcgagcgcctgtaatcccagctactagggaggctgaggcacgagaatcgcttgaacctgggagggggaggttgcagtcacctgagattggaccattgcactccagcctgggcaacaagagcgaaactccatctcagaaaaaaaaaaaaaaaaaaaaaatctaaagtaaagaggtcaaagatcggaaacccctgcccctacacctttcaagaactgcttggtaagaactgctcgtagttacggtaaagatgccttgagccaggatagcagtacattgttgctgtagctggttgtattattttgttaaacatttccataaagatttaagaggtgtacacatgtgtaatataggaaggaaggatgtaaagtagtatgatctggggcttctccactcctgccccagattgtggaggctgcagtggggcctctccttatttttgcattggtctctgtgccacaaccaagcttcacttcgtcttgaatgtcagcatatgttgctgctgcttaaatattttataatttcaaaaaattagctgggcgtggtggtgggcgccagtagtcccagctactcgggaggctgaggcaggagaatggccgttaacctgggaggtggagcttgcagtgagccgagattgcgccaccgcactccagcctgggtgaaagagcaagactccgtctcaagaaaaataataaaataaaataaaataaaatatattgtataatttacttgtataattctatgtgaatgttgcttatgtaataggattattttgtaaagctttctgtttaaatattttaaatttgcatatcacaaccctgtggtagtatgaaatgttactggtttttttttttcttttttcttttttctttttattttttatattattattatactttaagttctagggtacatgtgcacaacgtgcagttttgttacataggtatacatgtgccatattggtttgctgcacccatcaactcgtcctttacattaggtatttctcccaatgctatccctcccccagccccccacccgaaatgttactgttaactttcaatcatgttatgcatcataacgttttttgtttaatgaacagatatgagcaaaggacgttaatcccggtatcttctctagttgtagttgtgtgtggttctcgagtggctgcgcatgtgaacacgtgtgatttctcagtgtactgtactgtgatttgtttttattgcttgttttgtttcccctca

SEQ ID NO: 40419 - DNA, 2300 bp, Homo sapien
ctggcaagtcatttctgtttcacaattagcagttcatccatagtaaataactgagtactttgtatatggaagacgctgtgctaactgatagagatacaaaaacggagaagatagaaatggtattaccttacagcatggaggtggaaccacatggtaaacaaataactttcgtaattatttagattctaattgttataacatcttcaacagagcatgaggtcctgcggacatggaagagcagggaggttcaggcttgctagtttagggaagctggccaccaggttcaggtttgacaggcgcataggaaatggcatggcagagggaggccagagccttttaggcaaaaggaagagcaaatgcttattagaccccaaggctgcaggagctaggcacgtttgaccaccgaaagggaaggccagtatagacagcataaacctcactgtggtgtctgtgttgagaatggattgtatgtgtgtgctgtgtgaggggcaagagtggattaggggacatgggttaagagctactagcagtctgggcaaaagatactagtggcctgggaaacagtggtagtggagagtggacacattagtaagacacacaaacgtgttcacaaaaattcctaggtttctgcgtgagctgtggccaggtggatgtccatgccactactgagatggcgaattctgaacaggaggaagtttggagaaaaaccccaacatttcggcaggacagcacctcctggtggagatgacaagcgggagcctcaccacaggcctggttgtgggagtgaaagggggactccgggcgcggtcgggtgcacttactgtgctaagacagcaaggcccggcggaggtggcaatggcagacctggtttctcggcggagtcccagtgggaggcccggtgtccaaaatcctcaactagattgggcatgccgtttatcttgttccaactgttgacagtaatggcactagcaataatgtccttcccaggcaaagatggtttttcttccgtgttttcagccactgcagagtggacatctactatgaaccaagtatctgcggctttaggtaccagattcaaacacagaatggtggcagaacagggactaggacggagagaaaacctgaagatggatcaaccaggaagcaatgcattctcacagaggcacaaaaaaatgcctctgaaacagaagattcacctccacttctgcgtccttttgaggcaactttctgagcatcctttcctcctccccaggccaacgcttttccaccttgttaaactacccggtagctttctccatgggaggcgccttcttcacagtactcggacccagttacacttgtggccttccccggcttctgctgggccggctatggtcgacgccgcaccgtctcaggcccacttctcctgcgggagcggcggccccagcggagcccctgtgcgccacggcgaacgtgataggaatgcaatcttccgccccttcagactctggcaccccgtagcctttcctcaggctccacgagttctcccggtgatgtgatgaccgacatggcgtctgggctctgaacacagactttactccttccccccggccccgaaacatggggaaaccacaccctctctgctccagtcaccagcagccactcccattccttaagtatccattattgcatgtgtagcctattgcatgtgtagcctacttctggttttcatttttatttaaggtcagttgttgcctgacaacacagacgacagtaacttaattcgaaagacaatacttggaggcggcccccgctccaggcaccagcccagcagctcccccgaactccccaggagctcgcgggcgagcaacgccacagcccagagcgagctccgcggaacccccagccccggggaaggaagctcgactctccgcggggcactccttccgggctccgggcccgactaggccatccgggaggccctggagcgccggggccggagaagccctgccccccgccgaagccccgccctgcgcccgagcgcccgccaatggcagggcgcggtgcggcgcgccgaggtgggacggcggcgcgctgaggaggcggtgcgctcaggcggcgctcccggagatgccccgcggcagccgcgctcggggctctaaggtaggctctggggcgggagtgggcgccgcgccgtttcccgcgttgcggggaagcggcgggccggcgcggggctggccccgttgtgctggggtgagagagggtgggcgttgggggtgaagggctaggtggtggcgggtcccgtctgcgcgcgtggagca

SEQ ID NO: 40420 - DNA, 2300 bp, Homo sapien
acccggctaatttttgtatttttagtagagacgggttttcaccagattggccaggctggccttgaactcctgaccttgtgatccacccacctcagcctcccaaagtgctgggattacaggcatgagccaccgcgcccggcctagaacagttttaaacaattgttctcattactaatcataaaaataatacacagctattgtggagctgctagaaaataaagactacaatagaaaatacccccataggcccagcgcggtggctcacgcctgtaatcccagcactttgggaggccgaggcgggtggatcacgaggtcaggagatcgagaccatcctggctaacatggtgaaacccggtctctactgaaaatacaaaaaattagccgcgcgtggtggggggcgcctgtagtcccagctacttgggaggctgaggcaggagaatggtgtgaacccgggaggtggagcttgcagtgagcccagattgcgccactgcactccagcctgggggagagagcgagactcagtctcaaaaaaaaaagaaaaaagaaaatatcccccataaatctataaaacctataatcagcataacataagcattttgataatataagcatttggatctgtttcctgcccgtttttatacaactgcttatatatatttaaaaatttgtacattattttttttaaatttaatgtcattagttttacatgggtgtgttgtttgaaaaataggtaagaataatattttccattctgataaaatcaaaagcagattatgtattcttatgtgtaaataagatttccattggcgttgcatatattttttagtttccattcttaaaatgagtggaacctctgtgtaaagaaaatattttattattttaaataaaagcagaatacaacactgtctattttacagttataactggaagataatgtctaatcagaagactctaatagggtaggaaaacattaaaatagttatgtcacgttggtagctgggtaccccatacgtaattttgtatttagtaaatatttttggaatgtggatgaatagaccatgatgacttttttctatttatttttttaaattttctgtgcgtgtgttttttgtttttgtttttgttttttgttggtttgtttgagactggaacttatttctgttgccccagctggagtgcagtggtgcgatcacagctcactgcagcctgggtctcctgtgctcaagcaatcctcttgcctcagacccctgagtagctgggactacaggaacacgccaccaggcctggctaatttttgtatttcttttttagacagatggagttttgccatgttccccaggctggtctcaaactccggggctcaagtgatctgcctgcgttggcctcccaaagtgctggggttacaggcatgagccaccatgccttgcctgttataatgttaagagaataaataaggtgtaatttctgtaaatatttagacacacatgaataatttatttgaaagttacctgtccagtttgtatagctctagatatattctgtacttgttaaatgctatgaccaaagaaaagcagtatacaatatcgcttgtccaagtgctagtttatttatggaaaaaagcgaaacctactttgtgcctgagttttgtatgtacttttaccaagatcttgaaaatatttctctttgtacattaccctgtaagaacttccttatttcaaaccagtttattgaatttcatgttcagttgtcatttacatattattaaaatgtaggtaacaaatatacttgtacatctataatgtggacaaatacagtaaccaaggggaaacaaaataaaaaactgaagaaaaaaataatcaaagggaaaacaattttgatggaaaggctagtaaagaatttgcagtggttggaaaaataaataagatattcaaatggataactctataaggctgctggagaagggagtgagcaagctagatggcgtcaaggtgagggagagatttttatggtgtgtagtgttagagacttgaacatgattgaatggtggacttaatgatagaactggttaaagtggaggggattggaatcctgattgctgtgtctcatgatcagcaccctcttcttctgttcaggatttcctttttacagcttcaaaccactggaatgtaaggcattatgagtttcttcctcagccttttttttttttttttttcgagacagagtttcactcttgtttcccaggctggagtgcaatggcacaatcttggctcaccgcaactgccgcctcccaggttcaagcg

SEQ ID NO: 40421 - DNA, 2300 bp, Homo sapien
gttgagtataggtacaagttttaaaaattcttaaattatgtctcaaaatgctcctgtggccgctgtagctcctcaatctagggcttttccctttgcttctgaagactctaattctgtacacactgctctggctgccctgctgaggaaaaaaagctttgtggactgaagtgacttccacattatcctgatttcttttccagtttaccaattgaagatgagctacttttcattaacaaaatgcctgttgtggcgaagcatctgtgtgttcacttcttagtgcctttctttacaagttggtttcattcctctgttcccttccctagagtgaccagcagaagctcgttatatgctgcttgtacattgtgcttattcatatccttcccccattctgttttcttgccttaagaaatagttgtccaagacagtgcccagaaatagttgccttaagaaatagttgtccaagacagtgcttaggggaggcaaggtggcccagggcccagtatatggacatgtgtcatggacacctacataaaggaagggatgaaaaatttggggttgaatgggaaatgaatgaaaaaaaagtgagagggagaaagaaatagatgattaaaatcttagcaccgtctaaatattaatttttactattcactattaacctagttggctgaagtggtaaagaaactcatattagtgagtatctgttattaacaaggcagtatgttgtacccttcatttttgttgttctcagtttatgtatttttttattttttttaattaaaaagcacagagaataatagaaacacataagcatgctcactgcctagaattagtaacacatgtcaatcctttgtctttttttagtttcccatagttttataatagaaacaatatgacacataaatttgaaaccctctgggttcccctcctgagtcatactcctctttctctctccttagagacagtggctttcatgacttttctgtgaatccttctatttatgtttttatactcatcttgtattcataaactattgtattgatttctgtgttttttaaaattacattataggtgtcatactctgtatatcctgtttatcccctttcatttcttgagacctctccatctgattcttagacgtctacttcacctcattttaagtgccgtacagtgttctgttgtatgaacacaccatggtttacccatctttctgatttatgctgggtgcagttttctactcttataaacaacgctgagatgtgtatccttgtttaggtatattggtgcatctgacagtttctgggtacctacctaagatttctggggtataggctatgcacactatcaacttcagttatctcatttaatctgaacaaatgtttcctggggcaggtggcaggatctccattttacacataagacaatttaacagttgaatgccatggaacttggccaacttaataaggaaaccagcacttgaatccagatcaaattccacccatttcaatctagagctctaatacccagcagtccacataactcttcaactgttagcctttctgatcattggaacagctgcagccagctagtaacatacatgatttcaaagcagagaatcaaaacagataataaagaggagggtccatccttaagaagaatccacagtggccatattctccttgtggtcatcaaaggatttcagacttggagtaaaacgcatgctccttaaaatgacgggtctaaggtttctatttgtacaggactatttcttcatgacagaagactttattttatgctgcttaaaatccatgtattaaatgcaacatgcaggcctattttgattaaagaaaagtgttatagtgagcatcgtagtgtctctgttttactttgcaaaatgtggagaccattttctccaggtgaagagtgctatctgcatgtggatctttttttcatgacactttattcacgcttgaaccatctgtcttttgatttcatttttgctttgttcttttcttcaacttctaggtagaaaatctggtgtattaactgtgaaaattttagagctgcatgaggaatgtgccatgcaagttgccatgtgtgagcagttattggggtcaccagccaccagctcctcccaaagtgtggctcccaggcctggagctggcctgaaagttctcttcaccaaggagactgcaggctacctcaggggccgtccccaggacactgtccggatcttccctccctggtgagtgcgcagaacttaatccagcagtcaccaactgtgagtcagcctcgtaagaaaa

SEQ ID NO: 40422 - DNA, 2300 bp, Homo sapien
cactgtacactactcgggtgatgggtgcactaaaacctcaaaatctcagacttcaacactatacaattcatctgtgtaaccaaaaatcgcttgtacccccaaaagctattgaaatttttaaaaaataaataagggtcagaaattaaataaaaactttttaaaatgatcagaaaagtgagtaggaggcaatcaaatggaaatgtgaggcccacactttctcaaaggttggcaggaaggttggcaggaaagagagagtgacatacgctcccagcagagactgcactgagcatttggagccaatgtgcagagagagaagagatacacctaggctaggtggtgagcactgcaaagcaaagtcctagaggccgtgttttgctgggcacccaggtccagtggaaagggcaggctgggcaggcagcaggaggatgtcagctgggcacggcaggcagctccaaggtgggcgggctggaaacaaaactaattcctacctgggaaccttccttctctctgagaaatagagttgtcttctaaaagtggccattgtctgctgtcttaagtacagtaaactgaatatggttcgtcttcaaatttgaaattacttcactgaaaaatgtatcaaaacaatttaatatttctcagtgatattgtttctaaaacaggttttcttaggattgcagaatttacaaaattaccattgatatttgaaaaagaagaaagccttgtatgtatgcatttgccaaggcagtttgatttttttatttggtagggtcagagcaggtagaacatgtatgcatacttcacaaaaaacaggtgatttataagccattgcattagacaggactggtttccaagccagtcagtcagcttagaatgtgaaaccctgattcagaagcgaatcacctaaggatgattcaacactgtgtttcctgttgtgctagtaggcccactacagtagcagtttacccccacctcacccagttcattagactctaatctagtcccatactggaactacagagcctgaagactatataagcaactgtcttctcattctccttagactgtccatgactgatgccactcaccaggcacaggagggatgctaatccattccatggaatggagcctcagggtttacaggctttattccctccaagaaccctgcctctgaaagcctgtgtgactcttgcgtgggccaacatgccctttgatggctcaggggaagctgtaggacactaacttacccatggcaccaccaaaacttgcatccccaggcctgtgtcttgttccttactctatacccagttacaaatccttggcctctcaggtttcagtgatgaataggcatgggaaagtaggaataccaaatggcctctcatttggtagtcggttggggaatgcatgagagaaaataagaccacagtgtgcccagggatgctgagctgatggcacattttgagcagtaaactttcttagtgtagatccctccttcctcgctccctcttttccttcattgttcttgtcctaatttacaacttcactaagttcttcctttcccacttgtatactttgtagcaatatatgttttggtttgtgaactacctcacattgtccccaagggcaggaactatgtcttatgtcccttttccccaggagggctgaataaatgcctgttgattaactcaacttggtgtaacaaacatatattatctataatgcataagtctctgagctaagggctctgacatgtacatacggaataagaaataagattcctgccttcaagaaacttccaggagagagaaaagagctcctcaagttattataatacatagtaaatgtgatgagaactaaaagacaaaaaaaaaacaaaccacttttaatgcaaaggaaaaaaaggaaaaagaattgtttacactatgggaataagagaagtcttcatataagacatggagtttcagtttgactttgaaaaatgatacttagatgagtgggagtggcaaggactatcagattccatgaggggaacaggcgggagccaagacagataggggcgtggtagcagcatcttgatcttcttaggccccaccatgtgtgtaccaagaggcatgcaggagccattgggatactcccaaagttctctggccaggtgagtgacatgattaactctattcgataagaaggagcactgtagcagcaacctgcaggaggggttagaagaaaggaaagaacagggtttaagagacaggttgggaagcacctgcctaatccatgtaggtggcaggaagggccacaagcaa

SEQ ID NO: 40423 - DNA, 2300 bp, Homo sapien
gagtggcaggttttaacaatgtcaatatcctagttgtggtattgtactattgtttactagtacatatagtttatactattggggtaactgggtgaagtgtacaggggttctctctgtggtatttcttaggactgcatgtgactctacaattaactcaataaaaatttcaattaataaaaaggcaggcttgaagcaatggctcttgcctccaatcccagcactttgggaagccaaagcaggaagatcccttgagcccatgagttccagaccagcctgagcaatatagtgagaccccatttctacaaaaaatttaaaaatttagctggacacggtagcacaggccttagtcccagccgtttgggagactgcagtggaatgatcacttgagcccaggaggttgaggctgcactgagccgtgatcatgccactgcacaccagcctgggcaacagattgagaccctgtctcaaaaaaaaaaaaaaaaaaaagaaaaagaaaaagaaaaaaaaaggcaaaagaggtatctttgaaaacgtgttccatgggtaaatgtctatcaaattatacgacgtcttggccgggtgccgtggcttacacctgtaatcccagcactttgggaggccgaggcgggcggatcacctgaggtcggaagtttgagaccagcctgaccaacatggagaaaccctgtctctactaaaaatgcaaaatcagctgggcatagtggcacatgcttgtagtcccagctactcgggaggctgaggtaggagaatcgcttgaacccaggaggcagaggttgcagtgagccgagattgcgccattgcactccagcctgggcaacaagagagaaactccatctcaaaaaaaaaaaaatagttcgatattcaccggcaataaacaaatcaaagtccagactggcaccagttgtgtcagcggttttatttgtgtcttccttaaagaccaagcttgcagcagggttttgttactgttgttgttgttgttgttgttgttgttgttgttgttgttgttaatctcagcagcacaatgtttttctacaataaagatggtgtgtgagtatggaaaaggcctttctcggccagacttggtggctcacgcctgtaatcccagcactttgggaggtcgaggccagtggatcgcctgaggtcaggagttcgagaccagcctggccaacgtagcgaaaccccatctctactaaaaatacaaaaaattagcagggcgtggtggcaggcacctgtaatcccagctactcaggaggctaaggcaggagaatcgcttggaccggcgaggtggagattgcagtgagccaagatagcgcaattgcattccagcctgatcaacaagagcaaaactccatctccatctcaaaaaaaaaaaaaaaaaagaaaagactcttctcagcgccgcacagtggcttacacttacagtcccagcacattgggaggctgaggctggtggatcacttgagtccaggagtttgagaccagcctgggcaacatggcctagccccgtctctaccaaaaatacaaaaattagctgggcgaggtggtgagtgcgcctgtggtcccagctactctggaggctgaggtgggaggaccagttgagcccaggagttgaggctgcagggagccgagatgacagcacggtactccagcctgggagacggagggtggccttgtctcagaaggggaaaaaggctgaggtttttttccctcttcttttggttgtcacttttagcaaagtaagattgttattcctttcggttcattgatatttaaaagtttacatgtcacatttttatttcagcaaagagaaaatatgatttttaaatgaataaaaaacatttctgtgcagtagaagtcgtgctaacatctcatgttaaaaagataaacaacaggattaactgtttactttgggagcgcagaggctggttgttttttgagaagaagaacacaatgtcctgctgtctctggtttcccggtcggccctcctcccaggcggctacaggagtgggcgaggcccccgcccccaatgcgtccccgcccccaccccgccccgccctcgctctggcccttctcgcccccgccttttctcagcggctcccttgcgctcaggttccagccctcttctgtccccatgctccctttttttctctctctcttcttatcacttcatcctctgatttcttggtttttttccttgggttgaagcttcgtaagagattataaagtggagggcaggtctttgttgatctttagaggctgcttaagttgacagtgacctagaa

SEQ ID NO: 40424 - DNA, 2300 bp, Homo sapien
tcttgaactcccgacctcaggttatccgcctgcctcggcctcccaaagtgctgagattacaggcatgagccaccacgactggcccactaatttttttaattttttttttctttgagaaggcggtcttgttctgtcatccgggctgtagtgcagtggtaccatcacagctcactgcaacattgacctcttgggcccaagcaattctcctacctcagcctcccaagtagctgggactacaggcactcgccaccacacccagctttattttattttttgtagagatggggtctcactatattggcccagctgggctcaagtaatcctcccgcctcagcctcccaacgtgctgggattacaggtatgagccactgtgcccagcccacttattaaatatcagtatggaccaatgaattcatcttttattcagcaagttatatctattactgtattcattttgatgctcaattttaccatatttaagctggttcctgtgtcctttggacacatgcccgtcattctttgagtacctccttattttctgacacagtaagatgcgtcaaactcatcttttgctttctgtgctctggagtcagccatcttttcaagaagctctggttgattttaatggagaatggctttttggttttggggtttttttagttttagttttagtttttcagagatggcatcttgctatgttcactacgctgaaatgcagtggctcttcacaggcatgatcttggtgcaccacagcctcaaactcctgagctcaagcgatgccctcacctcagcctcccaagtagttgagactgctcctgagtcacttgtgccactgtggctggttaagaatgttacttagaagccaagatccgggttctaggtgggcttcctgctattgagatatcattgcctctctgccctctcagtggacagaggaaggaaatgtgtgtgtatattcatccacatacacacacaactatatctacttctatatttctatctatctaaaatcattatttcataccaatacttccaactctagatcattaccacagaatttattctaagttttcttatttctatatgtataactcgcttctccaacagtaagaagcttggcttcattttcctcaatattacttattcatacttcctgtatataatcaacctcctgacaatgtaggccacttccttcaccccaaccctcagctacgcaccacacaagtgaccttctctgcccagtcctgttaactggccatgtggaattctcagcctgaccacaccgtctgtgccagcaacaccagctgaacctccaactggccacatcctcaggccctggccctgctgaccatccttggccccatttgcgtctactgaatcctaagccctgaccaaaaggaaagggcagaataccagtctaatggaacttgaaaaggcattacaagttttgaagataagaaaaaaatgaaaaaatatagaaggaaagaagaaaagaaaataataaaacctgttgcagatgcaacaaatatgcgacaccagctttataccaaggccctgtacaaagtctgagggcaagtaagatctgttcctaaccctcaggaaacttacaactggctggaaagaataatatgtatgtactacacaggaaacaatgttgtaattaacattctaagtatataaacagaggatcaggaggaaaagaacaatggattcagcctgaggatgtcagtggacaaatggaatgctgccagggaagggtggcctgttcccaaccaaggaagcctttaaccaggtgcaaagtcgaggcacccagggcacatggggctagtgaccaagatgtgcaaagtctagtgtatgttttaaagtgtttttgaaataatatcttaaattgttagtatatgtataacttctgcttttaaatgcttttaaaacattttttggtataataattaatctttattgtgtcttcaaattgtagctgaagagtctgctgcttctggagcaaagggagatctggctgctagtgaccgatgtcactctgcaaacgaaggaggagagagaccccaggctccccaaaaccctgctggtctatgtggcccccttgtgtgtgctgggctctgaagtcctggaggcactcgctggggctgcccctcacagcctcttcttcaaggacgctctccgtgaccagggtgtgcttgcgtctccacagctttgatgcaggggcgactgatccgtgcccatagaatacctcttgtggcctctggatgcctccttgttgcttggacgctgccggcaccttc

SEQ ID NO: 40425 - DNA, 2300 bp, Homo sapien
agttttagttttagtttttcagagatggcatcttgctatgttcactacgctgaaatgcagtggctcttcacaggcatgatcttggtgcaccacagcctcaaactcctgagctcaagcgatgccctcacctcagcctcccaagtagttgagactgctcctgagtcacttgtgccactgtggctggttaagaatgttacttagaagccaagatccgggttctaggtgggcttcctgctattgagatatcattgcctctctgccctctcagtggacagaggaaggaaatgtgtgtgtatattcatccacatacacacacaactatatctacttctatatttctatctatctaaaatcattatttcataccaatacttccaactctagatcattaccacagaatttattctaagttttcttatttctatatgtataactcgcttctccaacagtaagaagcttggcttcattttcctcaatattacttattcatacttcctgtatataatcaacctcctgacaatgtaggccacttccttcaccccaaccctcagctacgcaccacacaagtgaccttctctgcccagtcctgttaactggccatgtggaattctcagcctgaccacaccgtctgtgccagcaacaccagctgaacctccaactggccacatcctcaggccctggccctgctgaccatccttggccccatttgcgtctactgaatcctaagccctgaccaaaaggaaagggcagaataccagtctaatggaacttgaaaaggcattacaagttttgaagataagaaaaaaatgaaaaaatatagaaggaaagaagaaaagaaaataataaaacctgttgcagatgcaacaaatatgcgacaccagctttataccaaggccctgtacaaagtctgagggcaagtaagatctgttcctaaccctcaggaaacttacaactggctggaaagaataatatgtatgtactacacaggaaacaatgttgtaattaacattctaagtatataaacagaggatcaggaggaaaagaacaatggattcagcctgaggatgtcagtggacaaatggaatgctgccagggaagggtggcctgttcccaaccaaggaagcctttaaccaggtgcaaagtcgaggcacccagggcacatggggctagtgaccaagatgtgcaaagtctagtgtatgttttaaagtgtttttgaaataatatcttaaattgttagtatatgtataacttctgcttttaaatgcttttaaaacattttttggtataataattaatctttattgtgtcttcaaattgtagctgaagagtctgctgcttctggagcaaagggagatctggctgctagtgaccgatgtcactctgcaaacgaaggaggagagagaccccaggctccccaaaaccctgctggtctatgtggcccccttgtgtgtgctgggctctgaagtcctggaggcactcgctggggctgcccctcacagcctcttcttcaaggacgctctccgtgaccagggtgtgcttgcgtctccacagctttgatgcaggggcgactgatccgtgcccatagaatacctcttgtggcctctggatgcctccttgttgcttggacgctgccggcaccttcacggagcccatcacagacatggcccatgtaccagcctccagccttcactgaccctgtagcagccacctgggcagaaccagctccatggagatgctgtgctcactccagaattgcctgctggtggcaccccatactgctgcagactccacaaacaaaccaaaagctagaatattataaatgcgtatacttagatcagccagcccctttttccagggatcaaactaaaatcctgcctcagctatcttttttaatttttattgagtcataattcacatgccacataatttaccctgtgtggattgacttgaatctcacatttgagtgcttttttagcttagctcatggggttcaggagtgtgcacacacaatgaacgtgctgctggacacagtcccataactgcaccttcacctgcatgactcgaggggtagcaaaggagactgccattatgggcacaattcactttttcttcaaggcttcaataacctgaagtgtctctgtcggcaggtcggattgtttgtgctgaacgaactgtcctcttgcttcagaagccccttttgagtgtggtctctggtgcaagttcctgtgagctgcctggcccggtgatgctcgacagcctggactctgcaacacctgtcaactccatctgcagtgttcaag

SEQ ID NO: 40426 - DNA, 2300 bp, Homo sapien
cggccccgcgcgccccttgggcccgggccctgccgctccccgcctgctcaagcgcgagcccgactggggcgacggcgacgcgcccggctcgctgttgcccgcgcaggtggccgcgtgcgcacagaccgtggtgagcttggcggccgcagggcagcccaccccgcccacgtcgccggagccgccgcgcagcagccccaggcagacccccgcgcccggccccgcccgggagaagagcgccggcaagaggggcccggaccgcggcagccccgagtaccggcagcggcgcgagcgcaacaacatcgccgtgcgcaagagccgcgacaaggccaagcggcgcaaccaggagatgcagcagaagttggtggagctgtcggctgagaacgagaagctgcaccagcgcgtggagcagctcacgcgggacctggccggcctccggcagttcttcaagcagctgcccagcccgcccttcctgccggccgccgggacagcagactgccggtaacgcgcggccggggcgggagagactcagcaacgacccatacctcagacccgacggcccggagcggagcgcgccctgccctggcgcagccagagccgccgggtgcccgctgcagtttcttgggacataggagcgcaaagaagctacagcctggacttaccaccactaaactgcgagagaagctaaacgtgtttattttcccttaaattatttttgtaatggtagctttttctacatcttactcctgttgatgcagctaaggtacatttgtaaaaagaaaaaaaaccagacttttcagacaaaccctttgtattgtagataagaggaaaagactgagcatgctcacttttttatattaatttttacagtatttgtaagaataaagcagcatttgaaatcgcccctgcttcctatattcgcagtgactcccgcccgcccgccggtggcgcaggacccggctcgggaagggtgcgttccggacccgcagccagcgagcaccagggagcccgggcgccaggtgtgtgtgtggggggggcggggggatggggcgcaggcccgagctactcaggagagagggtctgtcgcttttaaaacgcattaaaggctctctcctggccttatttaacttgcctaagctaggtggagcacggctgagctcaggtaagctagcagctttccagcagaaggtgttctcccgaagaacgcagacctggggaagggttgactttttgggggcccctgctgagaacagttcaagagctccctaactgtagaggctgctggaggggcgaggggcagaaccccgggctgaatcatctcccgctttcccgggactttgctttcactttcctcagtcttgtggacagagtcaagtagattttcaaaagtgctccagaaaggccggaatagtcatgtagtggatgaaaagggcagtcacaaaactgcttaagaccagctgtcttgccagtaattgcagtgctttaagatttaattaaaaagccgcctgcctttaacccaagaacacttggtattagggcaccatgtcttggtcacggctgctacgtgtatctgatgtagttaaccatggcctgtcatgattatattgctataaggaagggaacaaaatctttatagtgtccaaagataattaattcttggtttaaatctttgccagcaaagcaaatatccgactgactgctccttagtctgtgatctttgctctccgtgcacattacccagcctaattaaaacaggtgtgtgtggtggagccagctatccccaccaccattcagcagagacacgatcacaccagttcagagagctacactttatgggtaacagtttcacctgtgatacagttccctagaacattttcccaaaagtagtgaactgcaaagtgcttaggtttgacatttattgtagcagaacagtaatatcacagtatgggacaaaggtttacactttgcagggtattctttgggggaatgttaaatactgtaataaaaacatgttcaatcatggtaaaatgttcaacttgttaaaattacaaatgaacaaaaaaaatttttttctcatatattgcctaaataccaaatgaagagcttaaacttaagattcaatgtgaaaacgagtaaatatgttcctaaatttgcagaaaataaaagataaactgtagaaaaaggtattttgatttacagttcacaaaactgtatctgaacatttccccagaaaaatctaagtttcatttcaagatcgtaaactacgttcactgtgtccatagttaacaaataactaccccaaa

SEQ ID NO: 40427 - DNA, 2300 bp, Homo sapien
gacagaagaacgaaaccatcctggctaacacggtgaaacccgtctctacttaaaatacaaaaaattagccgggtgtggtgtcacgggcctgtaatcccagcttctccggaggctgaggcaggagaatcgcttgaacccgggaagcggacgttgcagtgagctgagatcgcgccactgcactcaagcctggcgacagagcaagactccgtctcaaaaataaagataaaaataaaaataaaatgtaactatattgactatcggaatcagtaaatcatctcactgaaaatagtctctgagttgtttttaggaggatatggttatcccttataaatattgattttgcattccctaagtgattagggagggctttaatagtgtttctatggcttctgaaatatatgagaacaaaacaatttgtgctagaactttttctggatgtgcgtaagtccacactctatgcattgctggatttcagtcttaataggtaattaattgtgtgacatcatcattgtgtaccctctgagtaactctaaagaaatatgtttgttctttaggaaacctattaaatatcccatagtgcaacgttagaaatgacctctggaactgactgcagaaactgcacagcagttagtagagcttggtgttccgacgcagatctggtgagaggcctgcgcaggaagagactcgacatggagcaggtgtgactagcgatagtgatttaatggatttgggcccgacatggtggctcacgcctgtaatcccagcactttgggaggctgaggccggcgaatctcttaagcccaggagtttgaaaccagcctggacaatattgtgagatcccatctcaattttttttttgagatggagtctcgctctgtcgcccaggctggagtgcaatggaacgatctcggctcactgcaacctccgcctcccgggttcaagcgattctcctgcctcagcctcccgagtagctgggattacaggcgcacgccactacgcttggctaatttttgtatttttagtagaaatggggtttcaccatgttgaccaggctggtttcaaactcctgacctcaagtgatccgcccacctcagcctcccaaaatgctgggattaccggcatgagccactgtgctcggctgaaaaaaaccatatttttaatttaaaataataaatgggtctgaccagaaatgcctgcctcaaattgcaggacacatgacaaagcccattcttacttaagacattttcagtgtgcgatgggtctaccgggatgtaaccccatcgtgagtcgaggcccatctgcaccctgctatagctactggtagatcttacctgtttcccaaaaaggacccaactactttaggttcaaggcacttttttggaatatttaacagggaaagagcctggaactaaaaacaggtctaacgcaagatgccgccacacgatggcactgcttccgtagacctggaagaaacgcgggcgcgggagctggcggcggacgcccgggtctgcggggtcggggagtagcgtccggccggagagcccgcacctcgaggagccggcggaggacgcggtgtcgtgaccgcgtctcccccatctgctctgcttttggcgacagcgtcccgtcggcctttcggccaggacgcagcagccgcgtctctgggcctcgacccccagggccggccggacccgggacctccgaggagagcagcgagaaccggcccggattccccgaggcgcccgagtgcggtgcgggcagccctccccgcctgccaggccgccgctgtccccacgtctggtcccccacgcctcttcccgcatctggtcccacggtggaggcgcggggcgagggcctcacgcgcgtgcccacggtcggggggcgtccttggacgcgcgggtcctctcccacgggtctccaccccccgccctccggcgacaggagccggcctgggacgcgcgcgctgcggccaagtcctggttttgatttcactcccaaccccgaggagcgaggaggttccaagcccacaaacaggaagaagagaaggccctggagtgctggcagagggagtgtcattcccagcagcgcagcgcaggccggcccgggccggggagggagcagcagcgcgggcaccctcctgcaacgtgggctgggggtccccagggccggggagggggccccggggaggaactgagagggggcgcgccccgggaaggctcggggcggctccggggggctcccagggcgcccccgccccttcccccgcggccccggggcgcccccgcggtgccggagtcggggcg

SEQ ID NO: 40428 - DNA, 2300 bp, Homo sapien
aatgcatcattttttctacttaggatttgtccatgctattagaatagagtgctaacttccataatcagtcaaaatgagaaataactttttttttttttttgcgatggagtcttgctgtgtcacccaggctggagtgcagtgacgcagtctcggctcactgcaagctctgcctcccgagttcacgccattctcctgcctcagcctcccgagtagctgggactataggcgcccaccaccacacccggccaattttttgtatttttagtagagacggggcttcaccatgtaagccaggatggtctctgtctcctgacctcatgatctgctcgccttggcctcccaaagtgctgggattacaggcgtgagccactgtgcccggccgagaaataacattttttttaaagtcagttccctttaagtgaaaacttttcagtaaaaggttttatcatgttagattggctttttaaaaagtagatcaagaggcatgttttaaaatacaggcggttgtctaacaagctgttcctaagcaaggttctggtttgttttaggtcagtatgacggtaggggaaagccattgccagagtaccacgtgcgaatcgccgggtttgatgagcgggtaggtgtgagggtgtgtgacccagtccctgtcctgatgaacgttcttcagatgagaatgatctgtttgcctttagtatatgagacaacggcccatgttgatcacagatatatcaagtttagcatatttactgaattcctctttttttttttgagacggagtcttgccctgttgcctgggctggagtgcaatgggacggtctcggctcactgcaacctctgcctcccgggttcaaacgattctcctgcctcagcctcccgagtagctgggattacaggcgcacgccatcacgcccagctctgttttttgaatttttagtagagacagggtttcaccatgttggctaggctggtcttgaactcctgacctcatgatccatccacctccgcctccgcaaagtgctgggattacaggtgtgagccactatgcccgggctttttttttttttttcttttttttttttgagacaagagtctcattctgtcagccaggctggagtgcagtggcccattctcagctcgttgcaacctccacaccctgggttcgggcgattctccatgtctcagcctccctagtagctgggatacaggtgtgcgccaccatgcctggctaatttttgtatttttagtagagacaaggtttgaccatgttggccagactggtctcgaactcctgagctcaagtgatctacctgccccatccttccaaagtgctgggattacaggcgtaagccactgctcccggccctgggtttcttaatatattatgtctccagtgtttgaacaacagttctatttaagatatcataaactcaaagagtaagctgtgtgtgagtatccactataaaatatgtgtagcattagcttactactgtagaaagtttgcatgttggctgttgctgcttgctaaagatatccacattcataagcaagtatttataatcaggaatacaacatttctgcgggcacagcagtcaggcacaagcaggtagcagaaattcgttgctggcctgggcgctctgctctttggcactgtcttcagagggcggccccacggaggaatgctcacagccactctggcttttccctctgagtttgacacgtggctagcctgtgccctgagatgacattctgatttttgaaggtgacagtcatggcgtctctgcgaaggcccaagcgcatcatcatccgtggccatgacgagagggaacaccctttcctggtgaagggtggcgaggacctgcggcaggaccagcgcgtggagcagctcttccaggtcatgaatgggatcctggcccaagactccgcctgcagccagagggccctgcagctgaggacctatagcgttgtgcccatgacctccaggtaactgccaggctgctcccagccagtaggctgctgcatattgcttggcgtccacgggactgtttttctagtgaagaaagagcagtttgggtttactcgttaaccttttattctccctttcaggttaggattaattgagtggcttgaaaatactgttaccttgaaggaccttcttttgaacaccatgtcccaagaggagaaggcggcttacctgaggtaagggcggccacacgccctgctcccccagcagtcgcctcccctcacttctccagtggcaggtcggggccgtgacaggcgcgctcgagagcccacactgcctg

SEQ ID NO: 40429 - DNA, 2300 bp, Homo sapien
agtgatccacctgcctcggcctcccaaagtgctgggattacaggcattaaccgtgtcacttataatggaacacaagaaacaaaaggcagactggatgttttagagtattgaaatattcaaggaaagcaaaactataattttttttttttttagagacacggtctcactcggatacccaggctggagtgcagtggcatcatcatagttcactgtcacttcagactcctgggctcaatagcgatcctcccacttcagcctcctgagtagatggaactacaggcatgtgccatcacacccagctaatgtttttattttttgtagagttggggtcttgctatgttgcccgggttggtctcaaactccttggctcaagtaatcctactatcttggactcccaaagtgctgggattacaggcatgagccaccatgcccaaccaaaactatacatcttaaaagcagagaagaaacatataccattgagcactccattcattacacttataagcttagagccttttccaaagtccaaactaaacatcagtctttatagtaaattcttactaatttcagacttttggaaaagaatttgataaacattttgggaaaggaggttctaaactactgagaatgaagctcagtgacttcaacgacattaccaacatgctacttttaaaaatgaacaaagactcaaagccccctgggaatctgaaagaatgttcaccctggatgagcgacttcaaagtggagttcctgagaaatgagctggagattcccggtgagttaacctccaggggtgacaaaactgtactgtcaggagcacagcactgtaataagaactcgtggtttctggaatagtgatactgggatattgacagttatttctttttttaaagaattttaaaattcaccgaatttttcatcattaggaaaatccataattatgaatgagcacacattactaaatgtttaatgagattatagttcttatatttctgattctgacaaaagttcagattttcatttggtaataatggtaaacagcaatcatagatttcctctgaatgtattcatgctatgctcctgaataacttttcttcagaaatatacaggtatagaggcagattacttcctgggatgtgtacacagttccatttaaagtgacaagtttttaaaaaaaaaaaaaagtgacaagttaatgataagtcactgacctgcaggaaaaaagatcataatattaaggatagagatgcacagcaaattggccagatttcaaggcgtgactttttcagaggaaacctgtgtacattccattttcctcaccccgaatttgccagaggaaaaaaagttttaatctggttgttcatattctcatttcagtgggtataagaaaaaacatatttggagaaacacttttctttgttattaataatgactatgcagttgcatatggttcatttcaagaaaaacatttaaatgtcagccttgtcatatgcagcttgattggccttgagaatatgcagtgttctagtcaatgcatcattttttctacttaggatttgtccatgctattagaatagagtgctaacttccataatcagtcaaaatgagaaataactttttttttttttttgcgatggagtcttgctgtgtcacccaggctggagtgcagtgacgcagtctcggctcactgcaagctctgcctcccgagttcacgccattctcctgcctcagcctcccgagtagctgggactataggcgcccaccaccacacccggccaattttttgtatttttagtagagacggggcttcaccatgtaagccaggatggtctctgtctcctgacctcatgatctgctcgccttggcctcccaaagtgctgggattacaggcgtgagccactgtgcccggccgagaaataacattttttttaaagtcagttccctttaagtgaaaacttttcagtaaaaggttttatcatgttagattggctttttaaaaagtagatcaagaggcatgttttaaaatacaggcggttgtctaacaagctgttcctaagcaaggttctggtttgttttaggtcagtatgacggtaggggaaagccattgccagagtaccacgtgcgaatcgccgggtttgatgagcgggtaggtgtgagggtgtgtgacccagtccctgtcctgatgaacgttcttcagatgagaatgatctgtttgcctttagtatatgagacaacggcccatgttgatcacagatatatcaagtttagcatatttactgaattcctctttttttttttga

SEQ ID NO: 40430 - DNA, 2300 bp, Homo sapien
caagacattctcctgtctcagcctcccgaatagctgggactacaggcgctcgccaccatgcccagttaatttttgtatttttagtagagacaaggtttcaccatactggtcaggttggtctccatctcctgacctcaggtgatccagctgccacagcctcccaaagtgctgggattacaggcatgagccaccgcaccgtgccacatatagcatctagtttaaactgtttaagttattcctacaccatattcactactagaccctccggaagaaaatctcaccttttaatagggcacaacatcaaggtctgcatactcgtgttttaaagaaggaatacaggagatccacataattaagtatttgaatatttaaaatgctaaaaagaggcacttttactacaaaggggaaaaagttcccacccaggcattgctaaagagttaaaagaacatgacttcaattacatttcttcaatttttctcaaagtaggaacggcaaatagaggggtttggaaaaggtactggtgggattaggcgagattcaggtgaaagaaaatactttctcttggccgggcccggtggctcacgtctgtaatcccagcactttgggaggccgaggcggggggatcacgaggtcaggagttcgagaccagcctgaccaacatggtgaaaccccatctctactaaaaatacaaaaaaattagccgggcgtggtggcgcgcgcctgtaatcccagctactcggggggctgaggcaggagaatagcttgaacccgggaggcggaggttgcagtgagccgagatcgcgccacttcactccagcctgggcgacagagcgagactccgtctcaaaaaaaaaaaaaattatttctcttgccctgccccccactctgcatagcaatgattgccatattaggggtcgttttcaccaactttggctttaaaatatctttcctctaatactagggggtaaaaagcagtatgacaaatccctttatacacatacacagaaattcccccaagaatctaattgctgtacttcaaaataccgtcatctaaacacagagaagcgccgggctgcccggctccagaacgactcgggaagccaggacccacccgcggcccagctcgggccggtacccacccagcaccgcggggctgctgctcaggacgcattcctgccccaggccgcggatcagttgatgaccggccagggcagcaccgcagcggtccgcagcggacaaggtctcctgcagccgcagcagggagcaacgcacaccggctccggagcccgccatgccgccgagtcccgctcccgcgcgtgcgcccgctcggcccggacccggaaatgcccctacgcgcggaggcggggctgcggggcgcggcggcaggaactttcccggggacccctgcgggaaggcctggccagtaagcgcgcctctttggcccgaatcaacatggaaacctaaggaaaaacgtctgacctgcggaggtagtttgggtggctacttggtgttggacttggctaaataaataccagaggcagataaaacaagcgaggggcctaggtcaagagttccaagtttgttcctcgataaaaaacgacaaacgcggtcgggggcggtgatgcccgcctgcagtcccaacactttaggaagctgaggcggggggatcgcaggagttcgagaccagtctgggcaacataatgagaccatccccaccacctcccgtccttaattttttttaataaaaaaaatctttaagtgagaaatgcatctgtaatgtccttattaaccaaaaacgcctaagggataaagaagcacacgctccctagccaacgctagaggaacacaccccgagagctggtgctgtaggacccagttttcccgcgaaaacgctgccgcgcagggggtcagaccatctggaccaaggggggccgagcgaggcctacttctggtttacgcacgggcgctgaaagaagcggcactgtccccccctgccgatgcgcagtggcgcctcccggaggcggagccacgtacgagcgccgctgtgattggtgaggccccgccaggggcggagacgaccttgccgccggcgggaactctgggtctcgcggtttgggagcgctactcgccaggtggactcggagtccgcgagcgtcgtcggcaagcggccgcctttccacggtaaccgcgcgccggcggggagggcgtggcgcggagccgacgggaacgtccgcgctgcggagcagggcagggaagccgggaggcgggcccggcccgagcttgtccttgtcgcgcaggta

SEQ ID NO: 40431 - DNA, 2300 bp, Homo sapien
aatcatgaaaacagagttacccacatgatacccgccataagatggtttcaggagactgcatactcaccccgtcagactgcagatccacttgcaggcccttctgtgcagagcccaggtcaggcctctgtctcacaggtgtgcccctaacaccacttcttggggttccctctacccgagagctgggagtgccgtatgtcagtggtgaactaacatcaaagtcaagagggatagctataaaaacaaaattaggaaattctggtggcatatcaaacctgaaattacagcatgttgtctgttgatctataccatctaatcgcaacagcaaactgaatatttattgcaacctgcggtggctgagattctgagcactcttaaatgttctattaaaaaaaagcaccagagaagctgcttcctctgctcactaagccctaaaactactattttctgcactccgttcagctcctctggttaagaacatgctcagtcacgtgcagaggggatgctttaggcgttatgccaactgttataaagccagtaaacctgagcagataaagcatcagctgtgtatcaagcacagcaaaaccaagatcttcagacacgcacctgaagaatgcatttggggagggctggaaaacagcacgtcctgcgcagcagggctctgcaggtccactccaggcgaggttggcatcggctgcaactcccccgtggaggtggaatcctcgcctctacgtctctgagagggagatgacctggcatcctcactccgagcttgtgtcacacaaaacagaaaagacagccattaactttcagggccggccttcctggatttgtcttttccttggggcattatgactcaccactgaaccaaaccaaacagaggcaaatggcaatcgaattaagcagcacccaggccacagcctgctgtgggtgtctgtgcgcaccaagcggcagcgcccagcccgaggctgagcgcccgggtcccgcgcacccacccagcgctgccagctgcggcgagagggcagacggggcggcgccgggggctgtagtgggcccggctcgggggactcacgcgtctgggcgggggtggcccttccacgccggctgccgcggcggctcggggtcgacgccggggacgacatagtgctcggagtacctgcgcgacaaggacaagctcgggccgggcccgcctcccggcttccctgccctgctccgcagcgcggacgttcccgtcggctccgcgccacgccctccccgccggcgcgcggttaccgtggaaaggcggccgcttgccgacgacgctcgcggactccgagtccacctggcgagtagcgctcccaaaccgcgagacccagagttcccgccggcggcaaggtcgtctccgcccctggcggggcctcaccaatcacagcggcgctcgtacgtggctccgcctccgggaggcgccactgcgcatcggcagggggggacagtgccgcttctttcagcgcccgtgcgtaaaccagaagtaggcctcgctcggccccccttggtccagatggtctgaccccctgcgcggcagcgttttcgcgggaaaactgggtcctacagcaccagctctcggggtgtgttcctctagcgttggctagggagcgtgtgcttctttatcccttaggcgtttttggttaataaggacattacagatgcatttctcacttaaagattttttttattaaaaaaaattaaggacgggaggtggtggggatggtctcattatgttgcccagactggtctcgaactcctgcgatccccccgcctcagcttcctaaagtgttgggactgcaggcgggcatcaccgcccccgaccgcgtttgtcgttttttatcgaggaacaaacttggaactcttgacctaggcccctcgcttgttttatctgcctctggtatttatttagccaagtccaacaccaagtagccacccaaactacctccgcaggtcagacgtttttccttaggtttccatgttgattcgggccaaagaggcgcgcttactggccaggccttcccgcaggggtccccgggaaagttcctgccgccgcgccccgcagccccgcctccgcgcgtaggggcatttccgggtccgggccgagcgggcgcacgcgcgggagcgggactcggcggcatggcgggctccggagccggtgtgcgttgctccctgctgcggctgcaggagaccttgtccgctgcggaccgctgcggtgctgccctggccggtcatcaactgatccgcggcctggggcaggaatgcgtcctgagcagcagccc

SEQ ID NO: 40432 - DNA, 2300 bp, Homo sapien
cagatggttgtagatatgtggagttatttctgaggcctctgttctgttccattgatctatatatctgttttggtaccagtactaggcaattttttttactgtagcctcgcagtatagtttgaagtcaggtaggtagtgtgatgcctccagctttgttccttttgcttacgattgccttggctacgtgggctcaatacccctgatgaacattgatgcgaaaatactcaataaaatactggcaaaccgaatccagcagcacatcaaaaaagcttatccaccaagatcaagtcggcttcatccctgggatgcaaggctgcttcaacatatgcaaatcaataaatgtaatccatcacataaacagaaccaatgacaaaaaccacatgattatctcaatagatgcagaaaaggcttcgacaaaattcaacagcccttcatgctaaaaactctcaataaactaggcattgatggaatgtatctcaaaataataagagctatttacgacaaacccacagccaatatcatactgaatgggcgaaaactggaatgaaggattctttttattttttatttttttttattttgagatggagtctcgctctgtcccctaggctggggtggagtgcagtgtcgccatctcggttcactgcaagctccaactcccgggttcacgccattctcctgcctcagcctcccgagtagctgggactacaggggcctgccaccatgcctggctaattttttgtatttttttttttttagtagagacagggtttcactgtgttagccaagatggtcttgatcttctgacctcgtgatccgcccgcctccgcctcccaaagtgctgggatccatgcccggccaaaagcattccctttgaaagccggcacaagacaaagatgccctctctcaccactcctattcaacatagtattggaagttctggccagggcaatcaggcaagagaaagaaataaagggtattcaattaggaaaagaggaagtcaaattgtctctgtttgcagatgacatgattgtatatttagaaaaccccatagtctcagccccaaatcttcttaagctgacaagcaacttcagcaaagtctcaggatacaaaatcaatgtgcaaaaatcacaagcattcctatacactaataacagacaaacagagagccaaatcatgagtgaactcccattcacaattgctacaaagagaataaaaatacctaggaatacaacctacaagggatgtgaaaaatcttttttttttttttttttcagttttatgtagagactaggtatcactatgttgtccaagctggtctcaaagtcttgggttcaagccatcctcctgcctcagcctcccaaagtgttaggattacagaagtgagcttcggcgcccagcctgtattactttcctttttctttctttcttttttttttttgaaatggagtctccctctgttgcccaggctggagtgcagcgatttctgctcactgcagcctcacctcttgggctcacgtgaccctcccacctcagcatccctagctgttcaaatttattgtccaactcttttgaatcgtttatcaacgcaaatctgtcaatgcccacttatttttatttatttttttgaggcggagtctcgctctgttgtccaggctggagtgcagtggcgcaatcgcggctcattgcccctccgcctccccggttcaaacgattctcgtgcctcagcctcccaaatagctgggattacaggcgcgcgccaccacgtccggctaatttttgtatttttagtagagacggggtttcgccatgttggccaggctggtttcgaactcctgacctcgggtgatccgatcgcctcggcctcccaaagtgctgggattacagacgtgagccaccgcgcccggccctcatgaacttattctttagcgtttcattttgagagcgggattcacaagggaattgcggaaacagcagcgaggccccgcgacccctcggcccacgtgcgcgctgtccctcgggtcgccccgcgcccgccgggggcggagtccgctgtgacgcgtgcagggcggcgcgctcccggaagtgacgcgcgacggttcgtgcgtgcgtgcgggcggctgcgtcgggctgcaggagaagatggcggtctccacaggtcggttcccgggccgggctgcgtgattttccgctccgacccggctctgcccctccgtctgctgctggcgcccgagcgctgaccgtgcgggagaagcccgagtgcgctgtctcgaatgccgcgctctccgcagagcgtagcc

SEQ ID NO: 40433 - DNA, 2300 bp, Homo sapien
ttatgtatactatgagatcagattgggttctaattttattttttcatattggtaaagtgttccaacaccattaacttttcctactttttttttccttctcttttgagacagggtttcactctgtggcccaggctggagtgcagtggtgtgatcacagatcactgcagtcttgacctccctgggctcaggtgatccccaccttctgaatagctgggaccacaggcatgtgccagctaccacacctggctaatttttgtattttttgtagagatggggtcttgccatgttgcccaggctggtttccaactcctgggctcagttgattggcctacctttgcctcccaaaatgctgggtttacaagtgtgagccgccaccatgcccagccttttctacttttttttttttttttcttttgaaataacttcagatttgcagaaaagttaacataagtagtacgaaggattcccatataccttcatgcagatccatcaaatgttgatgtttaacatttttgcttgctcttgtgtgtactctctcttcccccctcccttcacattcgattttgttttttgggggaaccattcaagggtaagttaacagatactgtctcttcacccctacattcttcaactaggacattttcttacaatagaattatcaaaatcaggaaattaatgttgatagaggactattatctaccagccctattcagatttcaccactactgttctttaaagcaaaataatgataataatatttttcctgataccaagattgcatttggttgtcatgcctctattctctttactgacttttagtgttgcctctactaagaagcacattttcatatatgatatgtctgctttggggcttttctttttcattagtctgtccatttctgtactgattccatattttcttaatgatttctttagctgatgaggaagtcttaaaatctaggaaagtgtcccctctgttttttctttttttgttttgtttttgtttttgagacagtctcgctctgtctcccgggcaggggcttgatctcggctcacttcagcctccacctcctgggttcaagcgattctgcagcagccttccaagtagctggttgggattacaggtgtgcaccagcatgcctggcttatttttgtatttttagtagagatggggtttcatcatgttggccaggctgggttttttttttttttttttttttgtgtgtgtgtgtgtgtgagacagagtctcactctgtcacccaggctggagtgcagtggtgcgatctcggctcactgcaagctctgcctcctgggttcacaccattctcctgcctcagcctcccgagtagctgggactacaggcgcccgccaccacgcctggctaattttttgtatttttactagagacagggtttcaccgtgttagccaggatggtctcgatctcctgacctcgtgatctgcccacctcggcctcccaaagtgctgggattacaggcgtgagccactgtgcccggccttttttgttgttttttttttttttttaagacagagtctcgctctgtcgtctaggctggagtgcagtggtgcgatctcggctcactgcagcctccgcctctggaacattaaatgttccagaccagtctggccaacacggtgaaactccatctttactaaaaatacaaaaattagccgggcatggtgttgcacgcctgtaatcccagctatttgagaggctgaggcaggagaatagcttgaacctgggaggtggaggttggctcggctacagagcgagactctgtctcacacacacaaaataacacagcaggtgtatgaggaacattaaatgtctttcctaacttactgtatgcaaataaaagtagatacttaagaaattgtctaaaaatatttagtaaacccatttctacacagacaaattaaaagttctgagaaatcaggctaaaatcacctcaaatttataaggtttgattaataaatatttacctttgcatatacacgaaagcaaaaaaaggtaggaatactttcaatttcagataacaataaattgaaatcaagtacaaattttgactccccttcctaaactgaataaactcttaaaaagcagacacactttacttgtgtaaacactcttcttttttttttttttaaatggaatttctctcttgttgcccaggctggtgtgcaatggtgtgatcttggctcaccgcaacctccacctcccgggttcaagcgattctcctgcctcagcctcccgagtagctgggattccaggcatgtgcca

SEQ ID NO: 40434 - DNA, 2300 bp, Homo sapien
aggtgaggagaggaggcagtcatatcataccataaagctctgcctgggacaagcctgtttccaagccagcaggcacagctgcacccaggccatagcccctctgaatgtgccacccctctcctccgccctcttgcctctccccatcattggcaaagtgctgttcatccccagtgcaaagcagtttggctatgtcatgtcgacctagctcagccctcgttccttgagcaaacacagcaagcacatatcccgagagggtactgctggggcttcctcacagtggtgggagccaggcagcagacaggtggcttgtctactaggtcacgatgaggcaaaggacagaagtgaaagagcaggggcattggtgttgccagggctgagagttgcagtcctggaagacttcctggataaggggacatcagtgcagagccaggatgtttcctggaggaagagcgttccagatgggggagatagcatgtgcgaaacatagaggcagggacagtggcagcacaggacaggggtagggtggttggcataggaagggaaggagcaaggaatagggcaaagaggcaggaaggacccaggccatcaggcacacaggctactggagactgcctcttgctcagcatgagacagagagtggctagcagcagttgagctgagcgtgacatgctgtaagagccctctgtcagttttcagagatacaaggtgtgagctgagggaaggggagaccaggccgggggcttgcagggaggccagtgagaaatgatggcagcctggggagctaggcagagctggatgtggtgagaaaggctggcttctgcacgtactttgaaggggaagctgatcgaatgtgtgatgcactgggagagcagcatggaaggaagagatgagtcaagcatgacttcagcttcgggtggccaagcatcatcctgccctcctcctccaggaagcccatccaggcagctctctgaacaaaggtggtgcctcttcaggaagagctagagtgtgagcagctgctgtaaaggacgggtccccactgtctgtctttgggctcctcttctctcctcttccctaagaggtggagggagttgaaccgccagtcctctggcaggaagacattcaaaggaaacttttcctagaattgtgagtaacggagctgctaaaaatgaggcttggctttacagggcacatactggaaataaaggctattaataggttcctgcaggaccattgccacactgaaaccggctcccaggcagccagcctcgcccagtggcacccatggggttgagatgcagaaatccaggccttctaagcagggcagaaaaagaaaagtatttcatagacttgccttaggagtgcaaaaagagtcaataaccttttccacccccagtgtaaggcgaacagacccatgagctggtgggaatatctgaacacacacaaaactgaaaggtcacagagcaaagctgctaggcgcttcctgcccattccacctttgcacaaagaacacagattggggctttggctcccttcaacacatgattggcacctagtgtgtgcagacactgggggagccatgctcccctgggacagcatctgtgaaacccactgtactgctgggaccaagggggaaatcaggtagcaagaatgagagtccctgaaaaacagcccatttctctcaagcagcaagaagccaaagaaaaaaaaaaaccaacataaattctttctgagcccagtttcctcatccataaaatgggcataatgctgcttacactggtgttgtgagaatcaaatgggatgacatcaaaaggggccggctccccgtgaggagcggcgaatgtgagtttgccttcccggttgctaatggaagaggaaaacaaagagtttgagccaagggggccgtgcagagcctgggagtacaggaggaagctgctgcagtgggctattttccacagtctccggaggacggcggtcacatactgagtgcatgccctctttccacctcccaccagagcaccctctgtgccaaggcaatattgcagtagtgctgcatggaattcgtccagcacactatgaacagaaactgccttttgatttcttcttttatcttgcagacttttcatgttttctccagaaacagaggaccccagctcatcagggcattcttgggatgccaagactcaagaccccatgtggtcgcctatctccttcctctgctccctggtttcacctgcgtctcacacaaaaccagaaacgcctcaagcagaaacagagtctgtgaccgaatcatcaattctggt

SEQ ID NO: 40435 - DNA, 2300 bp, Homo sapien
tggggtaagggctacctgtttaccgtaggatgttgagtagcatccctggcctttactcactggatgccagtagcacccacaccccacagttgtgacaaccaaaaacatctccagacattgctaaatgtctcctggggggaagatcactcacaactgagtaccactgtgttaaaagcctggagtcttaggcttttccagggtgatcagagacatggaggattttagggtcccaggctaggtagacatggaataggttgggaggcattccttgatagggttatttgcatattaaaacacattctgattacctgtgttggctatgttagcagcatagttcttcaatgtgtggcatagctgtccttatagaaaaacaaaatggttaattcaggtttggtttttgaatgatcttgtacacctggaggtatgttgggctatgtttctcactatttacaaaaacctgttatgtgtaaatacatctgatgcttacccatatcatccccagttctgtagaaacaaattcaacaaaagaggagaagcctggaatagtggaatactttaatcgtcacaccagtactgttgtgtggttttcttttcttctgccctggtttctctaagctcacaatgtgtttgcagggctggtctaggtcttccttcttgcctttactgggcagaactaagataataggaataaaaaggggaagcagaacaaaaggatgggcaggttctcccaggtagaatcgacagtccagtccagtgctcctgccacttctcttggacctgctgctcccactgtgtgtgtgtgtgtgtgtgtgtgtttctgtgaatgagtgtatgtgcacatgtatgtctgcatgtgtgtgtgcacatatgtctgtgtgtgcttgtatgtgtctgcatgcgtgtgcatgcatgtgtctgtgtggtttggacttggcgtgttatcccaggcgggccttgccatccagaaaagaagaaggcagttaggaaatgcacttaactgctgcagggaagctagagttgctttgtggagcttgtttcaaatgggttttgttttgaatctacaagttcattcaaattcaatcacagcaaaattcacagattgtgatgtcatgcggattgaaaccaaaaaaggctgtatagaatgctttctgccagattttactcatggcttcaggaaactcccccacccaccagtcttttttcttttttctttttttcctttgcattgtgagccaagacttaagggctgtgccttactaagcctcacttccatttacagagttttctttttttaacagcccttgggcctacggccttgacatctgtgctgcgatttctctaagctcctatcactctgctttgcttccgcattaaaaagagaatagatccttctaattgtacagacaccaacattgtctagggcagggggagggttgggtagagaaggaatttatcaatcatgaacctagtccacctgtttattgttattaagctaactgcatggagaagacaccctcaatccacaaggaaggcccctcggaggtgactgttactactgggccttccttccccatgacgtgacacttgcattcctctggcctcctggcagatggaaacctcacttatgtcatccctgtgtggtggcttggactttggtagtccagcactgttatgggatgacttaaggaagggctgtgccctgggtctgtttaagggaaggtgtgggcctcgggctcttaggataaggaaggagcaggagctggcatgacctttcattcctgtgtgtcggccatgctggggctgtggctgggagcacaccagtatggccttcctggacgcagccctctgtggacagtaactggacccttttggtctagattggattagaactaggattacattcgattccttgtggtgagtctttttctagctagagaaacctaaacccaccttctcccagtgtgattcttgagtgataccaacatgtaagaatgttagttcaaactgtcaggcacagggagtggaatctcagtgttcccacgaatgaatggataaatatagaagtggcataggagtcaaatttacttaatttcttgtctcagtctagaccactgatgggctgaattcctatgagtggggatgagaccctcaatctccctgtgccactcgggggctcttcgccttgtgccttgccttgaggtcagtggtggttcaaggatgatctcgacctcttgagagtcgtgaattccttcttcttgctgctgtgacactgtattatctcttatcacaatgctcactgt

SEQ ID NO: 40436 - DNA, 2300 bp, Homo sapien
gtctctggggctgcatagtctagtgacttgctttggccaatagaatgtgatagaatgtgctggttccaaggctagtccccaagaggtcttgcatgcatcctgtctttattttggaactctaccactgctatgagaagtgtctgggctaacactctggagaatgagtttttgtggagcccagccactctcaactgtcaagccccagctgacctacacaaagtaccaactcatgaatgaagctggaggacaccagctgagccctttccagatcagtagagcttcctggccaatccatagcccatgacaaacagtacatcattgatttttcaaatcacaacatttttggtgtggtttgttgggcagcaataaaactgatacagtcaataaccaccttttgttgctacatggaaaggatctttcttatcagtccttatggcagaaattgtaaaggttaaccaaaatctgtttccttttccatcacaggcacacagctaggtgatactgcctgtcttgcttgtggccatgtgactgagttatggctaatgggatataggtagaaggatgcatgccatgtctaggtccagtccataaacgcctccatctcttaatcccttccccatatgctggcccagtggagaggagctgggggaggccaagccactggatggaagatgcacggtccctgagtgaccatgtggatgactgcgactcagcagggatgtctacagaagactttgtgcaagtgaaaagcaagttttcattgtgtcgagtcactggtactttaaggttcattatcacagccggagttacttaccatcaccacccttcttctccctcttggcctccctgtggctgtgggcagtagatatctccctcctttataactcctcttcccttggtttcctggatgccacacatcatggttttcccacacctgtatcaatggctcccactaccttgcagataaagcccaagattctgagcttggttgaactctctgcccgtcgttctcaccacacaccttcacaccctgtgtgcttccctaaacacaccatgctctcatttactctgtgggtttacatttgttgttccctctgcttgaaatactgttcctactgatgtattgcttgttctgagaacactgggccctgagattgggttgctcccatgggttctgatggaatcctgtgtttgcgccaccatgggacttgctgttgtaacacttctccatctctttcaccagctgactgtgcaagctctgagtggtttcagcctgctgggctcatgactgcgtgcctaatgcataaacaagtgcttgtcacctagccatactaatcaccatttggtgagtgcctgaattaatgggctttgtaggactggggaaccaacagggcatggagtctagaaattggacttaaagttcaataactgctaatgaatgaggaaatcaaccagaaaaaatgatgctgcttaactttccttggagattatctgtacttggtccccctaacaatgactagactgtttgcaattataggtacagaatagccttctttcaaatagtatttccttctatcatcattagtgatgaaaattggccaggatttatttcacatattacaatgcagaatttgatgttgtttttatgtgaacataactgctctctaaaacctcaagcatttttctctattagaattggcagaggagaggttatataaacttgtggccagttgagaagttcccaaaacatcactattgaagtagagggaactgagagcatagcatggtgtgtgtgatttactcctttaggatggcttagacccatgattgcatctgttcttgattatggcgccgcttttaaccacagagatgactcagcactggaaggttagctgtgctgcccaaggtcacacagcaacatgggtttgatggggtatccaaaagcagggatagctgtttttccctaggagcccacactgactccctgcctccagcacatggaatgaatcacagaaagcctctgttgagtcatgatgacaaacgttgaagttgacggcatgtacccatgaggtcatatggagaattcccaaggggcaccctagcccacgttcactattgaacacaacggaagggggaattattgtgcttcttgctttgattcccaagctggtgttgtctgagcctgtctggcatgtgctctgcctgccctgacttctgaccccaggaggagcattcaaggagccaaggaatgggtccaggcattgtgctagtatctagccatggcaagatgctagatctaa

SEQ ID NO: 40437 - DNA, 2300 bp, Homo sapien
ccggcatattttaatttcaacaatctgtgatattgcccctacatctttttattatttttttaactttaagggaacatggctgatgggctctaggccttaaactcgtgaaggaataactaattagcttacctatagcaagcacccggtgtatgcgatctccccaggccaccagaaataaccaccaatgtgctcaccaacagcgcaggcctgctccccaacacaggcctagtacatcaggtggggagcccacagcgtctcttagtaattactgacaaccactctttcggttccttgtctcttgaagtgagcagtgcagcaatctctaggaattaagtatttgctacagctctgtgatccaacagaaatcaataaggtgtcacaggtaagtataattcaaatatgtccagtctttcccttttgttctctatggtctcaggaatttcactcttctagacaaggggatatgtagaaacactatttaaaaatactactgttacaaactcataatcaccatcaattcatatcgggtaactgttgttaggacatttgctttaggataacacagtccatgcctttaccaagcaccctttgctctagtttcaaacagcatcccaatccttcattccacaaacaaatgaaacagtaaagaaaaaccagaggcctcgacattggaattatttcatttgggattattactcatggttagtagaatttttctgccttcagtctaaaaatgccagtatgtgtacaataacatagtttgtcattttcccctctgaagttaaacgagcaggcactctggagaatactgtagatttggtgatcctggctgagccacccctttttattgctgccttagctgaaagaggatatcccctctgtgatcaggaaaagcagaaagtcctcccaccctgaagatgtaaggaatatcctttgtctgccggcacagaacttgtctttcaaataagtaaaggaccaaggttgctgagatattttccggaaaagcaagattgggctgtaccccacacccaagtggtgttgtcagcccgttttcattggggggaatgcctatttaagcagtataaaaattcctcgtggctttcctcagattccacagacaacctccatcttttggaagtgagatgagggcagtgggaaaagaaaaaaactacagtcacaagccacatagcgccatttaagtcaacatcagacaacattaggacagtggtcccataagatgtaacactgtactggaacactgcaccttccccagagtgcttagcactctgttttagctgcctgcagcattccgcgctgtgacctgctgtgcaggggtgcagcccagaagcaatgggttgtaccatacagcctggcgtgcagtaggcaaggccatctaggtttgtgtcggtgcaccgtgatgtgcacacagtgatgaaatctcctagtgacctcggaacgcgtcccgctccttaggcaacccgtggctgtattccaatttccccttgctctcagaaacacaactaaaagctcgaagacctcaggtgacagactgcctcctgttacctcaccaagactgaaaacctaagcagtggctccgcccaaagagcaagcttctagccctctgacgggaggcccggcaagatcgtcctctggacagcaccttgctattttgtgacgctgctccagcccccaagatgtccaagatcttgggccttcccttgaggcgtgacgctcacgacccgaaacacctctcatacagcgtgcacaccacatttcagattttaatgatttacactgcaatcaagcaaagaggctgcgaactcaaaagccagcaacaactgaacatttaaactccaacgtcaacagtcagaatacagccctcaaggcggccagctgggaccctgccggcggcaccgcgcaccgagaacccagcgcgagcagtcgctgagccgatgggcggggcccagctgtagctttggctacgtcgcgggcagcctgggagccaatccgcggcgggctgagccgttgccttggctacaccgtctgttagggccgcgcacgagatcagtaactgagacctcaccgcgttgacccagcaccagggctcgcgggggtcccgcgagggtctcggtagccgcgcgcccagagacccccgccgcggcccgattctctgagcgccagacatgaaccgcaagaaactgcagaagctgacggacaccttaaccaaaaattgcaagcattgtaagtaagaatgtagtgctggacaggccgaggctcctggaccgagcctgggtcccacc

SEQ ID NO: 40438 - DNA, 2300 bp, Homo sapien
catttaaagtgatatatcttattgatagtatgtacccttgatatgatgtgatgaaaatggcattttacctctgtgatcttcgtcccaaaacccataacgtcagtctaatcatgagaaaaacatcagacggcatctgccaaaacaactgtccattatttctcaaacctgtaaatgtcactagagagaagggagtttgagaaatagtcaatcaaaagcagcccaagaagacatgctcactaaaggtagagtgtacctagtgtacccttgtagacaggatcctggaacagaaaaggggcagtaggtaaaagcccaagaaacctggatatagtatggacttgtgttacataatttatcaatattgtgataaatcataatttatcaatattgtgataaatcataatttatcattaatttgtgacaaataaaccacagctacataagatgctaacagtaaaagaaattctatatgggagcgggagaggcatatgggaagtctctgtgctatctgcttaatttcttcattaatccaaaggtgttgtaaaaaaataaagtgaattaataagaaaggtgggatctctgaagtaatagaactgctcagcatggggggaggagccaagatggccgaataggaacagctccagtctacagctcccagcatgagcgatgcagaagacgagtgatttctgcatttccatctgaggtaccgggttcatctcactacggagtgccagactgggcgcaggtcagtgggtgcgtgcaccgtgcacgagccgaagcagggcgaggcattgcctcacttgggaagcgcaaggggtcagggagttccctttctgagtcaaagaaaggggtgacagacgcacctggaaaatcgggtcactcccacccgaatattgcgcttttcggactggcttaaaaaacggcgcaccacgagattatatcccgtacctggctcggagggtcccacgcccacggagtctcactgattgctagcacagcagtctgagatcaaactgcaaggcagcagtgaggctgggggaggggcgcctgccattgcccaggcttgcttaggtaaacaaagcagccgggaagctcgaactgggtggagcccaccacagctcacggaggtctgcctgcctctgtaggctccacctctgggggcagggcacagacaaacaaaaagacagcagtaacctctgcagacttaaatgtccctgtctgacagctttgaagagagcagtggttctcccagcatgcagctggagatctgagaacgcacagactgcctcctcaagtgggtccctgacccctgcccaccgagcagcctaactgggaggcaccccccagcaggggcacactgacacctcacacggcagggtattccaacagacctgcagctgagggtcctgtctgttagaaggaaaactaacaaacagaaaggacatccacaccaaaaacgcatctgtacatcaccatcatcaaagaccaaaagtagataaaaccacaaagatggggaaaaaacagaacagaaaaactggaaactctaaaacgcagagcgcctctcctcctccaaaggaacgcagttcctcaccagcaacggaacaaagctggatggagaatgactttgacgagctgagagaagaaggcttcagacgatcaaattactctgagctacgggaggacattcaaaccgaaggcaaagaagttgaaaactttgaaaaaaatttagaagaatgtataactagaataaccaatacagagaagtgctttaaggagctgatggagctgaaaaccaaggctcgagaacaacgtgaagaatgcagaagcctcaggagccgatgcgatcaactggaacaaagggtatcagtaatggaagatgaaataaatgaaatgaagcgagaagggaagtttagagaaaaaagaataaaaagaaatgagcaaagcctccaagaaatatgggactacgtgaaaagaccaaatctacgtctgattggtgtacctgaaagtgatggggagaatggaaccaagttggaaaacatgctgcaggatattatccaggagaacttccccaatctagcaaggcaggccaacgttcagattcaggaaatacagagaacgccacaaagatactcctcgagaagagcaactccaagacacataattttcagattcaccaaagttgaaatgaaggaaaaaatgttaagggcagccagagagaaaggtcgggttaccctcaaagggaagcccatcagactaacagcagatctctcggcagaaaccctacaagccagaagagagtgggg

SEQ ID NO: 40439 - DNA, 2300 bp, Homo sapien
gttactcgctagcacgcggatctgtgtaatgacatgccccatgcacagacccgagccccatcctctcctcacagtaggtgtggccgcacgtcctgacgccgatctgtgcagtgcaccctcggatacctgctgatggggctgggctggattatgcctctgtgatccaaatgtaagcttttttcatgcatagtgaattattattaaacgttgtaaatggatttttgaatacacattttagtagatgatcttgtgttataactaccagcaaataaataccaaaacattgtctaacactcttctttgttgtgaatagactgtgtagagtgaaacaaggaaataatagccatggcgatatgtgttttctcaactgtgctatatctgtaacaaaaatgtgtgttttgtgggaaatggagtgaaaagcaaggaggactcctgctctcataaacccaggtgcctacatccgaacaaaccctcacatagagtagcaagcttagaaaactgcctctggcttttactccaggttccagtttgtgtgtggagaaatcgaatatgtattcatattttcctctctcctgcaagtacagttccattagcataaggattcctttgaattattttctctgtttgacatttaaattagtgactgttggaagaaataagaataatcattgaaattagcttaggaaatctgtgagtgccccacctcaccctccaaacacacatacactcttgttttctcattccaagattaagaagttatgcaacctgacaatgcacttttctctgacaagtcttgacatcaccactgttattttctttttcacttttttcctccagcacctgttagaaacaagagtagggtgatcttcatgtgaatttgttctttccttattcttttagcaaaagatagggataaaagtctgcaatggacagagatgctttaaaatatgcttgaaattttatatttaaaataaaccacctgaaagtatttttagattgaagaccatacacaaaataaaggtgtttttgcagttactagactgggttcttaaaactttaatcaatctatattcataataatatccttcaatttcttttttagcattatacaggaaactggtagatactgagatggattttaatggctttatactgatgaaaatagcaccacataaaagcaggggaatattagaaataaaaataattgtctctaaagacccatacaaccctttttcccataaaaaaaaagatgcactgtaatacatgaaaagataagatctcttgtcaaaagtgtgagagaatgtccggtggttccaaatgacagttacctcttgccccccttctctgccagagttcctttttatctttgcaatcttccagttcttccgatcagcctgcctttagagggctacaaagcatttctttcaagccaccatagctaacacggtgacatgagtacttaatttgcacgcggccgcgctgcccctggcttcgcggaagccctgagtagcgcagcgccctcgccgcacgcaaggctgcagtcccgctccaggccagagtcccaggagagcgtcctccgcgctcacaggcgcctttgtcttcccgcttcccccttcctttttcaaaagccaagaggtaattatttggtctttgtgcaaggcaaacctctccagatgccacttccaaatataggctctcattaacaccagaggctggcctggtgtggtgcagggcggcccttccttctcctggcggacactgtgtccccgcgcgctggcgctgcaccacatctggaagccaggcgggcagggcagagaccccggctcctgcgcccctcctagctcccagagagcgtggatcgcgggcggggctcaccgagcgaggttacctctcttgaaaatacttaaacactttttttcctctccactgaaatctcaaaaaacagcccattttgaaccagaataatttagtctgacaacagattcttcctctgttcacagctgtcccagagggaggagctgaaatctgaacctctcagctgtgattggatctttcttgcaaaagagaggaaaaaaaaaccctcccagccaaaacgggctcagttcgtaaaggagccgggtgacttcagaggcgccggcccgtccgtctgccgcacctgagcacggcccctgcccgagcctggcccgccgcgatgctgtagggaccgccgtgtcctcccgccggaccgttatccgcgccgggcgcccgccagacccgctggcaagatgccgcgctccttcctggtcaagaagcatttcaac

SEQ ID NO: 40440 - DNA, 2300 bp, Homo sapien
gaagggcgggaggagggggaggatcaggataataactaacgggtacttggcttaatacctgggtaatgaaagaatctgtacagcaaatgccacaacacgtgttacctgtgtaacaaacctgcacatgtacccttgaacttcaaagttaaagaaagtcttacacttttggaaaagaggaagcattcctaaacactcaagaaatgtgataattgtagttataaaatattttgaaataaatgacaagaagtgtaattttggagtaactaaaaggaagaagaattaaagcataacagaaaataaagaaatacaaaaccaagagacaagagaggattaaatatttctttgaaaaaattggctttagtagacaaaggtgtagcaaaactaattattaaagcagagagggagaagaggcctaaataaatgatattaacaacaaaaaggaaggacggtcaggtgaagtagatatttattatttgtttattttgtttttatttaattgtgtatatttaagatgtacaacatgatatgacatttagaaatatctatacatgctaaaatgattactacactcaagcaaattaacacagccatatcatatggttcttttattttgtatgtgtgcatgagtgtgtgtgtgtgttaagagcacctgaaatctgctctcttggaaaatttccagtacgcagtggaacagtattagctacaatcctgctgtacattagatctctagaagtattcatcccacataactgcagcttttgtacccttggccaacatctcctgactccccgatctccctgcctcgggtaatcactcttctgttgtctgtttcagttttttagattccacatgtaagtgggatcatgtagctgtctttttgtcctgtgtctggagtaatatttgaaaggaaccatgatggcatactacagtaaatgttttgaatacatttgaaaacctagctgacatgaataattttttagcaatgtatacgctacaaaaattgtgttaggaatacacaaccaatagccactgaacaaatcgaatcagcaatggccacaatcacccctcaatgtaaagggagccacaatttgatgcgtaagtcaactgagtctgtgaaagggcaaagcaggccgggcgcagtggcttacgcctgtaatcccagcactttgggaggctgaggcgggtggatcacgaggtcaggagatcgagaccatcctggctaacacggtgaaaccccatctctactaaaaatacaaaaattagccaggcatggtagcgcgtgcctgtagtcccagctactggggaggctgaggcaggagaatggcgtgaacctgggaggcggagcttgcagtgagcccaaatcgcgccactgcactccagcctgggcgacagagtgagactccgcctcaggaaaagaaaaaaaaaagggcaaagcaatctatccgagaaatttgttactaaaatcagaataaaatttagcttttgtatcagtaaatgatattgatacaatgtcataaatatcctcttattacccatgatttccatttctcttgtcattcctgctagaatttctaactcactgtccatctgtccatcaagttccactgactctgtcccactttcaggaagacttcaatgtttcctagagtgctttcttgctccgctttgaccgtgggactctgccttgcctcactgaaactgtgggcaggtatgttcagtctccccagccagatagcaggctgcttgtacatcccacacgtgcccagcgtggtgctgcaggtggagtgtgtgattgtatctaaggctgaggagacacttgtgtatcgcctccctctctgtagtcaccagcggttgtgatattaaagaggctgagtccaaaagagcattgggccaagtccttccctgctgactgcagccaaacttggcaggctgctgcgttcggagggcctttggcaggctggagggcagacgtgcagagagtgcttgcttgctgcctctggctggctgtgtgcccacctcactccgagtcacccacagctcaggttccagccagcctggggcttctaaatataaggtgtgctcaggggtctcccatcacggacctaccactggccctgcgtatgtggtgcagcctctcttcaatccctaagaactggttctttcaaagcatgtattttctgaagaaactttagaaccacgtttattttaaaagaacgaattggagaaaacaaatcggtgagtgactacctcatggctgagttaacacttctctgacctttaggtctgttttagatggagta

SEQ ID NO: 40441 - DNA, 2300 bp, Homo sapien
aaattatagatggcacaaacaaatggaaaaacattctaatgctcatggactgggagaatcaatatcattaaaatggccatactgcctaaagcaatttaaagattaaatgctattcctaccaaactatcaacatcatttttcacagaattagaaaaaaaattctaaactgcacgtggaaccaaaaaagagcccaaagaaggaaagcaatcctaagccaaaagaacaaagctggagacatcacattacctgatttcaaactatactaaaaggctacagtaacccaaacagcatggtagtggtacaaaaacaaacacatagaccaatggaacagaatagagaacccagaaataatttcacacacttacagctatctgatctttgacaaagtcaacaaaaataggcaatggggaaaggattcccagtcaataaatggtgctgagatagctggctagccatatgcggaagaaagaacctggatccttacctttaaccaatacaaaagtcaactcaaggtggaataaagacttaaatgtaagacctcaaactataagaatcatagaagaaagcatatgaaacaccattctagttattgaccttgataaagaatttatgactaagtcttaaaaaccaattgcaacaaaaaaaaattgacaagtgagacttaattaaactaaacacagcagaacaacaacaaaaaaaaaactataagcagaataaacaaacaacctctagaatagaagaaagtatcatagccacaaactatgcatccaacaaagatctgaataaggaacttacacaattcaacaagcaaaaaccaaccccactaaaaagtgagcaaaagaccaggtgcagtggctcatgcctgtaataccagcactttggtaggctgaggcaggcagatcacttgaggtcaggagttcgagatcagcctggccaacgtggtgaaactccatctctactaaaaatacaaaaattagccaagtgtggtggcaggctcctgtaatcccagctactcgggaggctgaaacaggagaatcgcttgaaccaggagggcagaggttgcagtgagctgagatcgtggactgcactccagcctgggtgatagagcaagactctgtcccccctgccaaaaataagtgagcaaaagacatgaacacttctcaaaagaagacatactaatggccaacaaacatgaaaaaatgttccacatcactaatcgtcagagaaatgcaaatcaaaaccacaatgagataccatctcacaccagtcagtatggctattactaaaaagtcaaagaaacagcagatgctagtgagactgtggagcaaagggaatgcttatacactgttggtaagaatgtaaattagttcaaccactgtggaaaacaatttggagattctcaaagaacataaaacagacctatcatttgacccagacatcccattactaagtatatatccaaaagataataaaccattctaccaaaaagacacatgcactcatatgttcatcacagtattattcacaatagcaaaggcatcagatcaacctaactgcccatcaaaggtctactagataaggaaaatatggcacatatacaccatgaaatactatgcagccataaaaaagaataaaatgatgtttctttgcagcaacatggatacagctagaggccatcattctagatgaattaacataggaacagaaaatcaaatgacacatgttctcacttataagtcagagctaaatattggttacatatggacataaagatggcaacagtagacactcgggactattagagagaacagggaggaaagaggttaagggtttaaaaactaactattggggactatgctaagtacctgggtggcaggattagtagaatcccaaacctcagtatcacacaatatacccatgtaacaatcctgcacatgtacccccaaatctaaaataaaacttggaaaaagtttaataggaaaaaagaaattaattttttaaaaagacaacatgttaatgaatgaatatggctgtgttccaagagaattttatttaccaaactaagactgctgccattgggctttaatttgccatctcctgcctcagtttattctaaatgtcccagacctttggccttctaaaatcttcactaatatcaaggagcctgaatcttaatgggatttatggctcaccattgccatgcaagctttctaaggtattcatagaacttgtcacttcctggtcaacatatcaacagcaggatgtcatccttatagtgtaccaccaagatttcctctggg

SEQ ID NO: 40442 - DNA, 2300 bp, Homo sapien
aaagactgttagagaaagttgaccaagggcttcgttccacggcgaccgtttcctgcgtgtgcagctccacacagcgaccgcggcctgcaatgtgcggagcacagcgcggccccttccagccggagctcgcgagccgcggtggcggctggtggccaccccagggaaataaagccgttgctgctgcagcaaaatggctcaaagtccaaccaaagtctggccttttcctgtgagtaaatacgcggcctgtttggttttccgtcccgagtgattcccggctcagtaacgtttctcctccagggagcccactggaactccactggctgtgccgcctcctcgcccgtcccccgcgcgcgccgcaggccggtgcttggagagcgcaatgtccccgggagggaagatcccctacctggaatggatggttccagaccagcgggaacgcgctctaatccttgatggaagcaagcgtgggaggaaagcacaacgtctaggacttccctgtagtgtcagaacaggaagaagaacctgagaagtcgccggggaagggaggccaggagcaggcgtccggccccttcccacagcccgggagaaattagtgttgcgccccgcccctcccggacccccgtccccaccacacacaccagcgcccctcaccagtctttctcgaatttcctctcatgtctatcaataacctccttgtgcagaaatctacactgcacaagttaggagtctgcaagggcgggcggtgttacagtctcgctctttccattttccccttttactccacatagtttcaaaggtccacatggccctggttttgaccagttttccaacagtttcaacgttatgtatttcaacttcccgtctcagttcactggcgtctgcacccgttgccgagtgtgggtggctgagccctgggtgacagcactcgggaccacgcacccatacccttctttatgctcgttgtcagccagttgccaagagcgggagtgaagagcctgcaaggcccgggagagcgcggattccggagtagggaggcgagggggcagcgtgggagaccagagggaaaatgggctgaaaagccaacaaaaaaaacaacgtaaattgggctttgctctggctttacaaaggcagagattgtcgagccctctgactgtctttgtgccttctttatcccgtcctttgtgaaataagccgttttctgcccccactgcaggagcctaggctgtgggcgactcgctagcactgccctgggcctccaagctgcctgctcgctgagctcagcgctgacactcacaggagctgcgttcgccggatcctctgagaggctctgcaacgatcccgatccaattcagcagcgttttaaaaggtagccgagtgcagatgctttttcctgtctttttcattctttcattctctgtcttttaaaattttaacaataacctatcgtttccgcgtggagggtctaagaatcttcactgggtttaatttaggaatttcaaattgggtttctcaaaatttgaatgtggtccccttaattggtaatcaagattgcggagttttccaaaatattccttttcatcttatgtaattaaagatccacgagctttccaaagaagctctggattttccacggtacaaatctatatattttttctctctcttcctctctctctctctctgcctctctcgtgcgtgtatgtgcgcgcccctgtgcgtgcgttttctttcatttctggcattaggaaactcgtgcagggccactgaaaagtcaggggaggctcagatgttatttcccagggattcctgtttttccagaaacgttgtcaccaaataagtatgagactgttaatttggagaaacaattagcccctacaaaaaaaaaaaagaaagaaaaaagaaaaaaaaaagaaccggaggggagaaggctagggcggaagacaaggaagctgctgcttggattcgctggtggaggaaagtgcgacctggacctgcgcttaggggctcccgtccccttacttcagcaccagaggggatggacagcgtctccggactgagctgcagccacagggacggaactacgctgccgccgccgctgtccttgccgccactgtcgtcgccacgggcagctgggctacttgctcctcgcagctaaaaggcggtgcctcctattaccccctcgcctcccggcccccttccttaatggatgaaaagtacccctccctctacacctgctgtacctaaggacaggactctgaggagtactcttgctccacagattaaactctcagcagcaacttcaa

SEQ ID NO: 40443 - DNA, 2300 bp, Homo sapien
gatagtactaatgtatcagcaatggttcattaactgtaatcaatgtgacataatcatataagatgctaacagtagagaataatggaagtggagaactgtcagaagaaaaaattacaacaattgtagcaaaatgattggattggctttgattgtgatttatgaatcatggcagcatctcctttaaacatttagacaaggtgttctgatgagctgagccctggaggtgggatttatatgcagaaaggactgaagaaagaataaaagccaaaacatcgattattcattacaaagttactttccttttagggttaaagcagaggggacttatttaatgccagctaaaattggcctctttggctctttggctattattccctctcccaatgttttagaaaagtcaaataatcatcttgctttcagtttggtgatgtgaagctttagcaagagtaacttcattttgatatggtctagtagaacctgaggaactcaatccaaataagttatctcctatatattttatctaactgtatgtagaaattctttgtgcttatatatgaattacttttctgaacaaacaactgatattatcacctaatgttttgatgaaaaagaatagaagattagaattgaaaaaaggaagatgtgctaaaaatggtagaaagtatagatatagcacctgctcaaatgtgccatgttatgaaataattaaaattttaagatgtatgcattaaaattaaatacagcatatgaaacaaatatgaggttatatttagatggttcagtatcctcatgtctatttctctggttgctttttagtagcaagaaattgattccagacatctcttgtttttatataatcaatacatatcaaaattttccttcttttgtagtaaaagaataactttacatcacagttagagacaagaagatatttacaggttcttcaaataaaatgtttaagagcaattttgaaaaataattaagttagtaataaaaatttcattaatattaatgaggctcacaatccacaagatttatctaggggaaatatttaatagattatatgatgcatttggttactactgatgatggctaatctctttctttcaaagtcaatagtaataatctatcagttcagtgacagcatggtgatacctcctactctgttttgccacacttacctgataaagcattaattaatcttgtataattaaaaagaaatgccaaagaaagatataatagtttactcttccaaaggctgagatgagtaattttgaggagtacaaagtcttctattttggaattaatcattcatcttactttgacgtctcatttacttatccattatattttggctctgcattgctttgttttatagtgtctgggtgtcaactttccgtgacatatcttagtttggttaggtgtatcacgtaatgaaaacaaaacactccagaataattttacaaaaacatctatatgtatttaaatctacattcatcatttaggtattatagtgaccatagatgaatctattttagatattttatacattgatttttcttaatattattcactctgacaaatagcttgcttccttacatcatattgtgaataaaattttaagttccagagagaattattcatgcatgtagctttttaattaaaaagagagagattagtcaatcttttttcatgaggtaaccatatgaaaggcaacttttaattgctctttttgaagtttctttctcaattgcaaactcaggtttcacaatgcatgttgggaatgagcgagaagaggttgatctgatgatacatggagtctgaatgcctgctggcggggtggaaaggtgcctggaaatgcacactcaatcacactgaatgatggcaggatatttatacttcctaaaagctggggattaagacttttttcatctgttcattttcctctcttcagtataccctggagctcttgttccttacaagtggttgtaaacacagttttcccacaagttctgcttcacgatttcctccactatattagtgttctctcttacatgccatgctgtgcctaatggcttaccatttctgtgtcttttcagacgacatcctttgtggtgccacagcacatggatttcagaaccgcctgtgaggaggtgagtacagagctttctgcttttcaaacagggaaaacagaatataagcgggaaacacttggctccaatttatatagggaaattctgcttttggcagaaaatggagagaggaggatgggctctttttccttccagattacgttctcc

SEQ ID NO: 40444 - DNA, 2300 bp, Homo sapien
gctttcattcttctcgaatgtttgggaaatgcctttttaaatgcacagtatttgcaagcttcatggactctgctgttttgccttgtaaagaatcatgtgttttgtcatttgcagaaaacctcacacctccagtgacctgctggctcaatttcattacccgcgtgacccactgattgtggaaatggcaagagcaggggagatttttgagcacacgctgcagctgatacgggaacgtgtgaagcaggggctcactgtggacttggaaggcaaaggtcagccacaaagccattttattctcagcctactgcccacagaaaaactgaccaccaccttagcaaaggacactgaacttttaatctccagaatatcatgggatttagaaattaatttactcactacttttaccaaataaatgcagatgtttctcataggaactgtaattccaaagtaaggatgataaatatatattcaaacttgtctcaacttttaagttatatgtatagagaacaaatctagggaacctacattaagtgaacttgtgtttcaaatgtaaaagatattattgtgtcttatagagaaatgctttattaccagggggatattcttccacttatcctttcaatcacctgaatcattcagtgaatttacttgaaatttcttctaccacttataatatttataatacctccccagttcttttgatttttgtttttttgttgttgttgttttgttttttggtatatccaagttcttgtgtatttctttttaaaaccagacatctagttagtagatgtcaaatgagatgatatagaaagctttcagattttctaagttgttctctttcaaatgaaataagtgaatgtgattctttgctatatactatttgtgctgtgagtacagcatcaatttctattggcttaccctttctttattctcctttaggaaatcaaccgagacgtggtgcagaaggcctatctgtgagcttgcctcagcccttagagctctgtacaatttctctaactaactggcatttgactgtccctggtcacccagtatgatgggttttcaaagcttcctgaggcaaaatatccagatacccaagattaagatatctcaggatccagccagggactggctaacatggataaagtgcaaatggtcccattattgcttgccagtttctgaagattaaataaggatggtaacttttagtatgattagtgaacaatctttgtagcactgggagaatgctggaagtttaagccctgttaaaaggtagagctccaagcatgtcccttattattttgcccgtttgccagggaatgacagcttatagtagttcagaaagttgttgcttaatccctccttgtcaagtatcatgtgggttaatattcacatgatccatattgatatttctttgaccttgttctctagaagcacaaaacttgagagaaaaaattctgaaatgaaacaaacaaaaatcaacaaaacaattctgggatgtggaagaacaaatccttgccaacatcgttcttgtaaaggcacagagtagaagttaggagctggctggcacctgttctctttccattttgcttcttctagcagctagccattgtttacaggatgaacagcacaaaagtaatcccgggtcttctggaaacatcttttagtgtctggctggcatctgctctccttccattttgctccttctagcagctagccattgtttacaggatgaacgctcaaaagtaatcccgggatcttctggaaacatcttttagtgttatagaatgatccccccttttgttgtgagctaacgaaatgtttttggaagtaagaaaggcctcttttcactcagggcgggcggggtgggaggtggttcccgcagcatctggagttccaagttgcccgcgccctcccaggcccgccctcctcacggctttcgccgcttgcctttcagaattccggtacaatgacttggtgtccccgcgctccctcagcctcatcgccaatttatctggatgcacagctcgcaggcctctgccaaactgctccaaccggtgtttccatgcgaagtaccgcgcccacgacggcacgtgcaacaacctgcagcagcccacgtggggcgcggcgctgaccgccttcgcgcgcctgctgcagccagcctaccgggacggcatccgcgcgccccgcgggctcggccttcctgtgggctcccgccagcccctcccgccgccccggctggtcgccacagtgtgggcgcgcgcggcggccgtcacccccgaccacagctacacgcg

SEQ ID NO: 40445 - DNA, 2300 bp, Homo sapien
agcataacttactttgaaaatgcccaagtttgttcttcaataggaagcacatgttaaaaacagagaagttctctgatatcctttgggggctcttcaaggtttccaaggaaaaggcccagacactcacactgagaaataggtcagtggagggggtggaactgaacgtccctcttcccccctgttgctctttgcttgctcacaggtacttgtgactgactgggatcacagggagttaggggactcatgtccagcttcaagcagtgcagtttttaaaatggctagaggggagaataaaatttataggtctgaatatgttttgaagtgactatgtaagcaattgctgccaatttatatgtctgagtttctgattaagtttccttttctaagtcatgttttaagaggataggtggagattagtgaaaacttttgtcttatcatggtgctcagtagtgtccccagccagagggtgtccagcctgcagcatgttagaatcacctgggcactgcctgcccacattcacggtgaatcagaatctcaggaggagggtgctggcatcagtggtttttttcaaagttccccaagagactctaatgtgtggtcagggttaggaatcattatctctaccttaaaggtattacatgtcctagagatactatccgagtcttatctgggatttatgtttgcttttctgtctacaaaccttgcctaacaatcatcaccagtattttataagccccattatctaaagtctgcctttatctggcataaaagctgtgccaggcaccagccaataagcacgttaggtttgggctttaaatggatttttataaacattgagttcaggtacctaagaaatagaagtcgtgaaaatgtcatcttcttaacttacttttctgcacctcagagcacgtttgttgcaaaaatcactttctcagacattcattttttatgtaattgtgtgaaaactgttggggaccagacctcttcagttccatttagtgttgcagcaaatattcatgtttgccaagcataaacctttgaaaattgaatgaaatttgtgatatattacgaagaaagaagaatccaaaagcttaaagaataaatgcatttaaaaaaaaaaaaaactgaaagacttgggatattgaaaaaactcggtgccaccctgtcctgggcactgtcgtgcctgttccctggatggtgtcatgctcactctctgggccctccccattctcttttgcttttcccctccacgccttcattacctttttcatttcagcctaggctcaagtttttcttaccaagaaagcccattcttgagccaacattcccgtttagctactgttctttttcttccctttgtgtatataattaagcatacattacactgtaagtgatagagaactcaacctcaacttgcttaagaaaaaaacaaggcctcatagtctagatgcagacttagtacaaggtttttttctctccatttccagttcctgtgtccttggtgtcagctttattctcaagctctataactgtataaaaaggttgcttcggctctagcctcctcgttttatccccattcttgttcattaagatagaacttggtactcaaatatccaggaaaatttcaggtcccgagagggtgtagccctgagtggactgactgggatggtcaggtgcctgttgctggcccgatcaccatggccaggggtccacatgctctggttgcactgaacttaatcacttgttccatcccccaagtccagggctggggtcagctttacacagatcacagaagctggaaacgtggtaagaactgtagtcacagtaaaagagagcgaatgcagggaggggggcaagagcaaatctccactatacctgtcttgtgagattctataaggactaaggaatattcttttctttttaaggaaaataagagaggaaagatgggagaaaggagaaaaagaaagaagaaaagagaagtccataccagttcttctcaaactttatttttatttatttatttatttatttttttattgatcattcttgggtgtttctcgcagagggggatttggcagggtcataggacaatagtggagggaaggtcagcagataaacaagtgaacaaaggtctctggttttcctaggcagaggaccctgcggccttccgcagtgtttgtgtccctgggtacttaagattagggagtggtgatgactcttaacgagcatgctgccttcaagcatctgtttaacaaagcacatcttgcaccgcccttaatccatttaaccctgagtggaca

SEQ ID NO: 40446 - DNA, 2300 bp, Homo sapien
attttgaattgaatggaattcagaaggacctaaggagggtcagatcattcttcttaagccctagagcccactcaaagggaataattttttagtaaattgtggcatttacggtacagcaatttgccaaatatctttgtagtcagaattattcttatgaaatccttaggcaaatgccacactggatactgacagagactatctcctagtgtaatataaccattttttctttcaccttaggaagagattcactctgagtgccagatgtaaaagttgacttgtgctaaaggccatgttattaaaaaaaaaaaaagtattgaaatgctacaattggactcagcaagttgagatgccacagctaagacctgttgaaggaatagtgaattggcatctcctattgcactgcattctacaaagtatattcattgaggagaagggtgctgtaagcccttgtacttatatatttttgaggactgaaggtgctagagccaggcaactttttataagtgagtttgaatgaattaaatgtgaattcacagtatgtcctctactccaaaagttcttaaggcaattgtaggaaaggacaaagtggacacagacaaagacaatatgataggctgtgttaggggagctgccctcgtggtgccaggggcctgaggaccctggggatacttgagaccctaattggtatacttctctatggtcaggagttggagtacagccttgccagagttaactgtcataactcttgttactggccatgggtatttcatttcacactttctcctctactgatttattaattcaggaattgatacattaacttactagctatagttgaataaagcttaaattgtatattcagtattatgttttgaaatttttttagttttctcaaattgcacttacatttgcattctgatgctgagtttaatctgttaaagaagttcagtgtatgtgtgtgtgagtgtgtgtgtgtgtgtatgtgtataaaacatgttctagtgcttggaatattgaggttattaataaaatttgtggtttctgtcacaacaaggtttactaaacaaaacaatcagcacacaagcgcattaataaacatgagtgtggggtttgtttattttgcattttatgttcagtgtttcgagtaatatgttattctgtgtgttaacattgtaaatttatgtagtgcatttttgaattgtggtttttaagttcagaaatttaaaatcaactaatttttaaaattaatctatactatactgtactatactatactatactgtactataaagaagccagtgtggctcagtgattaagagcatggaggtcgggcacgtggcttacgcctgttatcccagcactttgtgcggcccgggcggatggatctcttgagctcaggagtttgagactagtttgggcaacatggtgaaaccctgtctctacaaaaaaataaaaaaattagctgagcgtggtggcatgcacctgtaatcctagctgcttgggaggctgaggtgggaggattacttgagcccaggaggggatgagccaagatcataccactgtactccagcctgggtgacagagtgagaccttatcttaaaaaaaaaaaaattaaaaaaaaaacatggtttctgactctaaagacctaagaccaagtcttgacagtgtcactttgcagagcagcactgtccagtatggtagccactagctacaagtagctattaaacacttaaaatacaggtaggttgactaatggaattttaaattgtatttaatttttattaatttagatctaggtagccatgtgtgactagtggccaccataatgggcttcacggtactaggtgacttacttgacttctttgtgttccagttttcccatctgtacagatgagatcatataagttaccttttgtggttactatatgaattaaataaaataatatagttaagaaggagtttaacactatgctggagcagaatatttccatgagaaatggtagttaattataatgacatacatttaataaacaagttattttgcttttgagcattaatttaaacctgtttatttttgttcttcccttccaggattaatttatttttggaaatcaagtgcaatattggaagccatttctactaattttatttcacttttaaatttatgatttgatttgaatactatcatgggaggagctgtgagtgctggggaagataatgatgacttaattgataatttaaaagaagctcagtatattcgtactgaaagagtggagcaagccttcagagcgattgatcgt

SEQ ID NO: 40447 - DNA, 2300 bp, Homo sapien
tagagatggggtgtgcctaccacaggaaaattacaggtgatagagtgctttacttgctgttcaactactcacccacaagactagcatttggtgttgtttattaagaaggtatttactagcagtcttatttaaaaaatgacctgtgtttaactttccagccgcagaagagaaaaaaggtctagaaccctgaaaaattcccatagcagaaggaagaaagtaaaggaaaatatgcttttaaaaaatggagagaaaacaggggaaacggctgtaagagttgtttaatgattttagctattttccttagattaccatttgtactttttttgtttgtttatggtaagatagttttcatgtgccaaaatttctgcttggactaacagaaaattcatcctgtaagattgttatatgatcccacaacggttaggagtgccctgggtccaggcagaaatccaaagatggagctaataatgtgacccgcagctctactccagaatgcagatgaatagagattttgaacagttcggagctcaatgtccactgaatatgcactcatactttaaacctaaataaagtgaagcctttgagttaaatggcagagcgcctcagcagcaattttgctcgttttcaagttcttatttcgtgatttgaagcttttgaccttgctagcatgttctttctgaacgcttttgcagatggttggttatggtggggagtagtaaccctagcataaagacgttctaattctaacttaccttaggtaacctataagggtagcttacgctcactctcatacttgaaaatcaaaaccgaacagaattcacacgatggaagcaaatcatgctacaacctactattagagactgaagggaaacgcacaaagattaatgaacaacaaagaacacttcaaaaagtacagtatttggaaaagacatgcctttatgtacactaaaactaatttaaaaaattaaatgcagtttgctaggagtcttacaagtattaacagcatgttcactgcttaggatccttagtagcaatattttcccggctcgcctgcccctatgcctcatttcctcttctttttttttttgagatggagtttcgctcttgccgcccaggccaggtgccatctcagcactgcaacctccgactcccgggttcaagcgattctcctacctcagcctcccgagttgctgggactacaggcgcacggcaccacacccggctaatttttgtatttttagtagagacggggtttcaccatgtaggccaggctggtctctaagtcctgacctcaggtgatccgcctgtctcggcctcccaaagtgctgggatgacaggcgtgagccactcacccggccctcttctcgactttctatccctcctcctcaacaccctttccttctggaaatgggctttggggtggttaaccaagcccagggaaacttgcgtggcccagcatcttccgtccgctgcaggaggagcacacgcccccggcccgggtcagcaagacgcgagaaagcggccacgccgggcgtccgggagctgaggctggagggcgcctggcaggcagggcggggcccaggcggcgggagtgcttatgaccggcgctggggggaacttctggacgtcaaggggccactataaagcggcacagtcttgagccttcgctcttcacctaagtcagtgagcgcccttcgcaaagcctctgtggaggtaaccattgggggttcgcctccaaatccaggaatgcacctcaaaaatgctcctacaccgtaagaccgtgtccttcaatgcaaaggggactgtgcggcgaggcaccgacaagccgtagccctgagaccactgaaagcctgcaccccagcgccggtgcgagaacgtggagatggcggtggggaggagaggtggaggccatgctctcgcgtgatctcccctaccgccatcgtcttctggcctgtcaaggcctcgcgttgtttgggcttgggggcggagcgagccctgaggggggcggggccagatgggggcgtctcccggccttgttgactttggcgtccgcggggagctgcccctgtgcccgtggttctctgcgcatgcccggaccccggcggctccggagtccgggaggctctggctgctccagtcgcgggtccgggccccgcctctccactcggcggtggcgtccgtgttgttattgtggtggtagcggcgtctggctgctgcggaccccgccgagtcctagcgcctggcctgcgcgccgctgcccgcgccacaggtaacgccgccgccagtgggggctcggggtc

SEQ ID NO: 40448 - DNA, 2300 bp, Homo sapien
gccaggacaggaggatcacttgagaccaggagttcaagaccagcctgggcaacaaagtgagaaccctgtctctacgaaaaataaaaataaataaataaataaataaataaaaacctgctcgctcttgccacaagtagctatcaattaacctaataatgcctcactggacactataacccatacccagtagcttaacaaggtatagccaatcactatttaatgtcatttctgtaaaccaatgtgaattcctgacaaatacttcgtatgagtccactccctatcccccttttctgcctttaaaaatctacttgtaactgctgctactcagagtgtatattcggggcaacttgaataatgctcttgggttgcagttctcaagcttggcccaaataaactatttctgttaattttgcctccgtttctcttttttttaggtcaacacagattctcggaattaaacacttccatgtcccagaggatcaaagtcacttgcaaaaatacctcaaaatgtgtttgtcaagaaattacactttctcttgattttgtggaccactttctaatttccaacccagacaaaagcctcctagtgaagctggtctttcctagcacatccccctacccccccagccactgtcccatccctggatggcctgtccacagagagcactgtctgtgtggccactgggggaggcagctgcatcccagagatgatggtgtccagggcatgacgaggaagctctttgtgtggcctggagacgtcccgggagctggctggcgcccaccttctctcacttccttaccaccttctttcttgtgttgctgctttctccttcccagctctaaactcccatggtgctggagcagccagagaagaagtgttactagacctgccactgctacctacagtgagccccattctgcacacagaggctgcggactcctttttcccaatcatagaccagaatgcttgtgaaagaagatgtggctgttctgcaggttggagctctaggatcggaagaactcatctgtatcacatatgatccagctgaaagtccctacaaactgggccctctgtgtctttagaagcagcttccaagggcaggaagacttccagagtgcaggactgagcgtgctgctaatcttgttctggtcgagagactgatgagagagacaagaattatggcgcgagaaaagcagcagcagcagcagcaagtctgcagaggggaatgccaaactcgctactgggtgtttttttttgttttgttttgttttgttttgttttgttttgttttgtttgatacagagtttcactctgtcacccaggctggagtagagtggtgccatctcagctcattgcaacctctgccccctgggttcaagcaattctcctgcctcagccttccgagtagctgggattataggcatgtgccaccatgcctggctaatttttgtatttttagtagagacagggttttgccatgttggccaggctggtctcaaactactgacctcaagtgatccgcccgcctggccccccaaagtactgggattacaggtgtgagccaccatgcctggcctgctgtgatttttcattgaacctaattaactcatttttagcccctatttttggtacaataatagaacttaggttgtaatcaactggtgggttctttccgcacactgcacagataagatcagtccacagagaccacagcgttgcagtaaagaaagagtttgatgtgaggccagccacgtgggaaaactggagttatcactcaaatcagtctccccaaaggcttggaggtcaggatttttgtggacaatttggtgggcagggagctagggaatgggtgttgctgatgggtagggggtgaaatcataggggtgtggaaaacagtcctgatgtgctgagttttcctctgggtggggccacaggaccagctgaatcatgaatccaggtggggccagtgtgaagaacgtatcaaaaaatcaatcttaggttctacaatagtgatgttatctataggagcaattggagaagtcacaaagcttgtgacccctggccacatgactcctgggcagtaagagattactatgtctacattttagcagagttcatgcctttcccacaactctaatcttgtagcccttcattaatcttacaaaggcggttttcagtccctgagcaaggaggggtttatttttgggagggactattatcatcctttatttcaggttaaactataaactagattcctgccaaagttggcttggtctacgtccaggaatgacaaggacag

SEQ ID NO: 40449 - DNA, 2300 bp, Homo sapien
ctttccactgtagaaggggcagtaactgaacttgattggaactgacacaaattctgggcatggatttgccttctctgccttcagagcctcagccaggaccatatctacctgaggtcatgcagagtgtctgctctaccaacaggaaatcctcatgcatctccctggaccaaggaacccacttaggaaaataaccatggaaatacaatcataagattcactgatactatcacacaccacagagcccagaaattgctagcctgatggagcaggaaaatggcctcatggaggcatagctgagaggctagcttggacgtgacacctaccaggatgagtgtcttcctgagaggcatcatgccaaataaaaaatcattacagaatgtgatgtcttcggcagtttaaatacaaggatccaagaacaaaaaaggtacagttaggaggagcttggtttaccataatttccagtgactacttaaaggatttgtacattcattactccaaatctaggtcctgtaggtctgaggatcttggttcccaaggggagaatgctttcactagggtacacagaaagagtcctattcaactttgagctcagactccttttctgtcacctgggttcttgttgctgagagataacaggcaaggaaaatagataccgtcctggcaggagtcactgaccctggtcactggaagttgtagggctgggggcttattacatattgggacaggatatatatagcacccaagtgatccactggggtatctctttactgtttctggcccaaacttgtcagcaaatcaacaggttagcaggcagagaatctgaaggtcatggtgaccaagggctcaaaggatctgagtcgtgcaaccaagtaaactgtctagatcagcagaggaacttggcaaggatgaagggaatgggtagaagtataggtagataatgaagttaatatacaaagcaagtataaaaggattcaagctggaaaggtgtagatgtctgtgtataccatggtatgcacctcctcctcccttcaggactaaggtacacatcttccctactggctgaaagtgtggggagctgatgggcgttagctgaattcacttctgaaaattgccctcaacctgagagccatttaacccaaagtcccatctccctgggacagcccatattcacacttgcctcaaggcaggaccgactctgaagaggaatctatcaccaaagctcttggcagagttggctaagccttccatagaacctgcactgcaattcaacttctctctgcccagtcccgcttccctcacatctgacaggtactgctccctggcaggctgtgctgcgtgatacacaatctgtacatggctaactggactgtatttttaggaaatcaggagacaggaccctggggaaaagttacagtcttgtgcattcatctgaaataggccttgtgattcctaagagagttaacgggccactgtaaatgacaaattcacttttacccagtgaggactgtgaagctattgctcattctgtaaggataatccctgaacttcatgagccaactctctcacctatgtcttagaaactttgtgaccacactcatgtttaccgagctacagtgtgtccaacagttaaacctataattgaagccttctcctattactcatgtcataaattcagcgactaataagttgttgctatttattgatggttggtttgctgtcatggaacactgattccattgacaaggttatctgataacgtcaggtttataaaaggggagaattttttttcccgtaaggccaaagctaataaatgcttttttttctcatttagttgggactaagttttataaataataaattaattgcatatcgtctaccacagaatttttttcataaaataaccaagccattaaaagatacaatttaataacaacgagaggagtaacaggaaatttcctctgaatcgtgaggtaatagtaggtaagtggggttccccagctgccacttcacactgggtgaatagaccttcctttgtgatgtaattccagtgacagcgtcacaatacactgcttctatgccagcaaggcatttggcattcaccttgattataaaccttatctctctacactataatcatcttcccagtaacctggaaacacctacaagagaacagaaactgtttcttgctcctttttatatctctggtgcataatatgaggtctgtgtgttaggagcatgctcagtgaaagaccactgaagttgagccccacccagatgtgagcatatgaagatgaatgttg

SEQ ID NO: 40450 - DNA, 2300 bp, Homo sapien
tgatccacaaagggaaactcacaagaaaaaatgctgatgaattttgcggtgtgccttgagcttctctagtaagcttgctaaggtgctctttgattaatcttcttttgatgaccaatcattaaaggttgcataagactcagcttgtgccttctatatgaggtataatgttatagatatataaggttctctgaaagacataagggcagagagagattgcctttggagaagtacataaagaaaaactaatgtagtattcagcatgttttaggaggcaatcaagaagttagagagaaaatatattgatctagatttctctagaaagacaggcatggcttaaaataaaacaatcaaataagaacaggcaggacagctagctggctaccatgggccaggtacttgactctagggaaacctcaaggaacataaattgtagggtctctgttttcttgcagcttctagtctagcagaagagtttatcatgtatagctcaagtaattgatacgttaaaaaaacacaacacaacagagccaaaatacaacataattttgttcctgttgttcttgtaaactttattcagtgggaccaatgtccatgacccctggatgaaaactctggcaggccccatggctcttctgctcgttctcagataattcaaaaagtcttctggtcaactggaatcacatacacagtttcatttcagcacttacagtgtctggttccatgcaataatcaaaaactgaccttagcctagctacaccccctccacatggcctgcctgcatgcctgcagtggggaggggaggctgaggaggcttgctgtctcccggctcctgctcccaggccagctcaccgcaactgctatggttgtagcagggcatgtgttgggtgcatgcaggaagaagaggtagaaacttccgccccttctaacctggctggctggtgtcctgttttccggtctggcagatggtttgggtcaactctctatgatggactcgctggcgcagtgaggctttggaagcccccggtagctcccttattcttgcagctccctcattcctggtgggtgcatctcccttccttcaggtcgtcagtggaccctaccttcctcagccctggctgtccagtggataacctccatccccttcttgccctggtctcctcccacctctaaggatccctttgcacatgttggacaggatttctcctgctgacccaggacatacaactggtcctgggaactcttgttcccctccgtcctccaaccccacctgcgctcagcaggtgcagtctgtgctgcatgtatccgtccatactctctggctctgcccccagagctgtttgccaactcctctgccatcttaggcagattctgggacagactctgctgcatggtctgcttgtgtctgtgtggctggctcccatctcccaactgcgggaacaagccttgaagctctcattccacaggccttgaggacgtgggacaggaggccaaggaggtcccttcacgacctcctctttctaatttaagctttttccatatccgtgatctggctgagggatccagagtcgttaaagaagtctttgggctgttttctctgcactccgtggcgcaggggaagggtaagtttcctactgggatctgagtaggacggacagagaaagagtctgtcctaaaatctggttactcctcaaatccagtgagccaggtacaatcaccataacacagagaaactgatttccaggtggtttaaataacctacccacccgcagcaacccagtgattagctcggcctcaaatccaggcccactgagaagattctgtatttgtcactgcaggggcatcatgcacgttcaggatgaaggggccttgaggggagagggctgcctcttgacagatactcggggcaagcaagcaaagaaactcggggtgagaaagtggaagatcccccgcccctccccctttcttgactcccaccggcctgcgcggtccacgcggcgtggacaacagacccttgtgggccactgtggaggccgtgccactcggcgccagccccacggccatcaccggaccgctggagatgtgactgggctcgggacatgagcccgcttgttcgctcactctcagtgaaaagagttttgaaatgagttctgaatagacagcattttctttgtgcggttggtaaataacacagagcaaagttagcaagttgcagcgcctctgcgttctgattctatggaacctttttgtagggagaagggcaggatgtttttaactgaatgtgacctcaggggaatactaga

SEQ ID NO: 40451 - DNA, 2300 bp, Homo sapien
tttatgataaaagcactgtgttgaggaactagatccctgaagttagatgctccacaaagatgaggattttgtttattttacccactgtggtggctccgctgtgtttccactgcctggtccacagtgtgcgttcacatcatttttgttgaatgaataaaggtgggtttcaaaggaccacttgcttcagaactacccagagtcccttaaaacgcagatttacaggatcctcctgggggactgcgtccccaggggtttgggaacctgcattttttttacagcctctccttcacatggtacacagtgtgagaaccactgaagttcaacctcttcaccttgctagagagaagactaagtgttttgctcagggccccatggctaatgacagctgaaagtagaccccaaactgtcaggcttgaaaacttcattgctttgtttatttcctctagctttcaacgtagaggaagagggaaataattcagcttccaggttttgctgtcttttgctccggatagatggttgattaaaaagtccatttgtcatggtttcagtatcacttattctccagcattatttcatactgcatttccccatcgtttttcggactagtccctatttttttattttccaattaaaattaatttttgaactgcctgtcaatgtctgtgaacttctaatgttttcttatttcacttcagtagagctgtgagaaagcgtttattccacctaagtagggccttcagacccttaacctgtttttctaggaagactcttgtgggtctcccttggtggaagccattctcttacactgctgtgtttgcttaggaaataccagattcctatgcgtgcttaacagtgaaacgattggaagaagcagtcttcacctgtgtaacaacttcctcaaaagagcttcatccaaaggcacgatttcacagggctcctgcaaagcttgctttgcttcccaatttcttaggcatgttggacatgccaagcctagataaactatttgaaggagttgaggtcattattcaggatctgtgacccacaagatttctttttgtagagtaatgtaacgttgggcaccgcctaaggagtaatggagcctcagttcccttagttattcctgcctttttcctttcacctgtttgcactttgcatatgaggagataattagtagtcaattgattagcgagcaatttcaacatttttcaatatacttaacataaagcaataaagcaggcggctgaaacaactaaaacaacaacagtttacagagcgcggtttgatcagagaggcgcactttaatcagaacgactggccttaatttcattttttaagttgttaacactaaaactctttataagagttccctaatttgaagaaaaatccagccggctgcttttttgggcgcactggtcaaccttggcgatttcacctggggaagcactgaaaccggccactccccccagggaggccaggggagctgggcgcgtgtccccggtgcccagccccagacctcttccgcccgccgctcccccacgcggaagagaacgcggtgctgcgcctaggagagcaggtcgggcctccagacctggggcaggggcggctggcgtgacggcgtggccagtgttcctgagcgagcaggggctcggcagcagagcgcaccccgcacctttgagcccaaggcgcggagatctccgctcatccaggccgcaccccggccctgcttttttccgtccggacctaggcgccgcgggttctactgaccccgccagccaggggaagccgtgacggaccccgaggctcggggggtggaggcggcgggagacagagcccagggagaaccgccggggcgacgcggcagttaccctactgggtcctcccggggacggcgaccagagagcgagcccggggtccggatccgaggcaggcgttgcgcagggagccctgagacccgctgagtccgaggctggtgcccgcccggcccagcgcggacttccgagggtcccgcgcgctgggacacgccctcatcctgggggacgaccccgtggccccaggcaccgcctcccgttcccgccccgcgccccgcagcgcttaggcttcggcacactgaggaccgagtcccagtgcagctccagccgacccccgggacgtagacaagggcaggcgcgcggtgaagactgcggccggccgcgtagccgcgctgtggtcccgctggccttctcttgggccgcgcaccctccggacctgcgtcgggatcctcccggagtctcccgctctctcctcccggcttgcgaacatgc

SEQ ID NO: 40452 - DNA, 2300 bp, Homo sapien
aataaaaaatgatggaaaatgaaggtaaagtaaaggaagacatgccttacatgtaattatttttttctagtagttactttttgcatgctgttgggaaatttctgactttttacttttttttttttttttttttttcttgagacggagtctcgctctctcgcccaggctggagtgcaatggtgtgatactggctcactgcaaccttcacctcccatgttccagcagttctcctgcctcagcctcctgagtagctgggattacaggagcccaccaccatgccctgctaatttttgtatttttagtagagatgtggtttcaccatgttggccaggctggtctcgaactcctgacctcatgatccacccgcctaggcctcccaaagtgcttggattataggtgtgatccaccacgcccggccctaagtttttactttactgattatgacacaaacttcttaaaatacttctggtattaatttaaaaaggaatgataaggctcttgttatttttgacatattaaaatatttggtagcagttatctactagttcattaaaaaatcagaagtctaattgcattgcattctgtttcagggttcccttactttgtgactttgaacctctacaccagcatgtacttgctctacataatttggtaaaagcagcacaaagtttggatgaaatgtcacagaccattacagatctactgagtgaacaaaaggcaaattcaattctttcaaacagttttcgtcattagtgtaaaatgtttgtgttcctgcagctctttaagcctttctttctgttttccaggcatctgtgagtcagacatccccacagtctgcttcttcaccaaggatggaaagtacagcaggaattacaactactacctcaccgagaactcctccaccactgactgttcaggatcccttatgtcctgcagtttgtcccttagaagaattatctccagatagtattgatgcacatacgtttgattttgaaactattccccatccaaacatagaacagactattcaccaagtttctttagacttggattcattagcagaaagtcctgaatcagattttatgtctgctgtgaatgagtttgtaatagaagaaaatttgtcgtctcctaatcctataagtgatccacaaagcccagaaatgatggtggaatcactttattcatcagttatcaatgcgatagacagtagacgaatgcaggatacaaatgtatgtggtaaggaggattttggagatcatacttctctgaatgtccagttggaaagatgtagagttgttgcccaagactctcacttcagtatacaaaccattaaggaagacctttgccactttagaacatttgtacaaaaagaacagtgtgacttctcaaattcattaaaatgtacagcagtagaaataagaaacattattgaaaaagtaaaatgttctctggaaataacactaaaagaaaaacatcaaaaagaactactgtctttaaaaaatgaatatgaaggtaaacttgacggactaataaaggaaactgaagagaatgaaaacaaaattaaaaaattgaagggagagttagtatgccttgaggaggttttacaaaataaagataatgaatttgctttggttaaacatgaaaaagaagctgtaatctgcctgcagaatgaaaaggatcagaagttgttagagatggaaaatataatgcactctcaaaattgtgaaattaaagaactgaagcagtcacgagaaatagtgttagaagacttaaaaaagctccatgttgaaaatgatgagaagttacagttattgagggcagaacttcagtccttggagcaaagtcatctaaaggaattagaggacacacttcaggttaggcacatacaagagtttgagaaggttatgacagaccacagagtttctttggaggaattaaaaaaggaaaaccaacaaataattaatcaaatacaagaatctcatgctgaaattatccaggaaaaagaaaaacagttacaggaattaaaactcaaggtttctgatttgtcagacacgagatgcaagttagaggttgaacttgcgttgaaggaagcagaaactgatgaaataaaaattttgctggaagaaagcagagcccagcagaaggagaccttgaaatctcttcttgaacaagagacagaaaatttgagaacagaaattagtaaactcaaccaaaagattcaggataataatgaaaattatcaggtgggcttagcagagctaagaactttaatgacaattgaaaaagatcagtgtatttcc

SEQ ID NO: 40453 - DNA, 2300 bp, Homo sapien
ctactacaaaggtaaggcggctgagatccctcccaaactttggagagttgacttatctgccaagtaccacattttttctttgacatcctattgggggaacccacccccaatatttcactgtaggttctattttccattagtgtcggccggctgagaaataaagagagacagtataaatagaggaattttacagctgggccgccgggggcgacatcacatatcggtaggacagtgatgcccgcataagcctcaaaaccagcaagtttttattaagggtttcaaaaggggagggggtgtaagaacagggagtaggtacaagatcacatgcttcaaaggacaaaaagcagaactaataagagtctaacaaagatcacatgcttctgagggaacaggacaaaagacaaaagcagaactactgataagggtctatgttcagccatgcatgtattaccttgataaacatcttaaacaacagaaaacagggtttgagagcagagagccagtctgaccacagatttactagggcggagtttttccccaccaccgtagtaagcctgagggtactgcaggagaccagggtgtatctcagtccttatctcaaccgcataagacaggcgttcccagagcagccatttgtagacctccccacaggaatgcattcctttcccagggtattaatattccttgctaggaaaagagtttagcaacatctctcctacttgcacatatgtttataggctctctacaagaagaaaaatatggctctttttgcctgaccctgcaggcagtcagaccttatggttgtcttcccttgttccctaaaaatcgctgttaattctgctctttttcaaggtgcactgattgcatattgttcaaacacacatgttttacaatcaatttgtacagttaacacaattatcacagtggtcctaagatgacgtacatcctcagtttacgaagataacaggattaagagattaaagacaggcataagaaattataaaagtattatttggcaactgataaatgtccatgaaatgttcacaatttatgttcctctgctgtggctccagctggtcgctctgtttggggtccctgacttcccacaacaacatcctcctaatatccctgtgatatggttgtgttatattaatcatctattgttgagtgagaaattacagtaaacttgattgtttgaagcaacataaatctattattttatagattctgggcatggcttcactgggcccttttgggtctctgcaagacttcagtcaaagtgttggccagggctgaggtcttctctgaggctcaactaggaaaggatctgcttatgggcttgtggtggttgtcaagattcagttccttgagaattgtcagactgagactgtagcttcttgctagctggccatcttcaattccttatcaggtgggcctctctatatggcagcttgcttcatcaaagctggcaagagagagtcagctggcaagatgggagttataatcttaagtaacgattacctacatgatatcccatcatttttgcaatatttttttggttagaaacagatcacaggccctgcctacacttgagggtggggatttcactggagtatgaatacagtaggtggatgtggtacagataattgctgctgtcttagaggctgtctgctgcaggtgccatttttattcctatttacaaaagaggaagccaaaacagttgtccaagatcatataattgcaagtaatggaccccaaaccaaacccaagctttctaactccactgcctggatacttctttaccataatattttaaggaatgaggaattgttgtggaaatggccgttttgaggaatttattggtgacttttgtttgatgccatggattgatgtgggttgaagtcatgtggttgttattatagtgaatgtgcaagtagaagggcctgagtagagattattcttagacggtagttttaaaaggaagaaaggaacaatagccatatgttgtttcgtactgaattgtttctctttataaccagaaatttttcttttccagttttctgagtttaaccagtaatgccattcagttgccaatctcaagcaaagcaaacataagccagttttaatctactttttaagaaaagtggtagtccttttcacagtgcctgacggtaagtcacagtttctacctgtatagcagagtttaatctattgcctttaaaataatgattctggaaatcttaattttaaaaccttatttgctttttccttctctaataattctctaaggcttatgtgga

SEQ ID NO: 40454 - DNA, 2300 bp, Homo sapien
aacttataaacagtatttcctctagatatttgcatatatataatagaattaatgttagtacattttcacttatccctaggaaagaattactgatgtttgttaagagtctgttaagaatatacaaactcttaacatttacactggaggtgtataaggtatgaaccagtcgtttctggtaatttattgcaacctgtgattaagagagaaggttaggactgaattaattcattttccaaagaaaaaagtcagacaacatttataatttaccagattatcactggcatagttcagaaatttttttttatttttcagacagggcaacaatctgttgtccaggctaggagtgcagtggtgccatgatggttcactgcagcctcgacctcctgggctcaactgattctcccacctcagccttctgagtaactgggaccacaggtgtgcatcaccacgcccagctaatttttgtattttttgtagagaaggggtttcactacgttgcccaggctggtctccaactcctgggctcaagcaatcctcctgcctcggcctcccataagtgctgggattccaggtgtgagccactgcaccgagctccagcaagatttttacattctaaattgggttatatttgtaataatgaatgtcactaataagaggaagtgcaagtaccaatacgttctttacaggcctcatactgcagtttttcttttctttctttttcttttcattcttggtcatactgccatttttcttagccaattttctggccaaactcctcctcaccacttattttctgtgtgctgatgactatgctttactactaaatttggctcttttgtcttgccagttcacaccttcccttaaggcataataaccatttactacttaattttcgcttttctcctctatcttgctggggtggtgtaataaaattccagcttaaccaataagtaaaatggcttgccagtgatgataaagaccacatttgtttgggatatgtagcagcacaaatttaaaagtaaataaataaaacaagcccatctcaatcctaacttacagatactggtcagtgtgactgaaaactgaaattgttcatgctaaccaacgtttttcagtttccacctaacattttgttcagtttggtgccctcttgtgcctcctatttttacaaacacaactcagaattcctgatgactttagagaaggcacctccaagttttcactcataccagatattcctggatataacaggaatttgagaactattatgtaattattctacgtgtaacatctgctcatcagattttaatattcaagcctcgtggcttcaagtcattgcctgtgactgatcatcttcacaaatgcaagagtcccctgaaactgtctcccaaccattagggtgctcatgctaacccctaacccactagacccactacaagattcagtatttgtaaagctgaaaacgtggttgtggcgtttacattttcattccgattggcctaggcttccctctcttctctcttgcatgttttcttgccttacctggtctgagaaatggtgccgccccacccttgcagagttaacagggggacgcttgccagctgcgtgcagtcccggcggtccggatatgcggggaggtggcggcaggaacgcctgggccaggcgctggtacgttatcctgttacagaccttggcctagtccgcaggttgcccctggagaggcgacggggacaccagaccctcgattggctccgctcctccgcgacaggctgaggggaacaagctctctttcgcctggggacgatccagtgtttggtgggtcgaccttagtcagggcctagctgtcgcaaagaaggtcaaattcaccttgggaaagtacgcaccgggacggcagctagcaccataacaggcggccccagcggagtctcccagggtcaggccaggacagccaacctgccggccggagagccggaggcggggccgcccccttcccggcaggctgccgacttccggacctgcgtagacgcctctctgcgcctccaggcgcgcccctcccccggcaggccgtttcccggcatgcgccgcggaggaagagacggagtcgacaataacaaaccaagccgcggcggtgtccgcggccctgccgagccctcggcgttgcctcagaatcccccagtcgcctgggcccctcggctctgacaggccgcggccttctgtcccccggccccagacccagagccgaggggcctgctcgcgtccttgtccgcccggacccctccctgcctcctagagttcggggc

SEQ ID NO: 40455 - DNA, 2300 bp, Homo sapien
ttattagatgactgtggcaatgaccagtgtggtgtcttcaagttgccttgattttactgactttttgcccttatttctctctggctccaaagtgcaagagaagtgatgctggcaattcagatatgccaaagagaagctgcaaatgcctcctttaagttaaaaggtaaaaattctggacttaataaggaaagaaaaaaaatcatatgcagaggttgccaagatctactaaaaacaaatctatccacgaaaatgtgaagaagaaaaaagaaatgcatgctagttttgctgttgcatcatttttggatggaagaacagaaacatgttcccattgaccgcaatgggtactatccatggtttcaggcatccactggggctcttggaacctatcccccataggtatgggggggctactgtatttctggccccacagtcttctactgccgactttaggtctctctggatctcaggcccccttctctaagatgcatcctagaggaccaaaaatacactttatttgggcttcgcctgcttttgtggaagggtagtttactagaggatataatctcgtgttttaatttgctctctctcctaaaggaaatgtggagaaaaaaaaaaagcagaaattggaaataaccaatatttagtttatttcattcgattcttaggggaactggtgaggagcctaagatgattttcccttcctagagaaagaatccaaagtccagggaaatagcgacaggggagttcaagactgcccctgctagtccttccttggctactctccgctgcgatcgcaggatagctctcattagcaggagaatcgggcaagtgtgtggataagtagagagtgtgttgaacaacttgtaacgttttatgaaatacgcattgtcatggttccctaaaaggctttgcggaagccgtttgtctttactaatcaagtctttacttacacaaaagtagaagtagaagtagttttagaaaacatactaacaatcttctatccccttgaagaccagagtagcagaaaacaggtgatttgcattataaaattgcactcactttttcctcctttcagatttcacattacattagcctatttgtgttacggtgtataaaaaatggaacaggcgcctccactacattgttctcctttaaaaatagatcacttacaccctaactttgttttccttaaattcgattcttaacaggagagctttctattatttcagatggagtgaggttgcacgactgggatggaagaaaggaatcccttaaatttgggggaatttctgttctctgttctaagaccattttacttggggtgtgggggtgggcgcggcggtcagggcagtggaacgcagtcgcggctgcgccatccctgcacttccaggcgcgcgggagggaccggcggggacgcgagctgcggactctggcgaactcgggggaggcagacagggggaggcggacacccagccggcaggcgtctcagcctccccgcagccggcgggcttttctcctgacagctccaggaaaggcagaccccttccccagccagccaggtaaggtaaagactgctgttgagcttgctgttactgagggcgcacagaccctggggagaccgaagcttgccactgcgggattctgtggggtaacctgggtctacggaagtttcctgaaagaggggagaagggtttgcatttttcctatggaggattcttctctctctagcatttcgtttgatgtattcaactggtagaagtgagatttcaacaggtagcagagagcgctcacgtggaggaggtttggggcgccgcggcgccacccccacccctcctcgggaccgcgcctatttctaaagttacacgtcgacgaactaacctatgctttaaattcctctttccagccccgtgagtccgcggcgacattgggccgtggggtggctgggaacggtcccctcctccggaaaaaccagagaacggcttggagagctgaaacgagcgtccgcgagcaggtccgtgcagaaccgggcttcaggaccgctgagctccgtagggcgtccttgggggacgccaggtcgccggctcctctgccctcgttgagatggacaacgcctcgttctcggagccctggcccgccaacgcatcgggcccggacccggcgctgagctgctccaacgcgtcgactctggcgccgctgccggcgccgctggcggtggctgtaccagttgtctacgcggtgatctgcgccgtgggtctggcgggcaactccgccgtgctgtacgtgttgctgcgggcgccccg

SEQ ID NO: 40456 - DNA, 2300 bp, Homo sapien
ttattcctaacattaaaaaaatttagatcccatgtgtcacactagcttcacatcctctttgagaagagattgtctctgtgttggtattgttgtatccccagagggtgccttttcttcagccacttggggatactctgcaatatctgctgagtgaagtgagctgaagccagctgcatcccggctcagcaagactccattggctgcactggggtcttaagctaatgaagttgctccctccagctctgcactcattgctgcacaacaatatctgttgttggagccacaagaaagggagttaattgcaatttactggtgggttatctagtctatctaacaaaaatgtcaaagccacccactacccaggatgctccttagcattgtagcattatccaataaaaatctccacattttcatctttaaaagtgctttccatgtacttagttataagcatagtgtttgcattgagtagaatggccaagtataaccacatgtgctttatatcagtgtgtaacagtatatagcattttagcagtttacttttcctttctattttatgagcttttatctgatattatgataaaattgcatactcctaagagcatgactccacagaagcagccatacttcctggatttagagactcgagtgggttcccctggcaacctgagccacctgagggcttctcaatgctctgttcattttgtcttccctttattttggccattaatttggtaaacaagaaaggtaagagtgctcaaatgaaataaaactactgaggcccttatgaggtctcagcaggtctgatgtgttactgaaggagatgtgatccttcaatgacagtttgcaatcagacttaaaagaactctaagacttgataataattttcaaaattatttgaaagggttgaagggatatggttgaacaaagggaagatttccttatgctcttcatattacactgctcaaaagagttgttcatctccaggcggcaagacgctggtggtcaaatcccactttggggtcatggcgtcttgaaagagacaggaacccccttctgccctccgctgatggagggaagggctgtatcagtcattagtgtgtccaggtgtggcatggacattagctgtgggatgcagtggggacctgtgtttgtcagcctgaggcagtgaatccactggggaaattgaggtgcctaaacccccagtctcccccaggcctgtctccagtaccctgtggagaaggggaacttccccactccctttcagaaccttcacctcaggggctgagcccttgctccctttgtgtcttgccggtccctttgcctgagaagagaatgtctctcactcagcaggatctgacagctacccttggactagcagagttttgcaaagaaatgatggtgacagtttatttacggacgctcagattcgcggccgtataatggaggcagccctactgtgagggagaagtgaggagaacgtgatggctgcagggattaatgtaaaacagagacactgtcacctccctggagcaccactgaggcccgggtaaggagagtgttttgcccttctcagatactatcagcaattcaggtaatacccgtaaggtgcagtttgtctgcagcctgtcatcccagttagagcagacggaatggaagagaacgcaaggaaatattctatttatgtgtcttttaagtcattattttatgaactggtcttattctaactggatcattttgttactttctttggatgggccattctaataagcgtagttcctgactgcgaactatgcagataagaagttctagacacaatatgaaaatccaggtgcatacttgcactaaataggcatgctcctcctttttactaaatctaaatggctcagtctcaggtcttggggaaggctgcatggccggggaccaggcggtgtgccgctcgggcagttagtgggccgggcgagcctgcggggctggaggggacgcggggctgggaggctggggagctgggggctgactccgggcgggcggggcggggcagggacctgccggcctggggcgggcgcaccagacgagctctccgcccgcaggcccccagcgcccagccgcgtcccggctgcgtcccgccggtcccgccccgccccgccccgcagagccgccgccagtagtgggagacgtgcgctgagaggcgggggctgcgctcggcggaacagcagccctcgggcggagagcggggccggggtccgagagcaggtgatgccaagagctgagcgggactcgtgagcgcgcggttcagcacctac

SEQ ID NO: 40457 - DNA, 2300 bp, Homo sapien
aaaattaacttcttccaaactacagttaatgttgatattttgatgtcatgaatcatgaatgttctagagtggcatctagaagaatgaatactttccagaatgttttcaatttccttttctagtccatcagaggaatcaccatctatggcagttatagtgttagggaatgtatttcttaaattacaagacttgaaagttggaattagtccttgaaccatgggcttcagaagcgatgttgtgtttgcaggtctgaaaatatccttgtacctctctgtcaggactcttgagtgaccaagtgcattgtcaatgagcagtaatattttgaagggactcttgttttttttttttaagtcatagtgaggaaggagaccaccagttctcctgctgctctccgccttgcctagtttataaaacaagagaaaaaggagaaagcaaaaagttaaaaagaaaaaaagtaagataaatagccagatgaccttggggccaccaccctgccctgatggttaaataataataataataataaaaataataataatatcaacccctgacctcaactatttgtgttatctgtaaattccagacattgtatgaggaagcattgtaaaactttctgttctgttagctgatgcatgtagcccccagtcacattccccatgcttgtgaccctttcacgtagaccccttaaagttgtgagcccttaaaaaggccaagaatttttttttggggagctcagctcttaagatgcaagtctgctgaagctcccggccgaataaagccgcttccttctttaacccggtgtctgaggagttttgtctgtagcacgtcctgctacatttcttggttccctgaccaggaagcaaggtgaggcagccccttaggcagcttttgcctgccctgtggagcatccctttgggtgaccctagctggcttgagtgacacagatcctgagaacactcccaggtaggcatttgccctggtggaatgtctcatcagagcagtgtgccgcaggcccccgtggaggatcaacacagtggctgaacactgggaaggaactgatgcttggagttggacatctggaatatggtaagactggtcttaggaacttgcctactccatttgagtggaagcgtggcctgatcacccacagtgtgcctttatttgcactttggttttggttttgattttgacttggcttgaattgcttgatgaacaggtatgcatttatcggcactttggttttggttttgattctgatttggtgtgaatttcttgatgagtgagtgaccttttaccctttgccctttttcccttcttgtggcaagagtggctcaccaccccaattatgaacataggaactgaaagtgtgtgaaagtgtgtgaatggaggggcctaattaggctcatcagctgagaagtggggagtcacagatctcttagtgtgaactgtgtgctccgtgaaagtgtggggctgactaagactagtggcaatctacataccgctaataggagctgccctacagctcagagttgtagtgggaataaggacctctccaaaggcaagcagcatctaaaaactcccataataggagatggtgtagtcggccaaaacgagagaaagagtgagtgtgcaagagtgaatgtgctgcgtcataaaaggaggaatagaagaaaagtcaccaaaacatcaaaacttactctattggagtgcatgttacagaaccttaagaaaggttttggaggggattatagagttaagttaaccccccagaggttgagaactctctgtgaattaaaattgccttcttttggtgttagatggctgactgaaggaactttaaacaaggaacaattggccatgtatttaaggtggtgacaagggttggaggacagccagtgtacccagatcaaattcctttatattgactcatggctaaatataatatagacaaaaccagcatagatccagccctgtttaatggcttattgcaaaaaagccaaaagtgaaagtaagagcagctttgccagcagacacagagttaaaaggggagtcccagagacagcaagagaagccagttgtacaggaactgccaaaggcaacagaaattctttctccctatgtcccagcctacccccactttaccgaggccaacagccgcctcagaaaccagattcaggagctaacatgccccaggtctcacgaggatcagagactccagaggccagggaaggagatcaaggtagtcaagcgggggtcgtctcagatctggttgtgctcgagctatgcaaatgcctctcacg

SEQ ID NO: 40458 - DNA, 2300 bp, Homo sapien
tgtataaatttacaatttttcccatatttatacctattctatttaatcatgatttctgatttcagtatattaggtgattgctttaaaaatcttactgcagtgttagtgccaataatgaaaaaaatttttctagaaaagcaaaagcctaaagaactcttttatggagcagtggacaatatttgaaatataatgatactttcagacttaggacatttaatatttgagttgaatgcctggggagattaaagtgatcacgatattcataatcataatattaatagttgtaaaaaaaagaaacacctcgtattctgtttttaccttgcatcaaaattgaagatttgttgaaagacattcaagattacgaagtttagatgaccaaaatggatatccgaggtgctgtggatgctgctgtccccaccaatattattgctgccaaggctgcagaagttcgtgcaaacaaagtcaactggcaatcctatcttcagtaagtaccaatttgctgtgaatcatggacagtcatatgcttttgcatcagactttttcatggtcatgcttctatgagagaaatacagggaaaatactgaaaaatgtggaagaaacacttcctcttcagaataattagctgtcttagggagttaagtgtagtggggtggaaacagcttggcgccctagtggggaagcagagcggcttatggtgcttttgaccttctctggctgcctggggaagtacttttggaataagtgggaaacataggaggaatgtccttgggctaacggagggaggaaggggatgaggggcaaaacctgctagactggtctgatatgccctggcaatcagcatgggggcaggtggcctttttagagtggtgcatacaactaataagaagcacagatatttgagttgagagacttggatttgagttttggttcttgctattagtttggtgatcttaagcaaatcacttaacttctctgaggctcaataaagtaaaatgtgaaatggggagacataccccacaggcttgttgctgaaataatgtatttattagcacagtagaatacaagcattagtatgttgaatacaatacattttagttcccccttctttcttgtatgtattaatatttaatgtgctgatgtttcagtattttgtatttatctataaagtgagcattcatgtattcttgaccatattttattgacttcatatttattttggtatatttataactgagttaccaaggaattcagttcagatttgcatatgcattttgaaaaacaaattgaggaatctagttttatattagtgttaattttatattagtattaatagtttgtgttgttgtaggagggatctataatgtacaaaaatgatcctttaatttctgttaatttaatcactcatcaaacatttattgattacctgccaagtttgaggcatttttccaggctttgaggctacaaaaattccatacagagtactgtccctgaaggaactaaaactctagtagggaagtcagatgtattaatagatcattttaattcactatttttttttttttttgagacagagtctcactctgttgcccaggctggagtacagtggggcagtcttggctcactgcatcctccgcctcccgggttcaagcagttctccttcctcagcctcccgagtagctgggattacaggcacctgacaccttgcccgcctaatttttttgtatttttagtagagacagggtttcaacatgttggccaggctggtctcgaactcctgacctcgtgatctgcccctcttggcctcccaaagtgctgggattacaggcgtgagccaccgtgcccggctctaattcagtatgttaactgtggcaatagaaagatgcacagggtctggcaggtgcacataaaaaagacaagtaattctaccccttggaaattttcctgaaggggctggtccctgaactgagtttttgaggatgatgggtatttagccatgtggcaagtaggagcagccttgggaatagaacagataatgtgagcaaaggcagggaagcaaaaacagcacactgggtgggagtcatacatgttttggaggcaggcaatgcagagagctgaggctagagaggcagccaggggccgatcgtgaagatgctgtgtgtgggtgtgtggttggaaggagtttggacttgatcctatcagtcagtgcttttcaagctgatttttaagctgtgaagcccatgattgatatgaagttagcatgtaaaacagatgaaaatgatagaatggaggtgggagtgtgt

SEQ ID NO: 40459 - DNA, 2300 bp, Homo sapien
gctctcatgaatgaaattaatgtccttatgaaagagaccccagagagctctctcacctctccaccatgtgaagctacaatgagaagacagcagtttgcaacctgggacaatccttcccagaacctcaccatgatagcaccccaattctgaactttcaacctccagaactgtgagaaaatgactttctgttgtttataagccacccagtctacagcactgttacaggagcctgaatggaccaagaaaaatctccgatagaagtgttacagaaataatgttaagagagataatgccgggagtacctgcctcttctcttctccctactccaggcaaattgtctggtaatgttgtgatgctcggagaacgccagcccaggtgcctgtgaagcagtcccctctgctcactgcactgttcctgattttgttccataactttgtgcctctaggaaaagaggagagcctcccgaaatctgatgagactcgctgtatcacgccagtctgtggcttaggtgatacagaaaggaaatgcgaagatcaggcctcactgccagctttgctcagttacacagaaaacatgctgtttcagcttttgggagtttcttagtacacgatcggtttctttttctcttttatgaaagtttttccccttagatttgctttcaaaacaacagactttcacttctggctaagacagaatgagtgacctagtacaatctttgacactgttattatatatctttattcataatcaatgcatgattttgattattctgactttaattttacgagtaaaaatgggttggttataaatccctttcaaagaattttttttttttctttttgagacggagttttgctttttctgcccaggctggagtacaatggtgcggtcttggctcactgcaacctctgcctcctgggttcaagtgattttcctacctcagcctcccaagcagctgggattacaggcatgcgccaccacacccagctaattttttgtatttttagtagagatggggtttcaccatgttggtcagctggtctcgaactccagacctcaggtgatccactggcctcggcctcccaaagtgctgggattacaggagtgagccaccgcgcccggcccctttcattgctttttaaggaaaacatgctatcatatatacttcacctccagggcagtacattcttactttaaggcaaagacagttgctgaggcctggactaggggaaaatttgggctccagatgggactgttggataaaataccagacgtcctgtaaatgtgaattttagataaacaacgaataactttttagtataaaagtaaatactgcaatggaatttattatttgctaaatgtgcaaccctaggttaagagagcttttcagacccacttctcagcccgagttttctatttaaaatcagaataagaacgcctgcttcatggagctgttaaatccaaatggaaattaatttgaaagcgcgaaatcaaacttttcaaaagaatgacggttacaataagagcgttttggcctctgctagctgcttccgggcggaggtcctcggcctcccctaggcgaggcactaggtctgggggcggcgggtcttagcgtgcccgccacgctcgccgcctcccacctgccctggctggctggggcccgacccttgcgtcgctccggggcccaagttacggactcgggaatccagttgtccgcaccgaacaagccccgccgcagcgcccgcccctcctcttgctgctttggagtctcccggcttccgccttccgcagcagtcacgtgcctccgatcacgtgaccggcgcctctgtcattctactgcggccgccctggcttccttctacctgtgcggccctcaacgtctccttggtgcgggacccgcttcactttcggctcccggagtctccctccactgctcagacctctggacctgacaggagacgcctacttggctctgacgcggcgccccagcccggctgtgtccccggcgccccggaccaccctccctgccggctttgggtgcgttgtggggtcccgaggattcgcgaggtaaggccgccctcgcgttgtttggtctcaggctgcagaccaggtcaggcgactcttgcagtttctccagcttgcctggtgcgtgctggtgtctcgccgcttggtcctctcctgttcttcggcccccggttgccagattgcttttcttccaggcctcaaccaggtttattaagcgaaattctggagcctttctcgcagggggaagaaacgtcaggggcgggcaggagagtgga

SEQ ID NO: 40460 - DNA, 2300 bp, Homo sapien
ttctgtgaaaatctactaccgctgctgatctgacaggaggcagagtttaggcggtaatggggcttgcccgccgctcacctcctgctgtgcagccgggttcctaacaggccatggaccacaccagtctgtggcccagggtatggggaccccaggtatgttatataattaggtaactgagatcaccgctatggtctgtgtctccccaaaattcctgtgttgaaatcctaactcccaaggtgatgatattaggaggtgggacctttgggaaatgatcaggtcatgagggtggagctctcatgaatgaaattaatgtccttatgaaagagaccccagagagctctctcacctctccaccatgtgaagctacaatgagaagacagcagtttgcaacctgggacaatccttcccagaacctcaccatgatagcaccccaattctgaactttcaacctccagaactgtgagaaaatgactttctgttgtttataagccacccagtctacagcactgttacaggagcctgaatggaccaagaaaaatctccgatagaagtgttacagaaataatgttaagagagataatgccgggagtacctgcctcttctcttctccctactccaggcaaattgtctggtaatgttgtgatgctcggagaacgccagcccaggtgcctgtgaagcagtcccctctgctcactgcactgttcctgattttgttccataactttgtgcctctaggaaaagaggagagcctcccgaaatctgatgagactcgctgtatcacgccagtctgtggcttaggtgatacagaaaggaaatgcgaagatcaggcctcactgccagctttgctcagttacacagaaaacatgctgtttcagcttttgggagtttcttagtacacgatcggtttctttttctcttttatgaaagtttttccccttagatttgctttcaaaacaacagactttcacttctggctaagacagaatgagtgacctagtacaatctttgacactgttattatatatctttattcataatcaatgcatgattttgattattctgactttaattttacgagtaaaaatgggttggttataaatccctttcaaagaattttttttttttctttttgagacggagttttgctttttctgcccaggctggagtacaatggtgcggtcttggctcactgcaacctctgcctcctgggttcaagtgattttcctacctcagcctcccaagcagctgggattacaggcatgcgccaccacacccagctaattttttgtatttttagtagagatggggtttcaccatgttggtcagctggtctcgaactccagacctcaggtgatccactggcctcggcctcccaaagtgctgggattacaggagtgagccaccgcgcccggcccctttcattgctttttaaggaaaacatgctatcatatatacttcacctccagggcagtacattcttactttaaggcaaagacagttgctgaggcctggactaggggaaaatttgggctccagatgggactgttggataaaataccagacgtcctgtaaatgtgaattttagataaacaacgaataactttttagtataaaagtaaatactgcaatggaatttattatttgctaaatgtgcaaccctaggttaagagagcttttcagacccacttctcagcccgagttttctatttaaaatcagaataagaacgcctgcttcatggagctgttaaatccaaatggaaattaatttgaaagcgcgaaatcaaacttttcaaaagaatgacggttacaataagagcgttttggcctctgctagctgcttccgggcggaggtcctcggcctcccctaggcgaggcactaggtctgggggcggcgggtcttagcgtgcccgccacgctcgccgcctcccacctgccctggctggctggggcccgacccttgcgtcgctccggggcccaagttacggactcgggaatccagttgtccgcaccgaacaagccccgccgcagcgcccgcccctcctcttgctgctttggagtctcccggcttccgccttccgcagcagtcacgtgcctccgatcacgtgaccggcgcctctgtcattctactgcggccgccctggcttccttctacctgtgcggccctcaacgtctccttggtgcgggacccgcttcactttcggctcccggagtctccctccactgctcagacctctggacctgacaggagacgcctacttggctctgacgcggcgccccagcccggctgtgtccccggcgcc

SEQ ID NO: 40461 - DNA, 2300 bp, Homo sapien
agtttaattagatcccatttgtcaatttttgcttctgttgcaattgcttttggcgattttgtcatgaaatctttgcctgtgcctatgtcctgaatggtattgcctagattttgttctagggtttttatagtttcgggttttatatttaagtctctaatccatcttgagttaatttgtgtataaggtgtaaggaaggggtccagtttcaatgttctgtatatggctagccagttttcccaacaccatttattaaatagggaatcctttcccagttgcttttttttttttttttttttttttttttcagatttgttgatgatcagatggttgtagatgtgtggtcttatttctgagttctcttttctgttccactgatctatgggtctgtttttgtaccagtaccatgctgttttggttattgtaaccttgtagtatagtttgcagtctggtagcatggtgcctccagctttgttctttttgcttaggatcatcttggctatacaagctcttttttggttccatatgaattttaaaatggttttttctaattctgtgaagaatgtcaatggtaattactgtagctttgttgtaagttttaaaattgggaagtgtgatccttcaactttgttctttatcaagactgttttggatattttgggtcccttataatttttttttttttttgagacagagttttgctctgtcacccaggctggagtgcagtgacatgatctcggctgactgcaacctctgcctcccgggttcaagtaattctcctgcctcagcctcctgagtagctgggactacaggtatatgccaccacacccagctaatttttttgtatttttatttttattattattttttgagatggagtctcgctctgttgcccaggctggagtgcagtggcacgatctcagctcactgcaagctccgcctcctgggttcacgccattctcctgcctcagcctccggagtagatggggctacaggcacccgccaccgcgcccggctaattttttgtatttttagtagagacaggatttcaccgtggtctcgatctcctgacctcgtgatccacccgcctcggcctcccaaagtgctgggattacagacgtgagcaccatgcccagccttttttagtagagacagggtttcaccatgttggtcaggctggtctcgaactcctgacctcacgattcacccacctcagcctcccaaagtgctgggattacaggcgtgagccactgcacccggccccttataattttatatgaattttagaatcaactatcaactcctgcaaaagaaaggagctgacatatgatagccattgtgttgaatctgtaaagcaattttacaaaaggaaacttttccagttcatagaccccagtaatacacatcccttacctttgtgcaccctcaaacccaacagaagctattgggcattagttgcctcttgacagaaaggtattctaccttttccactctgtttaataatcttatatttataaagcagtttataaatatgaagtatagtgttagaagccaattcttggcttactcattgggtacctagtcatctcataagaaaatcaatttaacttactccacatgatgtatgtaaaaagaataataattcttgagtttaagtttgggtatgagttttgcatatgttactagctacaaagatgactgctattaagatgaccttttaagaaacctggaaagattaagccaaccatctgcctgtcaattgcatagcccaagattgtcaagtactattggctatcacacaccactaacacaagaatttttgccaaacaatctatttaatttatcactatatgctaagctgtatatcacttggatcatttctttccattttgatttaggattacattttaattaagaatacatttctgcctttagagggcactcataacatacagtacctagacattcaaaataagcagctctaccaggaatagaacatgaaagatctgtggataagctgctgatccacaaagcaggtaatccttttgctttcattagtataacttttggagaagtctccccacagattcagagccagcccagcattaaccaaacaaagagaagcagagtggatcctgtgctaatattgggaaaaccaggcaacaggactcatttggggcctttattgtgaaaacatgccccagctttcccaagataaccaagagtgcctccagaaacatttctccaggccgtctatatggacacagtttctgcccctgttcagggctcagagatataataca

SEQ ID NO: 40462 - DNA, 2300 bp, Homo sapien
cctgggcacttagggagatgggaaagggcagggggaacaagggaagaccagagaagggaggggaagagcaacagttacaaaagtgaactaagattttcatccaaattctgaagaaccaggcgatgtgaacacagacccttctgcataccgcatgtcacattcagcgcgcatggtagtcccctgggaatgttaccatgcagattccgatgcattggctgggtggggctcaagagtctttatttctaacaagctcctaggtgttggcgaagctgctggcctacggaccacacttcaagtagcacggagttaggaaatacaggagtgggaggggaaagaatctaactataggcctttccttctgctttcaccgaccttctcttgcacccccaaagtaacgcttcaaaattctgtagtaaagagccccatctaagcggccggacaccacagtaaccgtatgctggttttgtttctctctccccaccccagtccttcccgcctgcacagctcccagactcgcccgccgccccgaagctgttcggcctcctttctagcccgctttccagcctcgcaaggttcttctctcaccttctccggcgaccccctcccgaggctccccggaggcgcctggacttctcccccctgcttcccgccctgccggccgcccggctctcgagggggcacgaggagctgccgggccgcctctcgctcctgctcggggcggcgctggcactgcccggccgaccctcggggggtcgtccgctgaggcccccccatccggtagccaagcccagggaagaagacgccaccgctgggcagagctcgcctatgccggtgagtaccgtggtctccactacgccccacacccagcctccccaggacaccagcctctcccgattcttcctaaccccaactgacccgctccgctggggctagcagtagggagggtggcaaggtcgggaaggccgggacgtggctgggcaagtcctaggacgggacattggcggctcccgggacaccgcccctccccgcgggaagacactccaagctactttttcctgggccatttcctttccatggtccaagaaaacgggagggagccctcgctcttccccgaggctgcctttcaaactctcagcgtgtcgctctcctccgcctactccgagcctcccccaaacgcgcctccgcctgctcccagcgctcgctctcccactcccctgccctctcggcaggcaagggaggaaatgacgtgatgttatttttgtgtcaggtcagtttccagcttcagcttagccctccgggctccagggaactaaccccgcggccccaccgggtcccactcccgaagggacgctgcgggctacggggacacgcggtgctgcgagtccggagagctgggcggctgggttccccctcccgctgccccctggtctactcctttccccggactccggagtccctggagaaggggacgcggagggcgactgccgagggtctcagcgggatctggagtcaggggttagttcccccccttatcccccgctcggttgctgggtggggcctccgcgctctggctagctgggagggggcgagggccgctttccagggcgggaagaccggaggcctaggctgcgccggggtggggcggggacagagctcagagaggcgccccgggccggggagaaggtagggggctgccctccagagacgcgcagtccacagacgcgaagctctggggaccaagcgccccctccatgcctgccgcccacccccgctccttcctcccgctcccttcattcacgaggtccgagcacgcagtccagcacactctagtctcgctcggccccgcgcgccgaggggaggcgatgacacagagggcttcgcggacgccctctacgcgcgcctggcttcgcatccacactcttgggacttgctaatgcggggctggagcagtggggctgcggccggggtggaggtcgcgccccgcgtggggcctcgggggtacccctagcacccgcggcggtggagtgcgccgccgctggagggaggcgagacgtgggattgcccggccgggtaaaaggagtgagggggcggggaggaggcagagcaaggggaggaagaggccgggagaagagggctagagcaaagaccgagagccggagaaaggcgaaaggcgcggtgagcaatcgccgacgtagagagggcagccctccgcgctgcaatattgagaaggcacccgcgggacgcatgcgcacggcggacggaggcgagccggccggggcttcctccccggccggcagggt

SEQ ID NO: 40463 - DNA, 2300 bp, Homo sapien
gcttgctatttcataccattatcatagaagaatcatcccaggataaaaaattctaataatggacaaaagacaaagtttgaggagccaatgctactgtccacgggggatcatagagaattttctatgggcaaaagtggaatttgtgaaaaaagaaatgtagagggaaaatttgcccagacattcctgtaagaagtagagaaagctagttagtcacttataaacacatcttttgtacatttttatccttaatttgcatgtacgttgacacattccataacccatctgctgtaattgatggagaggaacttcttcagcaaatattcatccaggcctaatgtctgttaagatttgtgcccagcacaagcagactgggctagggctgccctggcagactggaccagactagaggtggattcctgcagcactgggtaaggccctgctctcacttgtggtcaaacttggatgccctgtccataagagtttccttagttccagctaataatttaggggcaatggtaggaagcatcagtagaaatgttattcattaaagacagttcaaataaaaatgaatgttacttttaaggaacttatcttttactaagcatactttataatatccatatagtaaccacaatacatttgtcatacccaacaaaattaacagtaagcaattcacatcatctaatgtgtaaccatagtacattctttcttattagcctctttactaatcttcctcatcatccatcttctttttcatacgccaacttgaagaaattggacctgctgccccgtcgattgtcccacattgaattcatttgctgctttctcaagttgctaacttgttcctgtattccctaaatttctgcaaactagaggttagactcaaaggctcaaataaattcctgttgcatcacatcagagggacacaatgtctgcaaaattggctcgcttttagttatggaaaggacattatttctaaaagcttggtaggtcagtccaaattatacagagcggctgataggtccaaggcatgtggggcacacactgcaaaggcaacaggtgctactcttactacagctgccttctgcttgctgaaagagcttgagtgtccactccgggccatactttgggagctctgttcctcagcagggctggaatgcctccttgatggctgtggggctggatcccacccgctcgccttgcaccaccaggagctgctgctctgcctccccctggctataattccctgcctgacttgaggagtggtggtgatgatgatgatgatgatgaggttgtgtttcccttctgcactgttaatttggagaatgttccaggtgaggaaaatgcatcaccttcagaggataccagatgttacccagaccactgtcctggtattgagggtactcagagtgtacctagaagtaggtgtggccattagggagcacagaaggagtgttaccctttttcttttgggaggctgtgttccttccaccacatcagaaccaaagaagaaactggcctcctcctaatgctccattgccttcaccattacttccatataataaccttgtggcactttaacagaagtgtggatttgtggaggatttaaattcatatcaaatgtcaattcacattttttagggttatattgaagcatgcataacacatgatatcctgtgggctctagattacttagatttcaaaaccagagatagaaatgaaatatgtatgagattgaatacagtaagggcttatgtggcattaattgcacatatttattgttttctctattaaataaaagctgaactgtaattagttaagccagatgcatttctgtttttccagatgcactgtgggaacccacttttccacctggtgaatgttgaaaagactataaatacaataattctctaggccaaggagcactgcaggtgcttttaaccaaggaaagagtttgcatttctgatctttgtactgacgtatgcctatgaaagaaaacactgaaatgctatgtaacgtgactggcatgttcatttgcatttcacactgtagcatgatggtcagggaaactattttcatggcacattattgttcaaatacatattaaaatttctgctgttaggaactttatgttcccagctgtgatgtgttaacagcatttccttcagaagtcaggcagctggcccccacactaactacaatgctgtgcgatgctcctgtgtctgtcctcctggcaccacaatgcctgtgtgccatgtttgtcaccagcatgctacatgtgctatgtccactgccttttg

SEQ ID NO: 40464 - DNA, 2300 bp, Homo sapien
gaattgcctgaacctgggaggcaaaggttgcagtgagccgagatcacgccactgcactccagcctgggtgataggccgagactccgtctaaaaaaaaataaaaaataaaataaaatgaattaaaatctaaaaaaatagttaaaaatggtcttagacaaggtagcatgaaaaaagaagaaaagtagttaaatggataaattttgtgttatgtgtattttaaagaaaaacatcaactgattctttgggaaaaaagaaaaatgacagaattattacaataaatgtacaaatccacattataaagggaaatttttacatactcattaattgaggcatgaagcagacagcaaacagggatgtaaatattgcaacattttctgtagaaaacaatttttttctgtgtgttcttttttagaacacatagatatgcataaaaattgacgagataggccgggcgcagtggctcacgcctgtaatcccagcactttggaaggccgaggtgggcggatcacctgaggccaggagttcgagatcggcctggccaacatggtgaaactttgtctctactaaaaacacaaaaaattagccgggtgtgctggtgggcgcctgtagtcccagctactcaggagactgaggcaggaaaatcgcttgaacctgggaggtggaggttgcagtgagccagccgagatggcaccactgcactccagcctggtcaataagagcaaaactccgtgtcaaaaaaaaaaaaaaattgacaaaataaatctcaacaaatactacaatttaagctggaaatcaataataaaaagataatttaaaaatgaaacaaaatagggaaacgatcccaatacttctcccccaaatgagtgagtcataaccaggaaaaacctgtcatctcagtatagaaagaacattattaggcggtgtattttgatgaatgatagttacgtggtgtgggagttatacctgcaaatagcatgagttggtcgtgaagggtttaagtggggaaagactttttggaggagcctgcattctccactatgaaccctgtcacaacttaagtcaccttcctctctgatcctcagaagctggtgggatgccttgtgtaatttctgaccagaaggtttccgtcaactgttcttcaactattcaaaatgccatgcccaagactggttcttagtactccaggagctcacgaacgatttcacctttatttattttttattttttttgagacggagtttcgctcttgtcgcccaggctagaatgcaatggcagtctcggctcaccgcaacttccgcctcccgggttcaaacgattctcctgcctcagcctcccgagtggctgggatcacaggccatgacgcccggctaattttgtatttttagtagtgacgatgtttctccatgttggtcaggctggtctcgaactcctcacctcagttgatccgcccgcctcggcctcccaaagtgctgggattacaggcatgagccaccgcgcccggccgattttttttaaaaaaaggaacgcttagccgggtgcagtggctcaggtctgtaatcgcagcactttgggaggccgaggcgggcggatcactaggtcaagagatcaaaaccatcctggccaacatggtgaaaccctgtctctactaaaaatacaaaaaattagcagggcgtggtggcgggcgcctgtagtcccagctactcgggaaactaaagcaggagaatcgcttgaacccgggggggggagcttgcagtgagtggagatcgcgccactgtactccagccaggcgacagaacgaggctccgtctcaaaaaaaaaggaactcttaaaacgagtaactccgtaacctaacttagaggacacgggttccatttttccccgtagcagtctcctatggagaaagtgcttggcttcccacagactttaaaacctgccaaagttccatgctcggaatctgcccccgtttcgagatacttgggcctccgcgagttctaaaactccgggatgtcccgatgcaatagggggccgaaaacccgccccgtgagggggcgggaccggaggtgaacgcgcagcaaaaccgggcgccttccacgaccctctagccggaagccacgcctgcccactagcccgacgcccgcctggcgggaacatgggctcgcccctcaccagcgatctgcagtcagttggtagcgcctgcacgtcgcgcgcggtgttcgattgtcgctgcctggggaggaggagccggagccgccgccgccgccgccgccgccgcgggcttcgttcgtaaggaagggggccta

SEQ ID NO: 40465 - DNA, 2300 bp, Homo sapien
cactgagctaacaaaacagatactttagtgactacacatgacagagtttagatatgtcattaaacatataaactaaaaaactcacataactctaacaataagcggcaacaattctgattttaaaagttacattataatcttcaaaatgttcaattttcagcaaaaattatgaggcatacaaagaaacaaagcctggcccattcatagggagaaaaaaagaaatgaacagaaacactgtccttgaggaagctcagatattggacttactgagcaaagaccttattaagctgtcttaaatatacctcaaaaagctaaaggaaaccatggagaaaaaaattaaagcaggaggacaatatctcaacaactagagaacatcaatcaataaataaaaattataaaaaggaaccaaatacatatctagaactgaagataacaataattaaaattaaaaattcactagaattgcgcagcaggtttgagcaggcagaagaatcagcagacttcaagatagtacaattgaaattatccagtctgaggaatagaaaggaaaaagaaaataaaaatgaacatagcctaagaaacctgtgggtttcttagagtagcaacatacacataatggaattccagaaggagagaaaaaagaggaacaaaaggaatatttgaagaaataatggccaaaccccaaatttagctgggtgcaatagctcgtgtctataacgctagcaatgaaaggctgaggcaggaggatcacttgaggccaagagtttgagaccagcctgggcagtatattgagaccccatctgatatagtttggatgttttcctctccaaatcttatgttgaaatgtgatccccaatgttggttgtagggtctcatgggaggtgtttgagtcatgggggcagatccctcatgaataatggcttcgttccctcctcacagtaatgagtgaattctggctttattagttcatgcaagagctagttgtttaaagagcctggcacttcctccctgccctgcttgttccctctctcaccatgtgacatgccaactctccttctcccttctgccataaataaaagtttcctgaggccctcatgatgcttgcaccgtgcttttttttttttttttttttttttttttgcatttttttcttgagacaggctcttgctctattgctcaggctggagtgcagtgacatgatctcagctcactgcaacctctgcctcccagactcaagccatcttcccatctcagccttccaagtagctgggactacaggtgctcaccacaatgcctggctaattttgtgttttctgtagagatggggtttccccatgttgtttgggctggtcttgaactcctgagctcaagctatctgcctgcttcagcctcccaaagtgctgggattacaggtgtgagccaccatgcctacccaccgtgctgcttgtatagtctgcagaaccatgagccaaataactttttttttttttttttttgagacgtagtcttgctccgttgccagactggagtgcagtagtgtgatctcagctcactgcaacctccgactccctggttcaagtgattctcctgcctcagcctcccgagtagctggaattacaggcacctgccatcatgcccagctaattttggtatttttgtggagatggggtttcgccacgttggccaggctggccttcagctcctgaccttaggtgatcctcctacctcagcctcccaaagtgctgggattacaggcgtgagccaccatgcccggccgagacccagacttttgaaaaaaaatccctgactttgatgaacgacataaatctacacatcaaagaagctcaatgaactccaagtagaataaacttgaatatattcacactgtggggaaaagcgagagagatcagattgttactgtgtctgtgtagaaagaagtagacataggagactccattttgttatgtactaagaaaaattcttctgccttgagattctgttaatctataaccttacccccaaccccgtgctctctgaaacatgtgctgtgtcaactcagagttgaatggattaagggcggtgcaggatgtgctttgttaaacagatgcttgaaggcagcatgctccttaagagtcatcaccactccctaatctcaagtacccagggacacaaaaactgcggaaggccgcagggacctctgcctaggaaagccaggtattgtccaaggtttctccccatgtgatagtctgaaatatggcctcgtgggaagggaaagacctgaccgtcccccagcccgacac

SEQ ID NO: 40466 - DNA, 2300 bp, Homo sapien
atgatttcatcttctcatagtatagagtttactttgtacacgtttgaaaccaactactgtagaagatgaggaatctattgtaattttttgctttattttcatctgccagtggacttatttgaaattttcactttagtcaaattattttttgtattagtttttgatgcagacataaaaatagcaatcattttaaattgtcaaaatttccagattactggtaaaaattatttgaaaacaaacttatgggtaataaaggctagtcagaaccctataccataaagtgtagttaccatacagattaatatgtagcaaaaatgtatgcttgatatttctcaactgtgttaatttttctgctgtattccagctgaccaaaacaatattaagaatgcatctttataaatgggtgctaattgataatggaaataatttagtaatggactatacaggatgttaataatgaagccatatgtttatgtctggatttaaaaattttaaacaatcatttactatgtcatttttctttaccttgaagaacataaactgttatttcacttctacaaatcagcaagatattatttatggcaagaaatattccattgaaatattgtgctgtaacatgggaaagtgtaaatgtttttcatggtttctatcaatgtgaaataaaatttaattctgacttttctgtgactttgagtattttaatatttggaatgttaacatttggaatgaatgtctataatgcaatggaggaaaataacaatgtacttaaaagaatatatattcagagagagaaattttgatgatggtgtggttgacttagaatggaaccaggcataagaaataatctcatgttattcagttttaattggctaaaaaaaaatttcccaaatttggttttcaatgtttctacctatttaagaagttttatttggtgtttatcttttgtctttttcttaactctttttaaattttattttattttattttatttttgagacagagtcccattctgtcacccaggctggggtgcagtggtgcgatctcggctcactgcaacctctgcctcccaggttcaagtgattctcctgcctcagcctcctaagtagctgggattacaggagcccaccaccatgcccagctaatttttgtatttttagtagagacagggttttgccacgttggccaagctggtctccaactcctgacctcaggtgatccactcgcttcagcctcccaaagtgctgggattataggcgtgagccactgtgcccggtctttttctttaatgtagtattcactgggttttttaaattagtgtcataagtcagttatccaagtagtttttctcctttatttcaacattgacttctgacttttccgaatataggaattccttctgtcctgttaagcagtccttcgctttctgcttttggatacttaagtgaccacctcacttttttgtgatgcagcttgttcaatttttggatagttctcgtggtaagaaaattctggaccaaatatgttgtctctaacttcagttcgttttataaaatgtttatctttcacatcagcactgtatttcatatgataatctttagttcatgatccttttaaaaataattttgttaactactaaatgtggtcagagcttggtactgactgttatgatctaattaccaatgggtaacaatagttgtatctatatgtaaatagttgggtaatttgcctactgttgcagccactcttactgctgcattttgaaagtataaatagttttaaatcctcttaacaagtaccattttattttgtagaaattcctaaaaaatgaaaatgtaattatttaatatatgctgggcactatactaagcattttatatcctttaagcatatagtcctctgatcaaccatcttgattttacagaagaggaaactctagagaaggaaactatttacttaggattccagagctattaatgtgcaagagccaggattcaaattcatgtgcctaacttcatggtctttataaccttgctctgtgccccagtggggtaatttaaatgctttgaaacacacaaatgatgtgtatttcatataatacaggacacatggaaatgctgagtagaactatgatacaaatcagctcaccataaagtacaatctccagtggccagagagaactaaaaggaaactaaaaacccgcatgacacagttaactttggggcttaagatgagataaggtatgtaagtaattcacccttattttttttattttaaaatgtttttgtagagatggggtcttg

SEQ ID NO: 40467 - DNA, 2300 bp, Homo sapien
cactccagcctgggtgacagagggagactgtgtctcaaaaaaaaaaaaaaaaaaaaaggaagaaaaaagttgttaatgttagtgcggtaataataacacgtgccactgattgagcacataactgtttacaagctaggtgtttcttacagggcacctcatttgacaccgctgtgaagtattagctctgctttacaaaacctcgaaagcctggtctctggttaggagtccatctcctttatgattatggtaattctagttgttcggagggagaaacagaatactaacttactgggacgtgtctatttttaacaaatgcacaggaggccgggcacggtggctcacacctgtaatcccagcactttgggaggctgaggcaggcggatcgcctgaggtcgagagttcgagatcaggctgaccaacatggagaaaccccgtctctattataaatacaaaattagccgggcatggtagcgcctgcccgtaatcccagctacttgggaggctgagccaggagaattgtttgaacctgggaggcagaggctacagtgagctgagatcccactgttgcactccagcctgggcaacaagagtgaaactccgtctcaggaaaaaaagaaagaaagaaatgcacaggtgcacaggaatgtgcttttcttttacatatgtgtactgaaatattgacaagtataataatgtgaggactgggattgccttcaggaaaatctggttggtgactcttgagtgtgggtgggtgtaggtgggtgtgggcagcaatggcaaggcaggctggctgtgaattgttttgctttttggtaattttttatttacatagttacttagagactgtcgcccaggttagagtacagttggtgatcatatctcactgcagcctcaaattcctggtctccagcaactctcccgcctcagcttctgagtagctgggactacaggcatgtgccaccatgcctggctaatttttaaactgttttgtagagatgaattctcattatgttgtccaggctggtgggaaactcttgccctcaggtgatcctccccaaaagtactgggattacaggcatgagccactgagcgcagcccttttgttttaaaagaactctttaaggtctttaaaacagggaaaatggccgggcgcggtggctcacgcctgtaatcccagcactttgggaggccgaggcgggtggatcatgaggtcaggagatcgagaccatcctggctaacaaggtgaaaccccgtctctactaaaaatacaaaaaattagccgggcgcggtggcgggcgcctgtagtcccagctactcgggaggctgaggcaggagaatggcgtgaacccgggaagcggagcttgcagtgagccgagattgcgccactgcagtccgcagtccggcctgggcaacagagcgagactccgtctcaaaaaaaaaaaaaaaacagggaaaatacattcaaaagatgtgagatatttgggaatgtcaaaccaacaacactgacttatgggatcattaaaaagtagattagagttagaatcctagagttgggattttgtctgaaaataatagatgacaaaagtatgagggtaagtgttagatgctatggaaaacagggagggcctgggccctgtgaagaagatacgtgggcctcatgaggtccagaatgaaagattctgtcctaacaatagagttggcctatgaaatacttgttacttctttcctctctgaaaattcctctcagagaaaattagaatcagactcagccaggaaagaaaaaacaaaagagaatgtgctactgaacaaagaagacagtgctcaggttacatagttgggggtacatagtgcccttacccttaggtgaaaggtgattgaggccaagggatgttgctcatacctgtaatcctagcactttgagaggctgaggcaggaggatcacttgagcccaggggttcaaaaccagcctgggcaagagtcgctacaaaaaaaaaaacaaaattagctgggcgtggtggcgcatgtctgtggccccctcagctgcttgagagtctgaggtgggaggattgcttgagcctgagaggtcagcaacagagtgagaccctgttttgagagagagagagagagagacagagacagagacacagagagagagtgtgagcgagcaaaagagatttattctggtttttttttgtttgtttttgagatggagtcttgctctcttgctcaggctggagtgcagtggcgcaatctcagctcactgcaacctccacctcctgggttcaagttattctcctgtc

SEQ ID NO: 40468 - DNA, 2300 bp, Homo sapien
ctgctagcgcgttgttatctctcaatgagagtgcagtagtgaggatgaccagagttcactctcattgccatcttagttttggtgggttttggccggcttctttactgcatcctgttttatcagcaagatctttataagctatattttgcgctgacgttctatctcatcctgtgacttagaatgccttaaccgtctgggaatgcagcccaataggtttcagccttactttactcagcccctatttaagatggagttgctctggttcacacgcctctgacactggttaccgtgtgaaagaaatggagtgttgttttttttacagctttcttccgaaccttactctctaaggatggtatccagtatgtccttttttttttcagatggagtcctgctctgttgcccaggctggagtgcagtggtactatcttggctcactgcaagctccgcctcctgggttcatgccattctcctgccttagcctcccgagtagctgggactacaggcaaccaccaccacacccagctaatttttttttttttttgtattgttagtagagacgggttttcaccgtgtgagccaggatggtctcaatctcctgacctcgtgatccgcccacctcggcctcccaaagtgctgggattacaggtttgagccactgcgcccggcctccagtatgtccttcactgaattgtaaacttctgaaggtcagggcattttggctttaagtgtttctatcttgtgctctcttccagatcttaccatgtagttgatatgcaacacatttgttgagtaactacattttaggccataaaggcacctgtgcagaaaagggcagtctagtctcatgcttatgtgtccagagttggttccttccggtgggttcatggtctcgctgacttcaagaataaagcttgtcaccttcgtggtgagtgttacagtttttttttttttttttttttttttttgagacaaggtctctctctgtctcccaggctggagtgcagtgacgcgatctcaggtcactacaagctctgcctctcaggttcacgccattcccctgcctcagcctcccaagtagcttggactacacgaccggccaattttttttttttgtatttttagtagagacgaggtctcaccgtgttaaggcaggatggtctcgatcacctgacctcctgatccacccgcctcggcctcccaaagtgctgggagtgttacagctcttaaaggtcccacagacccaaagagtgagcagcagcagcaagatttattgtgaagagtgaaagaacaaactttccacagtgtggaaggggacccagggctgccactgccagctaggggatggggggcgtggccagcttttatttccttatttgtcccggcccaagtcctgcggattggtccactttacagaacactgattagcccgttttacagggtactgattggtgcattttacaaacctctagctagccacaaagtgctgattggtgcattttacaatcctagctacagagtgctgttggtacattttacaatcctcttgtaagacagaaaagttctccaagtccccaaccgacccagaagaccagctggctttacctctcacttaaacctgtactgtgtcaatatccgtacatcagtaagtgttgtcgatcaagttagggaagtagtggatttctggtgacaaatgttaccctttccaactaaagtttaaagaaggtaagttgaacccaaatctacatactgctgtagccccaaacggaaatactgcaaaagctccatcaacgtctcccagtccatccagacttttacaaatggatagaccccggccgcaggaaaccaaggagcacctggggttgggttgggtgaattggctctggggctcattcttttcactacagcgccagaaaagcaaaaacctaaaccaagacccaagagaccagccctcagcctgcacctgagagcacattttccctagccagcactgagcatgcgcaggctgcgtggtgtggcgaaagcgcagccaggtccgcgctgccgccgcagccaatcggagggagggagccgcccggacattgtgaggtgccgagggaggggcggcgggcgaggggcagggcagggcggaccctggacgcgcgggcgcgcgcggaaggtagcgcggggccgcgttggcgcgcacgcgcctgagcgtgcgcccggtggggccggccgggactcgccgctcgcacgcccttgggccgcggccgggcgcccgctcttccttccgcttgcgctgtgagctgaggcggtgtatgtgc

SEQ ID NO: 40469 - DNA, 2300 bp, Homo sapien
ttttggggattgaaaataattgtgcacttttctgtagattagggtacagtttgcaattatattttgcaattttcttcccaaaggtaggaaagtttaataaaaacacaatgaaaactactgaattaaaaatcactaaaggcaggctggactcagtggctcacacctgtaatcccagcactttgggaggccaaggcaggtggatcatttgaggttaggagtttcagacaagcctggccaacgtggtgaaacccagtctctactaaaaaaccaaccaaacaaacaaactaaaaaagctgtacgttgtggtgcatgcctgtaatctcagctactggggaggctgaggcaggagaatcgcttgaacctgggtgaggagcctgcagtgagccgagatggcgctactgcactccagcctgggcgacagagtgagattccatttcaaacaaacaaaccaaaaatcattaaaggcagaaaataggttctattgccccccacaccccattctatttcttctgtgcttctaaatagagtctagactttaccatcatatcattttatcgaactcacatattttgtttttgctaattagtctacaagaggcctacttttatctttaacttttaaaaaacattcacgggccaggcgccgtggctcacgcctgtaatcccagcactttgggaggccgaggcagggggatcacctgaggccaggagttggagaccagcctggccaacatggcgaaaacccgtctctactaaacatacaaaaaaaaattagcggggcgtgctggtgaacgcctgtaatcccagctactcaggaggcggaggcggaagaattgcttgaaccagagaggcagaggttgcagtgagctgagattgaaccattgcactctagcctaagcaacagagcgagactctgtctcaaaataataataataataattcacttttggaaactgttccctactagatttcaaacaacttgggaatgaaatcctatttgagttcatccatgtgtatttccaacaagttcagtgtcttacttataaatagtacttgaaggaatgaatacaactttttctttatgtagttattttacacttgatttaaaggaactttaaaaagacgcagttatacctagagacagacgccctccaaaaattgtctcaccttcattatttgtgattactagttagagctagcagaaaaaactccccagcaagtgaaatgtcaaaccactactaaaagaaagaaaaagaaaggaacagtcttttctatatttaagtcacttgagagaaaaaagaagagctggtatttttcgagtaataatgttcgtattttgtgatgcagatactcaattttacattctaaaaatactacttttatagtaggaagcagtgtacgtttgaatcctggctctgccgcttgttgcaagaagttggtcaagctatcggaccttgctaagccttccctgttgtaactgtaaaatgtagtaacaccatttacctctagaatggctgtaaatcgagtaaggcttatttaatacagcgtctggcatacaccaggcattcagtatggcgccagtcattaacaataggtggttactaactgcgattcactcaaaacaatacagatgcacacggatgagagttcacactttgagtcttattcaaagattggttattagccaggcattttgataggtgcactcagttttattttcgtacctcacggtgtataattacgcaagctcaaaagctaataattgacagctcactttgctttactctgggttctgcattgacctcagagaagacacggcctagacaaacaggcaaggcccaacactgactcaaaaaagatcctttatttaacgcagtgtttttagtgcatgctctcgtttggcgaaagagaaggttttacgttcagaatattaaaagggaccccgaggacaaagcaggatctcggaaaataagatcacatccccaaacaactaaaaggacaaccgagacaaggttgcagactcccacgcctctgcccgactcccgggcttgcgcgcgcggctgcagcgcgacaggggcggggccacggccacaaagcagcccccgagaccacgtggcctccgagcagctcagggcgcccttgaaagttcttggatctgcgggttatggccggtcccttgcagggcggtggggcccgggccctggacctactccggggcctgccgcgtgtgagcctggccaacttaaagccgaatcccggctccaagaaaccggtaaatgggtggtggcggtgcggggaagc

SEQ ID NO: 40470 - DNA, 2300 bp, Homo sapien
aacagactagacagataaaaatgaattctggaccagatattgttttttaattttcaatgtttattctaggaaaactccttagctcataaaagatttagtgttaagagaaaattctgctttgagagctttgaaaaatatttattattatccagaaaagttagaaaagatctcaaaaaaaaaaaaaaaaaaaacagcaaaaaacaaggtactacggggttaatttgtagattgctctctctcctcctatagttttgttgcttatttaatcatttgcaatgtgcttttgctttatactgaagcccatttttttttcagaaaaaataaagctttaaaagtacatcatcatttaaatttgtctaaaatcaaccgctttcaaaactaccaactagaagtaacacctctctatgatttctttatgcagatttaattttttttcttgtttgaatcttagagacccaggaactagaaacactttcttaacttgtcccctagccaaggcttcacagatacttgcagaattaaagataagttggcttaaaacaattgtgtaagagttcttttgagaaaaagcaatgccagagaaactgaaggccaggagtttgcaaaagttttgtatttttatggatgccactaataagcaagactggacagacggtcttgttgttgtagtatcacactcaaagcagcagcattttacttctcagattccaggtgtaagctctacttttttatcacgccttcataataaagaaaatctgttctggagattcgtatattgatttctttgcaaagttatctctaattatgcaggaatggctgttagttgccctcaaaaaccaacacaaatacacaaacacaacagcctggcttagtgattattaagagctgcaagtctgaaggcggactgctgggtgtgaattccaccttctcaacgctgtagtctccagcaagttccttaacttctctgcctccgtttcctttcctgtaagatagagtctacctcagggttaatatgaggatatgcttctttgctaatgctggagggcgctaggaatagcagtggcaggctgtgtcatttctcagtgttgtataacggcttgttttaaaagtcccactgaaaactttttttttttccagatcgaaacacaagtttaatagtcattcagatttcattccagtctaaagaaacttatagaaatctaattatctgccagaataaccgctttaaactgactgtaagaaccacagttactttgcagctaaaacagattgttctcttcccccaaacaaactcggacatttagacaaatattgctgctgtctttacattttagaaatcagtattaaggctcacctgttactgaacacatacgagaaacagttttgttatgcgtatcttatatacatcatgtatacattttcgtactttcacatgatgtgtataataagatacacataaaaactggttggcttgtcatgagtaaatgctttattctttagagtgaaggaatattggatacagaacgtcgttccatatttaatcttgctttagaaaattaggatttatcttggacacagcattttgaatataacacaggcaagttgagtcctgggggaaaaattgtatttttaaatttattatcaacggtgtctttcgcatttgagaaaacacatttgaagatgcccatgcagttccttggaagtaaactaggtcacccaccactgaaacaccctcggcttctgcaaaaagatgtgctttaaagagaatagaatggacgctcggtatgttcatctaaacgaccttgggcaagtacgtcgattccaaggtacaatcagccctcccagacggcttttcgagtctccctaaccccggtgggagaggacgcggcgccagagcccagctccggctagttttcccgggggcaggtgtagccttgggcgcggggccgggggaggggcaaggggcgggcgtggggttggactgggacgtgggactcggaccacggcctgggcgtgggcctaacgacgcgggaccggcccgccctcgccgctccattggccacatctgtgcagaaaaggccccgcggcccaggggcgcccgcagtgtcactaggccggctgggggccctgggtacgctgtagaccagaccgcgacaggccagaacacgggcggcggcttcgggccgggagacccgcgcagccctcggggcatctcagtgcctcactccccaccccctcccccgggtcgggggaggcggcgcgtccggcggagggttgaggggagcggggcaggcctggag

SEQ ID NO: 40471 - DNA, 2300 bp, Homo sapien
gaacctggagaacattacattaagcgaaataaaccagacacagagggaagaatactgcatgattccacttatgtgagggcttctaaagtagtcaaactcatagaagctgagagcagaatggtgattgccaggtgatgagaggaggggaaatggggagatgttgttcaaagtgtatcaagtttcaattatgcaacatgagtatgttctagagatctgctgtgtgacacagtggctatagttaacaatatggaattttgtactctaaaatttattaagaaggtagatctcatgttaagtgttcttaccatgaaaacaaacaaaacagcaaagacacacaggagactttgggaggtgttgggtatgtctattaccttgattgtggcaatagtttatgggtgtatgcatatgacatcatcaaattataaatatttacggttccttatacagcagatcctctaataatgttgtttcgttataatgttgatgaggaaaaaataatgtattctcagccagggccactgtctgtgtggaatctgcatgttccccccgtatctgtgggggttttctctgggtcctccggtttcctctcacaacccaaagctgtgcacattaggtgaacttgcatgtctacatggtcccagtgcatgagtgtgggtgtgtgagtgtgccctgccataggatggtatcctgtgcaagcgtgggtcctgccttgtgccctgagctgctggatatgctcagccacctgcgaccctgaactggtacaagcaggttggaaaatgaatgaatgaatgaatgaatgaatgaaggaaagttatgggttggaaaacgagtgaatgaataaaagttacaggttggaaaatgaatgaatgaatacaagttgattggaaaaaaaattcgtaagatctgtgataatcatacaaatgcacgacaataaacaaagaagtgttttgggagcctgttgtatttgtaatggttttcaaactgcgaggtgggaggaggtgctcctgacaattttcgctttgcaaacatttattccttgatttaacccactgccattacgaccactgtgacttgctgatttatcaaaaattggataaatatgttacttgtttttattaatctttctcaagtgtatatttcacatttatttcaatggctaatattaggagtgttgtagtgtttatttagaagtttggtgatgtttttatgaccaaatatatgctgtaggaacttgactcttgtttatatccatcaacttatgggaaaattggttttgttatacgttgctttgcttgaagttgcagtttccaagaaattatcaacaatattaagtgaggacttactatatatccattatgcctcaataaaactgtttttttgttttttttaatttgagacctttacccggggtcctggtgaccaaaattaaggccatgaggacattgagtgatttgatacatgtatcaccctcccaggcccctgtctccctgggcggcctgcactgcgcagtgcccagtgaccagctgtgcttggcctaaataagtgtttgtgtggttgttgaaataatgaataaaaagtagaaagaatacatgcttactgatggttgtcactgtacaaaagataactgacttgtgaattcttggaagtcattttttgttttgtttctttgtttcaggttcatattctaaagagagcaggcactgagcaaatgtttgttgaactgaaccaatctgctagttatggggacatgacctccacttcatggtgttgaactaaacaaacacatacttctccagacaaatattaaaactggtgaacttcaaaataacgtgaaaagctcctatgtttccatgcctcattatatgccacaaaaaatcaaatgataacgagaacaaagtaggttattttgtttgctatttaacttgtgtgcaggtcttcacagaatgagaggcataccaacactcatgaccccaggctagttctgttctttgccagtgtgtggtttgggagttctgtgaagtgtttgcagtcgctactaataatccaggtgacacggcaaacattgcagttcctaggtccagcacaattagaggagggttcactcgtaggcagcatctgagcaacaggctcaccagacttcagcctcttcactccgactcttccacgctccagctctcttcattaagatattctagaagcaactgaggagtttctacaaacattttggaaattacaggtaaaatatatgtgttttcttttctccttgcctgttttatagggaatgataacgaacatttaag

SEQ ID NO: 40472 - DNA, 2300 bp, Homo sapien
atggcaaaaataataatgtccatttactgaacacttgttatgacattcagacactgtgtcaaacacataatgtatattctcttacttaaccctcaccaatgagcctataaagcaggtacttttccacattttatggccagggaagtagacagaggaattaagtacatggcttgcagattcacatagcaaagtggaagaggcaggatttgaactgaggtctgactgactcagtggtatgctgagaatgtatgcttaacaccactcctgtcatctggccactctaacagcagtgactagacagaacttaacagagctcagatatgacatacaggtaatctcagaggccatggcaattgaagtcattctcagggaagaagcctaatatgaactctgccaatgaggcttttggcatttcttagactcacttatcaaaggcgggccagggccagaagcatcagcatcagcttattagaaatgtagactctcagaccccaccccaggcctactgagtcaaccactgcagcaagatcccaggaaattcatgtgcaccttcaagcttgggaagccatggtttagatacacactgatatgtgccagagacaagtgataccagggagagggtatggtagctcgactggataacagggatacctggtctctgtccttaactggagttgtgggagtggaacgtatactacgggagatgctcagaaatggagagcccattttgtgctgtcttatatgtaagaaatgttatctttcctaaaagtgctccaaaagaaaccttttttggttcttttgattcttttgatgctgatgcttctggccctggcccacctttgataagtgagtctaaggaatgccaaaagcctcactggcagaaatactttcagtgtcaaaacagaactgatcaatgtgaattgtttatcagacatagattatagaattaaagataaagtcaagagaaatgctgcattagtccttagctatttaatggcagatcatatctgatcccaaactttttgaatttgtacttcaatttggagctggtaatgatacaattcatgcctattgctaccctgtaaacacaaatttccttactgatttaatagccatgtctgtgtgtagacagtgataattataaatggaggtttgtatcaaagctggacactactgtttctcttatctacacctcactctttctctttctccccatccctccctactcctctctccatttctctctcataggtggcctgcaacaaagtcagtatttatgaggcaaagtgtgcagtttcatgacctttttccttttgtgattggtgtggagacaacattgtggcgcacatgcttgaacctggtcctgtttccccagaggaccccttaccttgtttttgttgttcagagctgaggcaggaagccccgtaggaaacccgattaggtgaagcatcttcaagtccgattagaccacaggtagtcattagaaggatcaggtgccatctggggactttatgtgtgacaaagtcctgaaacatgttcaaaccccagtatgagtaagggaagcagtggaagcgtgctgggtatgcagaagcataaaatcatagcatttcatcgtgtgctgcttctgctgtttgtcctgcgttatgctgagtcaccaaattgtgtacgttcacagtcatttcagaattacatcaatgaggtaataagcaagagtgcctaaataaaacaaaaggcctagatctttatttttaaatgattaccaggagcaagtactgacttagaaacttatcagaatgagaaaatgtcaaacaatttcatttttagcctgcacaataacaactttctcctgttaacataaataaatgagggttaaaagttgtctgggagagaaatgcttgtgtactggtgaagtactttttctggaggataacactaggcaagaaagaagatgcaagggaaaccttcatgaggaagatttcacaactgcagagcatgctaggaactggtttgcttctggctgttgtctccttagggtgagctctgtctggtgattagcatcaccatggattaaattaattggctgtactcaatcccttgctggacatactgagaataaatccaaagacattagtttctttgcacgaaatgaggttacatatccagtgacatttatttgagctatttaaacaacttaaacatctttttcttttcttaataagggacgtttcaagttgtggtaagtacaaaactatttgaaatctttctttggaaaatattctgttttgctagttgtattttgt

SEQ ID NO: 40473 - DNA, 2300 bp, Homo sapien
gctattcctttcgctagaaataccggatttgtacatgccatgtaatcgtgtagagactctatgactcaacaccctcctgccaaaatgtcaggtcaaggccaaccaagggagggtcctgggcaccagtctgtgagaataaaaggcaatgaatccagagcgtggggcaaattccactttatccaggttggtgatgacacagcccttgatacgtagcacacaatgcgtgaggcggctctttccacgtgcagagaaatccgtgcacttctatttcataatgttactcattaagaatggcactgtgtactagttcgaactcacctggcgcctaccagagagaagcgggggtgggtggggggtgtcatggtttgcctcctgatttagaagatccaactggtgctcctagtggcagtgtaactcgtgttgcctcacttacctcccaagtatgtgagtcacagtataatttaagaattacactctctatttcttacatttgcaaaagctaagtgagacaaatcaaagcttaagtttccttattaaaaaaatgaagatcctatattttattgaggttttaaaaatctcttaaaaccacaacatattttgtattctccttgaatcactccgatcacagatttaatttttcgagtcatttctggagttgtgggaccacacagctagtttgcaatccctatagctttaagagaaggtatttctagttttggagtaaggagtaagggaggtggcgcctgctccgggctccgccactccccgcccgcgggccgggggtggggtggcactcggtttcccgcggctgccggccgcgccccgcgccgccgccaggggtgctgcgcttcccacctgccgcaggacgcctcgagggccggtgcggtgcccactgggctgccgctcctcccggctcagagctttccagccgccgagaacgtgcgagggaccccggcgtcgggcaggggcctgggccgcgaagggcgggagcgcctccgcacctgcctgagctcaggcacccccgcccgccggagaagccgggagccctcggaatgccggctgcctccaccgagggcgctggctcggggctcccagcggacccgcccgccctcagctgccggcgcggcaccaggctccgcgctccgagccccgtacgcctttctctcccctgcactctctggcaaggccgggcacgcccactgccgctgctggcctccgagcccgggcgcccgagttacacccattctccccaccatcgtcggccagagccgcgctcccagcccttctccaggtgctggcggctccgaccggaatacaaagaggcctgctcctccctggcccttgctgccgccacacccgtccgtgcccactctccgccgtcctccgcgagggctgcacgcagggacccctcctctcagcgcgctcctccccctcccccagtgtcgctcaaatccacccagcgttccgaaatcccgggagtgggggccttcgactgtcaccctcaggcccccttggccgctcctcccggcccttgggacccgccagggcagtcccccaacccccgcccgccgctcctctcggtcccggcccctcctccgggtccctcctcctccctcgcccctcccgagccagggtgggagcgacggcagctggaagagaagggatgaggtcatcctctccctcggagtcagctggtggaggagaggaagcgggaggagggagcgcgcgcgaggggaggagaggaatgtgcaggtccgaggagcgccgcggcggccgctgctgctcctgctgctggcggcggcggcggctcgggcggcagcagcgaagccgggacggcgaggagcgcgggcggcgggcaggggcgcgcgcggggcgccgcgagcagcttggctccgcgcaggcagccaggcggcgctcctgccggccccaggcgcgccgctagcccggcccagcgcccagcccggcgggcggcgggcggcggcggacggcaggcgagccgacgcaggagcaggaggagggggagccgcaccgcctgggagggaagccggggcgaggcgaggaggtggcgggaggaggagacagcggggaaaggtgtcagataaaggagggctctcctccggtgtggaggcatcatggccgctaaatcagacgggaggctgaaaatgaagaaaagcagcgacgtggcgttcaccccgctgcagaactcggaccactcgggctcggtgcagggattggctccaggcttgccgtcggggtcgggagccgaggacgaggaggcggccgggggcggctgctgcccg

SEQ ID NO: 40474 - DNA, 2300 bp, Homo sapien
ttttttttcaaagaaagatttgagctacgagataagaatgaagttaccagaagttatcaggtcatagtttcagagtatgcaagagagtcgggccttcatatgttcttgtaaagttttctgtctaatcttttggtataacaattttaggagttcaccctagatgaaagagtggaagtcatcagatttgtcaataagcagtctagaggaaaaatgagaagaggaagaagcagggattctttttcttgtgttttgaagatgtttctcctcccaaagctatcaccttggtagttatcaccaagatgtataatagcaagcactactgaatgatcttcccagttatcagcactagcatcacggcgagtcagttttcagaactagctcttggcgcaagccctgaaataaaatggggacaaaaagtggtctaccaccatgtgacttattttctttttttttttaattttattattattatactttaagttttagggtacatgtgcacaacgtgcaggtttgttacatatgtatacatgtgccatgttggtgtgctgtacctattaactcgtcatttagcatcaggtatatctcctaatgctatccctcccccctccccccaccccacaacactccccggtgtgtgatgttccccttcctgtgcacgtgacttattttcaattgcccagcaatgaaaactaacaagttaaagaaaatgttcattttctgaaccccagagcccacataggtacaaagatactctgtaatgtacaatgaggtggccaatcgtgggaatataggagcaataaatagtcctcttaagcaaggttcatgggtaagagttactctagcaggattgggtgttgggtcagagggtatctattaatgtagaggcccaagtatggtgatgaagagaaaacctgtcagtggctcatccatagtatttgccttttcacagagcagagaagttcaaaatagtcacagccagtccataactataacaacagacatgtccactttggaaaggctagggcctgacgaaagtgggaaaacagagatgtcagtggtgtcatgtctaagagtgactctgtcattaggggaacccaccccctgtgatagttctccttgaccactggtccctatgggctctgcaggagagcttctcgtgggttctaagataaggtattccaaggtattgtaagttacccttgtttgtagaacatgaaccacttaaccatccctccttttaacagcaatgagattcagggttaccatggccttactcatcttcccattgtaaatatatcacaatgtcacaagagcctctgtgtccaaacacactaaactgggtttacaagcattagaatctttcactcatattgtgaatctcaattctgccagtcacctagtctgtgtatctgttcccaaactggaaaaaataattcttgagagaataattttcagaataatggaggtggaaagaaatgaacagttaagcaatttttcaacatagacaaaaccactggaccattgatagccctcaagctctgattcttcctcctgactaagtttcttttctttggggggctttcaacatctgaattttccagatgattgcggaaccatcgtcactaaaccaaagtagacaaggagttattaaaaaataaagactgtccacatgactgcaaatatcctgatgaaaagtggccaagtagatcactcaagtggtaaatttggtcttcatgatatcaaacatacggatatttggaaaagtcgagatgtttgaatcatacagttttccgtctgggtgtctggtgtttctggatagacagactgctccggtgttgtaagtaatggaattgaactttcttgcgccgtaagcaattgctggtcatattctgctgctaaaagtctctttgttgtgccaagagaaataatgcagaacaaatgttatttaatttttatttactttcagcaaacacatgaatgaaagaggtcaggtaggctgtcctgggcattctgggcctggctgcggcacaccctccttcacttggcccctgccaggcaagaaactttctattcagtctttgctatctttcataaattgtatcattgctcttctgctgttcatatcatcttagttattcacaaagtctacttgataaaatggctcaagggaaatacaagtttcttaagtttttattcttcaaatagaagttttaattttaagcattccttatgatattttttaagcctaaaaaccattcaaattgcttgacaaaattatttcatggtgaattttataaggt

SEQ ID NO: 40475 - DNA, 2300 bp, Homo sapien
agcactgacatagaaaacaaaaacctagactatatgaataatatagaatacaaaaggatatatgcagttatacaaaaattaagaataatcaatataatgtatatgaaaacaatgataaaaactaaaatcctaatcaaagatggttcaactttcaagtttatattttgaaagaattgttttttcaaaagtttaagataaagatgacaaaaatagatttaaaatcacataaatatgccatgggattccaattcctcatccttaagtttacattttcggcaacatattgcttggaagaaggactgaaagagataaatgatgcagagaaaataactctttctaatcctcgagtttccagataattaatttaaataaactagataatttaattgagatttttatataaaactttagaaagtttaagaaatacctttttataagtttaaaaacaaacagaaatcttataagtttgataaatattgtgccaccccaacatctcatagcacttttaaacactttatcttatactcctattcagtaaggaggtgatgcatataattattccaatgttgcagatgaggagactcaggcacagagagatggagggatggaagggatctggtcattcagcaaggcagcagtagagcagagcacacagttcagaactcgaggcaaccggtactgttgccattcctgactacattgcacagtgagtctgctgacgtctaagactgaaggggcttcccagatacgtgagggaagtctttcagtaatatatatgtgtatatatgtatagttgtaagtggcacaagtatcccctctggaaaatcccttaataggcctcacaaaattataagctgtgaacaaaatttaaggctattgttacaggattaaccacatttaaattgtaacatagtaatagaaattaaaggggaaaaagcctgattgtcaaggcaagttcacaaaatattggtagaaaatattaaggtttattcgaaagtgacagactttttgatataatacaaatcaccctggtttgtgaattcttgagacttacaactttggtaagaacttttagataacttcatgtctacataagttgaggagataactagtccatttactgtaattgtaaagtaaatagcagatataaaagaaaatattttgtttcaataaaattatatgaattatctcactttatccataaaaactttgagatagagataattattatttattcccatttgatgcatgaagaaagtgaggcttaaacatggtaagtaactttcacaatgtctcccacatttttagtgacagagttaagatgtcaagaccccagtaatagtttttaaaaatgtacattctcagctggacatgtgggttcatgcctgtcatcccagcactttcggaggccaaggcaggaggatcacttgaggccaggagttcgagaccagcctgggcaacatggtgaaacctcatctctgctaaaagtacaaaaattagctgggcatggtcttagctactcagatggctgaggttggaggatgactggagcctgggaggcagaggttgcagtgagccgagatcgcaccattgtgttccagcttgggcgacagtaaggctctgcttcaaaaaataaaaaaattatacatatatattctctctctctctctcccccccttcctccctcccctccctccctctctcccttgcacacatgcatgcacatacattacatacagacacacatttatatatgtaagcaattgaattctaggttgctgatgcaactccttcatgtacaaagtatgcatgaaagaaggaatgaaggctgaggtgggcagatcacttgaggttaggagatccagaccagcctggccaacatggtcaaactctgtctttaataaaaacacacaaaaaagttagtcgggtgtggtggcacatgcctgtaatcccagctacatgggaggctgaggcaggagagttgcttaaaaacccaggaggcggaggttacagtgagcctagatcatgccactgcactccagcctggacgacagagcaagactccaccttaaataagaggaattaataattatattgcaagatcaagttgggataaagtaatgcttgtggctttaaggatgaaagcttgcgtgccagtgtagaaaccatattcccagactatagtgaggaatactgagcctgctagggtaagctttcttttatttagtgggccctagaaatgtccagcttctagagaggtagctatttaaggaatgatatttcaacaggaaagtctttaa

SEQ ID NO: 40476 - DNA, 2300 bp, Homo sapien
ctactcaggaggctgaggcagaaaatcgcttgaacccaggaggcggaagttgcggtgagccaagatcgcaccattgcactccagcctaggcaacaaaaatgaatctccgtctccaaaaaaaaaaaaaagttgacaagctcaaatatcaccatattgacattgatggtgaggatatggaccttacagatgtttaaaatcagagtatttcaaaaactaataaatcagaacagagaactttttggctttcaataaaaccttaagaaagtgtatctattttaggctgggctcagtggctcatgcctataatcctaacactttgggaggctgaggcaggcaaatcacttgaacccaagaattcaagaccagtctgggcaatatggcaaaaccttgtctctacaaaacacacacacacacacacacacacaaaattaggcaggcatggtggcatgcctgtagccccagctactcggggggctgaggtaggaggattgcttgagcctgggaggtagaggttgctgtgagccgcgatcgcgccactacactacagcctgggtgacagagcaagatcctgtctcaaaaaaaataaataaataaataaataaagtatatctattttgaacacccattaccagtacttttccattttacttttagtatataagtcacattgagaacattctgaaaatgccaattaaaagatatagtcactgaaaaacaagttttcctgtttcctttctgcatatttaataatggtttaacagagatacagcactgttttactgaataggacttctacttcaaaccatgaataaagctgcaatttagtatttgtcaagatagctggtaaatctaatccttttagctttaatactttttttatttcaagctttaaactcgaggttctgatacaaattacccttcaagacttttctttaatcctagaatgcccaacttctagctaaaatcttccactctgtttcataattactgttctacccttattatcgtaacccagctactcatcccaataatgctgcacatctatactggtatatctgtaaccgtgcagcactcttaccttcttgaaccaacaaaatcagcctatctccgacctcaaagtagggcagcagtaaggaggtgggaataaacatttgaaaatgaatatttccactaactagtaaatgtggccaaaatactattgaaaataccattcaaaatgcatgaattttagctcagtttttatatagttctgaagaagtaccaatactattttggcatttcgtagcaccaaccacgtccgaagcgctccaactttcaagtctgagcttgtctctgaagaagttgcccgtgcagcctccatgaataccacacaccaaatactaactgctttttaacagatccagcaacgctgctgtttccattttctccatcctatttatgcccacatgaacttttttcttattagataattagtaacttgaaggcagagacctgttttacaggctgcaaaccccagggaccgagacagcacttaacgcctacaaggtccaaaccgacgccaacgattaagcgcacaaaggaaaggtgtaatatacatcatttcgtttagtcctccctgcagcctcatgtagtagttactattaatcaaccccatttcacaggtgatcaaaggtaagctcagaaaggtgaagttgcctgcccaggtcacaaggtaggaccaggattccaagcctgatcggtctggatacgaacgctctacccacgcggctttccccctacactctcgggatcaccacacacttccccttggcttttacaccggaggctcgacctgggtcccggaaccagcgaagccactgggcaagcctagaggcctctacagaggctagagacgcctcgccccaccagatgcattaggatgaaacgcgccgaaccgaaggtttagagcgccaggggagaagaggggcggggagagcaggctctttgacccagaggagggaggatctccacacccggccactctggcgctggggcgcaacactgaggccggcgggaagccgagcctgcccgcgaagagactggggattccgaggcggctcctgggagaccggacgcgcgcggcctccgccgctcccagtcccgccagacccgatgccgggctggagaagcgcgggggccgacgcacctcggataggcgggggcaggggcaggggcagctctcctttaccctagagcggcgacagaagctcttcgggggatcagtggccaagggggcggacagatttgcacggcggattcct

SEQ ID NO: 40477 - DNA, 2300 bp, Homo sapien
cttgcctaaacaatggtcttaagtggttctcttcctccaaacaatcctccacactgccgcctgagtagtattttaaatatgcaaatctgatcatgtcattccccagcttaaggttttcctatagtctacaaagtcctgcgggttttgaccctgcctactgtgcacaccctatcttctttctttcccagttttttttcttttctttcttttcttttctttttttttttcgggacagagtcttgctctgtcatccaggcacgacaatggctaactgcagcctggatctcctgggctcaagagagcatctggcccaagcctccagagtagctgggactacaagcatgtgccaccacagctggctaattttaaaaaaaaatttcagtacagatgaggtgttgttatgttgcccaggctagtctccaacttccgggctcaagtgatcctcactcctcggcctcctaaagtggtgggattacaggtgtgcaccaccgtgccctccctcccagccattttgttcagtttcccaggctttcttttgctccctcaaggcctttactgagttcagcctgcagagaacgctttctcccactgaaactcaccccaatttatcccccttagacctctttccaaaagctacttcctcaaagaaacctctgtgacccttggaaagttatttgttttcacagcatcctgcacttctctctcatagcacttataactataatcaaccaagtaataatgtaaccagttatcttaatattgatcttctctgctaggaagtaaactcaatacatgtaaggacagaatgtcttgtacctcagtgcctaccagcatacttgatatacaagagcacaaaaaacattttctgaatgattgtatgactacatgcatgcctgactaaaaaggcgacaatactttttacattaaatttaacaagtttaacttctttttgcgttttcaaattactccacaaaattacacgagaaaaatgaattccttcaaacttaaatcctactatattaaactatattaaaagtctatcacataaaattcacttccacaaggatttaactctaacaaaataagcatgtgagattaaatatacccgttatagagatgaaaaaaaggttcaagtggtttaactcacgcatttaatataaaggaaacaattcctagaattcaagtctcttggcggtattattcctgcatactagctatttttcatgtggggcaatttttacctgattcaaagatttccccaaaataaagatatcacaaaaactgatgtaaatatggttaagtcttttatctcaactagtttgaagttttaattatgtgcatttgggcttaagtagatttttaggtttaaaaaaagacgttaaccaaagcaagtcactcaactttaaactttcactttatgacatcatatctactagagatttcattttacatgtcgctttcccccaatttttaaatgtcccctcgatttacaaatatgagatgacatatagcacctacgacattttttcatagcagcctaccaagtagatgtagtccttcacataaaaataatggcagtgggcgaccactccgtcatgtctgagggttttgtttttcttaaacatcaccgtgcccaagggtcagatgttctggctgctttcagggatcaattacaaccacgtttgcaatacctacatttctgggtaatgactgtgctagaacatgaagagattctcttttctacttactccacaaatgccctggagcaaaggcacagtatcttacaatcctcccgctcctcaatgaagagaaacatttccgccacgcggctccacttctcgcagcacattttaccacttcggaggcagctctgacgtacgcagcccgggtcgcgcctgccgggcctccgctcggttactggagacttaaaacaggcctcgcccgcaagccctggatgaggagatagaaactggcccgcggccgctcgcgccgggaactagcccggacgctgccgccggaagtggctccgaggggccacgggaaggggcgggaccacgggcggtgtcacccccatcgcggcccgggctgcagccgccgcttggcttctttcacacgggttgcttcggaggaatccgccgtgcaaatctgtccgcccccttggccactgatcccccgaagagcttctgtcgccgctctagggtaaaggagagctgcccctgcccctgcccccgcctatccgaggtgcgtcggcccccgcgcttctccagcccggcatcgggtctggcgggactgggagcggc

SEQ ID NO: 40478 - DNA, 2300 bp, Homo sapien
cttatctcaaactcctggcctcaagcagcctctcaaaatgctgggattagagccataagccactgtgcccaaccccaggatttcaaacttctaatagcagaatccttttgttaaatcagctcttccacagaatcccggaacctaaatcccagttgtattgaagtgtctgtgaggggcatgaagacatgcttctcacccgctcttgttaatacctcctaaaataacttcacaaatcatgatttttaaattcactgtcttagttcagtaattttgcagataaagaatgtgaacatataagtattttctccacgtaccagggttacatggcctgttctgtcttccttccatcctcagtattttgcacagtgcccaacatagagcagatgctcaataagagtaagttaaatgggcagctggatgaatagtggcaggcagagcccaataagaaattgattcttccgttgattcttcattggctttttttgttactactccatattactgtcaattggtgttttttgttttttgttttttgttttttttttgagacagagtctcgctctctcacccaggctggggtgcagtggcacaatcttggctcactgcaacctctgtctcccaggttcaaacaattatcctgcctcagcctcctgagtagctggaattacagcctgggcccagctaatttttatatttttggtagagacgggttttcaccatgttggccaggctggtctcaaactcctgacctcaagtgatccgcctgcctcagcctccgaaagtgctgggattacaggtgtgagccaccgtgcccagcataccgtcaattgtttttttgtttgtttgttttcttttttcctttaaaaattgtaactttgcaggccaggcaaggtggcatgcaactgtaatcctagctgcttgtgaggctgaggcaagaggactgactgagcccgggagttcagagctttttagtgcattatgatcacacctgcagatagcccttatactccaacctgggcagtgttgtgagacccccatctctaaaaaataaaaaaaattgtaacatttgcatacctttattttgggcgggtcactctggatctcaggtttttttaaatgagaataagaaaacctgcctcttaagttttccttaaaactaagctaataaatggtgtctataggagaccaggcgacagaagaagaggaaggtggttattcctgtggtactgcagaatcacatgacagcaaaggcataggcctggatgaaagtgaacttgattctgaggctgaactcatgagaagtatgggattgccacttcaatttggtaggataactgcacataaggattttgaggtaaatattaatttacttttattatttctctctcttcgttttctttataaaatatcgcaaggaattactttttatcagattatatgcattcacgatcagcgctctctacctctttttaaatgtatgtatttataaattaaccagaactgaaagttgtaatatgtcccaagtgtgactgttcctcctcttggaaacttagatagtatatcacttgtttgtggagctaaaagcccatagtggggctttagagtattttgtttaatttaatgtcaaaatagacttggattctactttcttttatagttcataaagtgcattttatattcaagttatttatctgatataggtatctatgaatactagaaataaagttaaaataaaaaagaaaaaacatcaaaagaaatacttagatgaaattgtgcaagaatcttggagaaaagaatatgaagaagacgacattttggcttcagatgatccatcttcaattgaacagtatgagaacaccagaacatatgaacttcaaagcaaaaaagatactgagacagaaaatcctccagttgaaaacacattatctccaaagctagaaattacagagaaatgggaaaagtattggaatgaatatggaggaggactattgtggcaaagttggcaagaaaaacatccgggtcaagcactatcttctgaaccttggaactttcctgatacaaaggaagaatgggagcaacattatagtcaactttattggtattatttggaacaatttcagtattgggaagctcagggttggacttttgatgcctcgcaaagctgtgatacagatacttacacatctaaaacagaagctgatgacaagaacgatgaaaaatgcatgaaagttgacttagtatcttttccatcttcacctattatggttgataatgatagctctggtacaagtgataaggat

SEQ ID NO: 40479 - DNA, 2300 bp, Homo sapien
aaaaaaaacacaaccttgcctatgtagtaacagacaagaacaaggaacaatttctcatctgttttaggctaggtaggtgtattagtctgttttcgggctgctaataaagacatacccaagactggataatttttgaaggaaagaggtttaattgactcacagttctgcagggctggggaggcctcagaaaacttaaaattatggtggaaagggaagcaaacaactccttcttcacatggcagctagagagagaaatgagtgcccagcaaagggggaagcaccttataaaaccatcagatctcataagaactaactcaccatcacaagaagagagtgggagaaactgcccccatgattcaactatctttacctgattcctcccacaacacgtggggattatgggaactatgattcaagataagatttgggtggggacacagccaaaccataccagtaggatcctaatagtccaaattctgatacagctttatattataagctttaattctgagttcttccagaagtgatcagtcacagtttacaccttgtaacaagttcaccctgatagcatgaaacacaggccaatttattgattcacattattacctgaaatattcatatattggactttgctatacctgccatccaagtacctgggaaacaaaagtagttagaaaattgcttggtgtgatgaattacctttctatattctaaggggtaaaaaacactttctaatgagcagaaccttcatgtcaatcacatctccagcagctcttcaggacagtagaccataatcttagactccatgatgtctctgtctctgttgttcgttttttaaggctagtcagatgactctttttcccctcaatacagtgtcctccctaacttcagcatacttgtaaaatatgctacatatatatagctggttttattttgtattacatttcaggttggttggctgctggtgatgttttaataaatatgttcgtggtgctagttatatctgaaacagactgcctagtattagtccagtcagtgccataggactttccgtaatgtgttggatataatagcccctatgcattcatctatagatgagtgcagaaacagctactaagcattgctgaggaaaaaagatatgtaactgttgtgtctaacttagatacctaatttatttataggcacatttctttagaggaagattctgggttgttgcccatcatgtctaccacttcattctaatttactcactctcaggaaggtcatgaagacaagataggaagaatattcttgttacagaagatgcaaagaagtatatgatctgatgctgagccttgtttacattccaaagaacaaacatttgctgggacatatcttactggctctactgttgcattaaaaggcaactttgatttttttccaaggtagactgcttctattcttacagaagaattggccctaaatctttttagggttcgtctttgatgctaagtaacatttacatagattgtagcttgaccattgcagaaaggtctatataatttgaaaaactaaaattaatgattcagtagtaagtaggtacatttgtaatgtagctgtagcacagttaaattgttaagaacccttatggaaaagccactgggacagtttggctttatcctcttagtatttattgatagcaggaagtatttaatctgatatttttttccttttaaagaaaacttttaataaggtcatggcatgcccagatagcattctgattaggtcagaattacttactattaagcttgtgtgatgcagtctgcttttcagagccaataattttgacacagcttttcagtcaagtcacaaattgtaataggtaggaagattctgtgtagtttggaattaattcctgctcatgatgtcatcttaaaatttaaggtagaaaaattcctcacatgggttaataaaccaatggatgaagaagcatcacaggaatcatcttctcatgacaatgtgcacgacgcttccacaagtagtgattcagaggaacaagacatgtctgttaaaaaaggtgatgacctactggagactaataatccagaacctgaaaagtgtcagagcgtatcttcagctggtgaacttgaaacagaaaactatgaaagagacagcttgctagcaactgttccagatgagcaggattgtgttactcaagaagtgccagactcccgccaggcagaaactgaaggtaacactaaatatgcttcaacttgctaatggatttagataaaattttttttgttaatatgttttttctt

SEQ ID NO: 40480 - DNA, 2300 bp, Homo sapien
ttattttccattctgtaaatacagaaagtaaagctgagagaaatttaaaaattagcccaagtaagtggcatagctaggactcattaccagcttctccaattgctaagtcccattttcctgcactatcccacttccataaacaccaattctcatgatgctggttatttttacctggggtagtaccaccttcacaagggcatttggaagatgctggttgttagaatgacatttggaattctggcatttagtactcagttacttaatgttaggtcatgtacaggatggtcttgcacaacaaagaattattccacccacaatgtcattataccccctgttgacaaataatcaccttactttgctattggtaacacttgtttggggatggggagatctgaccttactgaatcatgatgacactttttactatttacaatgatcagatgaacatattaggacatagccctatccttgaggaccatttgagtgtgtaatggagtcttattctttgttagccatcacctcttgtttttatacttaactgtgaaaaaagtctcatctttctatgttgttgcttctaatttgctgaagactgaaaccaaataaccaaactgataaaaattatttaaggaaaaaatcactctctgaatgaatgagatccttttccgtggaatggagctagtgacccttgtttcagtttctcagatgccatgtgacttcaatgtggctgacagctagagcctaatctagtccttgatagaaaggaaatgtttagatttctataattcaccacataaagcagtgtcttggctaacagaagtaataacttttatgtctatagcagtatttctacatatgtcctgtcactgctgtgaattaagttagtaaaacaccactcactaactcattcattcattctttattttttagacagagtcttgctctgttgcccaggctggagtgcaatggcgcattctcagctcactgcaacctccgcctcccaggttcaagcgattcttctgcctgagcctcccgagtagctgggattagaggcacctgccaccgtgcccagctaatttttgtatttttttttagtagagatggggtttcaccatgttggtcaggctgatcttgaactcctgacctcagtgatccacctgcctcaggctcccaaagtgctgggattataggcatgaaccactgcgcccagccccatcgttcttttttttttttttttttttttttgagacagagtcttgctctgttgcccaggctggagtgcagtggtgcaatctcagctcactgcaagctccgcctcccgggttcacgccattcttctgtctcagcctcccaagtagctgggattacaggcacctaccaccacgcctagctgatttttgcatttttagtagagatgggatttcaccatgttggtcaggcttgtcttgaacttctgacctgcctcagcctcccaaagtgctgggattacaggtgtgagccacctcgctcagcccactcattccttttataggaattaataattggagtttaggccaggcacagtggctcatgcctgtaatcccagcactttgggaggccaaggcgggtggatcacaagctcgggagatcaagaccatcctgactaacacggtgaaaccccgtctctactaaaatacaaaaaaattagccgggcgtggtgacgggcgcctgtagtcccagctactcgggaggctgaggcaggagaatggtgtgaacccgggaggcggagcttgcagtgagccaagatcgtgccactgcactccagcatgggtgacagagccagacttcgtctctaaataaataaataaatgaatgaatgaatggagcttaaagaccctcggttactttcccaagcttacaaagccaataagtagcaaaatgctggtggtgattgaagccagtggcgtttccatcaggctctcctgtttctctgggcgtgtcattatatacatgttctgcttgtaattatttgatgtggcttcatttttagataaactcacctgtgatactaatttttttcttagtgagcatctatattctttgtattttattttagctgaagtgaaaaagaagaagaacaagaagaagaacaaaaaggtgaatggtctgcctcctgaaatagctgctgttcctgagctggcaaaatactgggcccagaggtacaggctcttctcccgttttgatgatgggattaagttggacagaggtaaagtatatatgtattttttagctttattttgaaaccacttcaaacttaaaaagaa

SEQ ID NO: 40481 - DNA, 2300 bp, Homo sapien
cttgccccgcccatcgtattccttcctttcttcaaaggcccatctatcctgtcaaggagccttaattgatttgcaccctgcctctgatcactgccttctgtgctcaatttagagaaaactggtgagataaatcagtcatcaatcaattaaccaatcaatcaatactaatgaactattttaaagcacccaacataatttctgggaggtagagtggggaatagataaatataaaaggcagtgccttcccaaaaggagtttaccagtagttgaggagacaagcctaacatgggcaaacaatgctaaaaagtacctaggtctagtttaaaataatgttgcacaccatacatgctacagatgctttaaaaagttgcctatcaataggagctttaaataaaactttcctgagaaatagaactttcatgggacattaagaaggaaagacagatatggagaatgattgaatgaagtattcagcaagtataaatgcagcctaagaagtggaaattagcatcgtatcgtttttttccaaataagaatgaagagatgaacttagtgaggacaattttgtgaggagttagggagttggggatctggttgcaagctcaggtaagcctgatgatgctttgttccttaccctgagagacattttaccaaaaacactgacagacattcctgatagattaaccaataccaaacgtttttgaatcctattcttatttgccacacacgtttagtcaggatctcaaggattcatcagtagcagcagaaactttaatgtagggttaatatatttgagaggtcattcttaagaaaagtctaggcaataggccctcaggtagtgaattattctgtaggattcattgttttttgtttcattttgttttgttttgttcttttttcatttttctatttttctccataggattcttgataggtttcaatcacacaccttcccatgggtatttccatgggcaacccaccccttctcttcagcagtaaactaacaactacataccagtgaacatcacaggtataaaccacctttcttcttttaaggaattagtatgcaaactttagtactcttttcctagtaacaaataactgctgtatcagattgtgtcacaaggcagctgctttgacttattgctctgtagctggggtcagcctcttcagaacattgttaatgagagaaaggaagtgctttgggcagtgtctggcccatcaggccctctgtaaatgtttgctattaatgcaatgctgagatcccagtgaacagaatctggcttagaagaagtgggtatccacggtgcccgagcctaatcttacatcttggatttgtaagtggcatttattgagttgaacatgagcttgagcacgcggtcacacattctttcagcaaacactggttaggcaccagctgctacgtgcaagcactgccctacatgctgggacgcagctgtagtaggaatgaaataacgccagcattcctgcatgcgggcagtgcgggccctgtacagaaaggtacacgagataggcatcctcacatccattgtcctgggaggaaactgaggctttgagaaacggagaacttgccgggccatttgactctacgtcatcccctcccccatcaatgccctgaacagcctcctgtacacccttaaggaacttactttgtaatgattattaagaactcagcgagaccccgagcatcacctcggcatatcgcatcctttctctagagaacccctaatgttggaagggatcagagcgcacctcctccgctcctgggagcacccccttcctaataataccttggggatgggtcggaaggaaaggaaaggagacgcgagaggtgtagtcgatgtgcctgcgaagcccaggctcctctggagatccttccgtccgtccctacaggagaaggctggcccgggctgctccactccccggagctgcagactgagtcgccaggtttctgtgccttcaaagccctgcgcgacggccacaccaaacacccaaaccttgggcagggaccaaacggtcacttccccgccctccgggctcaatatgcaaatccgagcaccaggaagtagctgggacctctcggccgagcccagagacagccagttcctctcccgccgcgccgggccgcgctgccgctcgctccccggccgtggcgcctccgggccagacgcgctgcagcctccagcccgcggcaagcggggcggccgcgccacccccggccccgcgccagcagcccctcgccgcgcgtccagcgttcccggccagcagcctccccatac

SEQ ID NO: 40482 - DNA, 2300 bp, Homo sapien
atatttcacataaatggaatcatacaatatgtggtcctttttgactgccttcttttatttagcataatgttttcaaagttcatccctgttgtagcatctctcagcactccattcctttcactgctgagtaatactccactggatggatattccagattttgtccattcatcagttgataggcattttggttgtttctactttttgcttttacaaataaggatgctttgaacattcatgtacaagtttttgtgtggacattatggtttcatctttcttgggtatatgtcaaggagtatagttgctgggtcctgtggtaagtctatgttttctttatttttaattttttaattgatatgtaatatctgtacataaatacatatttatgggatatctgtgatattttgatacatgcatggagtatgtaatcttttagcttctttttgatgtgtatttctattctaggcatggagaatggtggaaagcaaagtcccttttaacaaaaaaagaaggcttcatccccagcaactatgtggccaaactcaacaccttagaaacagaagagtgagtcctcatgtgttgtcatcttggtggctttatttgccacattggatttcttgttaatattcttcacctttttcttgccgtggaacataatatgcaggaaatgttgaaatgtcttcacaggtggtttttcaaggatataaccaggaaggacgcagaaaggcagcttttggcaccaggaaatagcgctggagctttccttattagagaaagtgaaacattaaaaggtaggaaattgttcaaagcctcttttaaaacactatttaggaaattatttttagaaactattctagagctactcaaggggaaaaaagggcatatagtatgctctggtagtaaaagttttatggtttgataacaaataacaaacctcagtgattagttgtgctactaaaagtaatatagttgagtgtggtggctcacacctgtaatcctaacactttgggaggctgaggcgagaggatcacttgagtccagcagttagagaccagcctgggcaacacagcaagaccccatctctacaagaaatacaaaacttagccaggcctggcagcacatgcctatagtcccagctactctggaggctgaggtaggaagatcacctgaacccagggaagggaggctgcagtgagccgtgatcacgccactgcactctaactagcctgagtgacagagtgaggcactgtctcaaaaaaaaaagagaaaagaaaagaaaagtactgtagaaagcacacatgattgtggccagttcttaccaggctttgtttgctgagccttttgcattattatttgaataaatcctgaagttttaagacaaagaaaattaggctgggcgtggtggctcaggcctgtaatcccaatgctttgggaggccgagactgagaatcacttgaacccagcagtttgataccagcctgggcaacatagcaagagcctgtttctataagaaattaaaaaattagccagctgtggtggtgcatgatcgtagtctcagctacttgagaggttggggtagaaagatcgtttgagcccaagaggtggaggctgcagttagctatgattgtgccactctactctagcctgggtgacagagcaacaacctatttcaaaaaaaaaaaaaagaaaatcaaagtaacttaaaaaaatttaaatgtagctaaataataattttaaaaaaattatcatgaagaaagaaaatggtatgttggcaagctacacagcaaacaaaatgccagcttcatttgtcaagtagaatttttataggacttttaaaattatgcattttatacaaatttcataaatatatgtattttgcatatttgtatcacaaaatgtgtactgcagttgttgtataatgcagatcttatttgtgagatataaacatttacttacacttttccccccataggaagcttctctctgtctgtcagagactttgaccctgtgcatggtgatgttattaagcactacaaaattagaagtctggataatgggggctattacatctctccacgaatcacttttccctgtatcagcgacatgattaaacattaccaaagtaagtaaaaactgaaggttcaacaagacaagatatatttgttatgatatgtataagacgtcaaacgctatttttatattaaaactttttatgcatcgtatttctcttagatacagttgcaggtcatattctataagtggttctaaattaatctatagttaggccaggcacagtggctca

SEQ ID NO: 40483 - DNA, 2300 bp, Homo sapien
accatcttggccaggttggtattgaactcctgacctcttgatccactcacctcggactcccaaagtgctgggatcacagggcgtgagccaccgctcctggcaacaatccaattttcaatagcaccaaaaagagtaaaatgcataggaataaacttaaccaaggaggtgaaagacttatacactgaaaaccacaaaatattgctaaaagaaataaaagaagattcaaataaatgtaaagacatcctatgtttatggattagaatactgaatattgttaagatgtcaatactacccaaagaggtctatctacagattcaacacaatacctatcaaaataccaatggcatttttgcagaaatagaaaaatgtatctgtaaattcatgtggactctcaagggataacaaatagccaaaacagttttgaaaaagaataggattggaggactcacacttctgatttcaaaacatattataaagtcacaataattaaagctctggtaggtagcatgagcataacaacaaacaggccaatggaataagatagagagtccaggaataaattattgtgtatgtggtaaaattgtctttagcaggggttccaagtccactgaatggagaaagaacagtctcttcaacaaatagtgttgggaaaactggatatctacaggcaaaagccataaagtggaacccttacatgatacacaaaaattatgcttaccttacacaatatacaaaaataaactcaaaatggattaaaaactgaactgtaagacctaaaactatcaaacttctagaagaaaacatagaggaaaggctttatgacatgggatttggcaatgatttgttagatatgatgccaaaaacataggcaatgaaatcaaagatttcaaagtttgatgtgattacattacatcacactttaaagcttttgtccatgaaagtacatagctgagagagtgaaaaggcaacctacaaaatgaacgaaaatacttgcaaatcatctacctaataaggggttaatatccagaaaacataaataactcatacaactcacaaaaacaaaaataactcacttcaaaaaaatgggcaaacagccaggcgcagtggctcacgcctgtaatctcagcactttgggaggccaaggtgggtggatcacctaaggtcaggagtttgagaccagcctggccaacatggtgaaaccctgtctctaccaaaaatacaaaaaattagctgggtgttgtggtgcatgcctgtaatcctagctattcgggaggctgaggcaggagaatcgcttgaacacgggaggtggaggttgcagtgagcagagatcacgccatggcactccagccttagcaacaagaacgaaactccgtctcaaaaaaaaggaaaaaaaaaaaaagagcaaaggacttgaataggcagttctataaagaaggtatagaaatgaccaataagctggccaaaagcggtggctcacgcctttaatcctagcactttgggaggccaaggtaggcagatcatgaggtcaggaattcaagaccagcctgggcaacatggtgaaatcctgtctctactaaaaatacaaaaattagctgggcgtggtggcatgcgcctgtaatcccagctacgtgggaggatgaggcaggagaattgcttgaactcgggaggcagaggttgcagtcagccaacatcgtgccactgcattccagcctgggtgacagagtaagattctgtctcaaaaaaaaaaaaaaaaaaaaaaagaaaaaaaaaagaaagaaatggccaacaagcatataaaaaaatgttcaacttcattaatcattacagaagtacaaatcaaaaccacaatgagatatcacttcacacccattaggatggttaccataaaaaaaaaatgaagtgttggtgaggatttggagaaactggatcccctgatgggaatgcaaaatggtgcaacagtatcgagattccttaaacaatttaaaatagaaataccatatgatccagcaatctcacttggtatatatccaaaataattcaaggcaaaatctcaaagacatatttgcatactcatgtttattatagcattattcacaatagccaagaggtgggaacaatctaaatgtccaacagatgaatgaatttttaaaaagtggtatatatacatacattgagatattattcagccttaaaaaagaagaaaaatcatggccgggcgcggtggctcacgcctgtaatcccagcactttgggaggccgagacgagcgaatcacgaggtcaggagatggagaccatcctca

SEQ ID NO: 40484 - DNA, 2300 bp, Homo sapien
ggtacctattgtgttgagtaacggtgataattttatacgctattctgagccagcagaagtgaaggccttaagccgattttaattgtttcgattatactgagaggtcttttatttcctgtagtgtgtgctgacttgataagaggcgcaaaagaaaagaatctcaaagtgaaaggaccagttcgaatgcctaccaaggtaaagtaaatcggaggggcaggaagtaggagttgcttccggatgttgcataaattcaggttctttaaggagttcggctgccaaaattgttaacactgatgctgtctacaaacgcacatagaaatcggtggtagattgcggttcctagtaagtagctaatgtttagatatgattgttgaattattgttgctgtgttcttggtgtgctttggtgcttaacaggcgcaagctctaagggtggtgtcctagcacagtgaaaacagacctggcattttcaacccatggtacctgaaaatctattagtgtaaattggaatcataccaaagggaaactaatgaaatgattagaagtaatgattttccagatgttctagggataagtataaaacgataaacacttggtttcctttgtcttttgttacagactttgagaatcactacaagaaaaactccttgtggtgaaggttctaagacgtgggatcgtttccagatgagaattcacaagcgactcattgacttgcacagtccttctgagattgttaagcagattacttccatcagtattgagccaggagttgaggtggaagtcaccattgcagatgcttaagtcaactattttaataaattgatgaccagttgttaacttctgttggtttttattcagaatactggcagattttaggaatataaaggtgtactatgagacttccacttttcaggtggaatatatgggtatcttagagtggtctatcctgttttcgttgtcgtttgagtcatttgaaaactggattccgttaactacataatatgtgagacctgactggttttattggacactggcagtttataactttggcatactctagataaattctgattggtatggggtgttaaggtttctggggcgtttgtaatgcacacccatggttgagaacctagtgcgctagtaggcacgtgttaaaaagctagtaactaatatttttaaattaaccaagtttaacgtccttaaaaaaggattaagtggcagaggcaggactaaaactaagttttagggttttaggaactaaaacttagtttaaaaatacttatattttcagtgttttatattttaaatataaaattttcactttttttttttggggggggggacggcgttttgctctgtggcccaggctggagtgcagtggtgtgttcttggctcactgcaacctctgcctcccaggttcaagcaattctcctgcctcagcctcccaagtagttgggattacaagtgcctgcgaccaagcctggttaattttttattttatagtagagatggggttttgtcctgttgttcaggctggtctcaaactcctgacctcaggtgatccacctgcctcagcctcccaaagtgctgggattacaggcatgagccaccatgcctggcccattttcacttttacattttttaaaaatacttatattttcagtgttttagacagggtctctgcagtccaggctggagtgcagtggtgtgatcactgcagccttgacctgggctcatgcaatccacctcaaactgcctagtagctgggacttaacaagcatgtggctaccatgcccagctaattgttttttgtagaggtgaggttttgccatgttgcccaggctggtctggaactctgaagactcaaaccatcagcctgtgttagcctactaaactgctggtgttacaggagtgagccactgtacccagcctagaatttaaaatcagatagatacccttacaggtttgctaaacttattggggaaagtttctatagatttattgtggaaaaatggaacatctacaaattgttaagattgccttcagaaaatttttgaaatttttaataggatcaaagttgggtaattcaagttttttctttttggatttgggcctaggctttcacgctgaactctgctatcttttcaaattgaccttcagttgagatttctgtatacaaccaactgcatgctaggcacctgcaacccacagctgaaaagctaatgtgtctaaaatgaaatcttccctcccagaagctctgtcctgtgttcctagtctgaatccattgtctactgaagtctc

SEQ ID NO: 40485 - DNA, 2300 bp, Homo sapien
gttcacttaaaatatgcacagtcacctccaggcagtactacagcggtggctgatcacaccccagggagcagggcaattgtgcttttgtctatttgtcgcacacagccataccaataagttaaacctctaagttatgaagtctcaggttacagctagcacaataagaatgcaggttttcagaatttctgctgaaaattctactaagagagtatttacagacaatggattacatttaaaaataactgaactggggccgggataggtggctcacacctgtaatcccagcactttgggaggccaaggcaggcagatcgcgagttcaggagattgagaccatcctggctaacacggtgaaacaccgtctctagtaaaaacacaaaaaattagctgagagtggtgccacgtgcctgtggtcccagctactcgggaggctgaggcaggagaattgcttgaacccaggaggtggaggttgcggggagccaaaatcgtgccactgcatccagcctcggcgacagagcgagactccatctcaaaaaacaaacaaacaaaaaacccaaaaaactgaactggaaaacatccaaatttgaaaatttaaaataattgttaaaatggcagcaaaaaacctcatacgtatcgtgagccaaagaaacccagttattagttatgttccaattatcaccaaataagacaatgctattatttgattaaagtttcaaacataatttcctaccaaggaacagaagacaaaacctcaagaaagagtcctgacggggcgagcgcggtggctcacgcctgtaatcccagcactttgggaggccgaggcgggcctgagatctggagtttgagaccagcatgatcaacatggagaaaccccgtctctactaaaaaaaaaaaaaaaaaaaaaaaaattagccgggcatggtggcgcatgcctgtaatcccagctactccggaggctgaggcaggagaatcgcttgaacccaggaggcggagtttgcggtgagccgagatcgcgccatggcactccagcctgggcaacaagaatgaaactccgtctcacaaaaaaaaaaaaacaaaacaaacaaaaaaaaaaaacaacaaacaggcctggacggaggggtcagagctctgtccctccccatttcagagtgtttgagcaaataactctttcggctcagagcttcaggtggaaagtaatatgagatgattttactcttctttctgccctgtatcaaaatccatctcagtgatttccacgtatttagccccggcttcttgctcaggtgtaggtgagctcaccctgcgctctctcccactgctcagctcagttgaccattcgggttttccactatacttggtcacttatgtgattatgaacagatgttcagtattaagaagaccctgggggatcttatccaatgactttatccaacagaaaggagatgaggtatcaggactgggtggctagccaggttccaggccgggcctcaggatagctgcgcagcctggcattttcgcctcactttccagaaggacgagaagccaagttcaggtcctttccagaaatagatgtagatacttctgctggactgggaagccaggagctgaaatatcacaacaggacgtttcaggctatgaaaaataactgcttactaattctaacgtaagttatccagattacgagaagcatttctgccaatgctcatgtcagctaagctcagagaagttacctcatcctcagagagcaacgaatggtatggtctatgtagaaagcaaaatttgcaacggaaaaaccagagttcgtgtgcactttatgaggaagagggttaggtgcaccagacagaggagtttctcaggtttccgtgtcgcctgttctctcgaccaggtggccctctcggcgcaggcggggaccccaccctgcgggacttcggctcctccgtgcggacagggggcgcccgcagccgtgcctttcccgccaactccactagtgctccagctcgcccttgtgcgaccgcctctagggcccgggatatttcctgttccggggcgtgtgggacccggatgcaagcgtgctatataagcgttgctcaagtcccacccctttctttttgaggaagacgcggtcgtaagggctgaggatttttggtccgcacgctcctgctcctgactcaccgctgttcgctctcgccgaggaacaagtcggtcaggaagcccgcgcgcaacagccatggtgaggcggcagtcggcggcgggcggcgcaacgcagggctcgggcgccggggggaccccggtttcgagtt

SEQ ID NO: 40486 - DNA, 2300 bp, Homo sapien
tttgcaatgtagatttattatagaatataattgtattactttttctctattcattggcatccttttatatttggggtttgacacaattgcacacaacaatctttctactaaaatattccatagagttggccaggcatggtggctcacgcctgtaatcctagcactttgggaggctgaggcaggtggatcacctggggtcaggagtttgagaccagcctggccaacatggtgaaaccccatctctactaaaaatacaaaagttagctgggcatggtggcatgcgcctgtaatcccagctactcgggaggctgaggcgggagaatcgcttgaacccaggtggcggaggttgcagtgagcggagatcgtgccattgcactccagcctgggcaacaagagcgaaactctgtctcaaaaaaaaaaaaaagattgaggctcaagcaggttaaatattatacacacactagatcacatactaagccacacaggttgtatagaatagaaatcctattccagggcttcacagacctcaaattgtttctgtaaatggttcatgtttattaatttaccttctcaaagtcaatatacttcaaaaacagaactgctatcattaaaatgtggttacacataacctaacacataagtgctttagaagaagggaactttaccatttgattttttaaaatatagatcctaacacttttgtgtgtgtgtgttttctcatgaatatggtaatattattggtcctttttccaaagatatggtatgaaattaattttttgcttagagtcaggatcttgctccatcatccagcctggtgtgcagtggcacgatcatagctcactatagcctcaaactcctcagttcaagtctcctcccgccccagcctccaaagtagctaggactataggagtgcaccaccacactcagctaactttattattattttttgtagaggcaggtctcaaattcttggcctcaagtggcccttccaccttagcctcccaaagcactggtattataggcataactcactgcacttggtagaaaattaattttcattataaaaatcagaaagaaagatcttattgtctgatggccaataccctgaatttcattccaacttctggttttctacattatatgtaggtaccagtgattttgtgccatttttatttcttcagatttttcctcttctacaattctcccatatgtgttattatttgaagccctgatcacagctctgaatcatttctattcttttgtctcccccaactctggttcaaaacttcggtaactcatttgctacgaagtctagaatctctcttgcaagtgagctgaccggttgggccaaatcgccttggaagggaaggattgttaggaagtcagtatgttgctaagatgtcttgctaatttgctgtgtaagctgcatagagtgtcaggggattctcctttccactgatgaatttaggtgtgtgttatgacctgtatcagtgattctatttggattgattaaggttgcaattttttatccatatgaatgttgcacctagtttttccctgtaattggttaaacaaatgtctgctgtttgcattttaactcttagccaatacctgctggaagtgatttaatgcagctggagaatgacactaacaatcattacagcctgcaaagtgtgaaacaatttcattgtgctttgtggtctctttagtctgaggactgataatgtgcagcggatgagacttgaaaaaaacgtattttattataatttaagaaataatgtaaaagaggggtgagttctgaggcagctccatgctgtttgtctggcatgagcttgtttttataagaattcacttcaagtgtggaagggaaatgctttcatctgaaagggatagctgtgcttcattccggtttctccctccatctgataaaaactcttgctgagtgacagcacagatgtagctcatttggaacaagtgaaggaaaaggagaaaagggatgaggtggagcgaaggagtagtcagtcatgtttccaaagtcccgcggtttcccctagtctcttcattcactccagcggccctggtgtccccctgcaaagtgcgatgccctcgcccctggccctacgcccctacctccggagcgagttttccccatcggtggacgcgcggccctgcagcagtccctcagagctacctgcgaagctgcttctgggggccactcttcctcgggccccgcggctgccgcgccggctggcctggtgctccattgactgggagcaggtgtgcttgctgcagaggctggg

SEQ ID NO: 40487 - DNA, 2300 bp, Homo sapien
gctgtttagatatttccaagggaagcagaggagctagcttttgaatgagaatataacagaaatagagcaagaagcccttgagatccagaaaatctaaaacaaaaagaacatatgttaccattggtaatgtcagttgcattgtgttaatgtcacttttaaacagcaaggcggatttttagaccgtttgaatagcacaaaggccttgcctgtatctacctaataaagaaagacacctgaagcaagtactgatgaacttacccatatgccttactatgttaataaagtgagtggataattgctgtattttgcctgtttagaaacagcctttacattaaaataaagttagacctattgtaacatagagttaattttacaaaaatgtaggtatttagagctcctgcgaaagtataactggaatccgtgaaagtcagtctaatagtaacttggtagtagcttgggacagcaagtgtcagtgtcagtctggtgccaaaacacaggtgatataaggaagttggttttaaaagaggttgcaggtattatttctatggtctcttaaaagtacatcacaggccaggtgtggcggctcacgcctataatcccagcatgttgagaggctgagactggaggactgcttgagccctggagttcaagaccagcctgggcaacatattgagaccctgtgtctacaaaagataaaaaataattagccaggcataatggcatgtacctgcagtcccagctactcgggaggctgaggcacttgaagatagcttgagcccagggaagtcaaggctgcagtgagccatgattgccccactgcactccagcctgggtgacagagtgagactctgtctcaaaagaaaataagtacatcactcaactagcctttataaacgttgaggaattggaactttgaggagttggttttcttaccctagaaacagagtcgataatatttactatgttttgtcgatgaatttttaaaggttttaattcatttttaaattttttgtttaaaaagatatactccttgctgtacaatatgtacatttcattcttttttgcagcaccaataacacattgaaactctgacacacctttttaccaaccttaaacacctctttgatgatgtgttgtgtgccatgtcagaagtccacacaggtctgctgcacacaggttgcaggtgtgtccaaaggccaatgccctcagctcttggggatgcctgctgactcgtttacctactaacctcagtgtgcctaaaatttttgtgatgtgaaaaacgatgaggaaaattacattaaccatgtctttctcccaaaatgacaaagagccatgctcttcacctaataaaacatcaaaaggttttactatttgaagaatttgtatttgttaggaagatgaatcatttctactcttgactcaggaatccctcagagtatgatgacactggtataatgcatcacttcgggtggtgcattcaactctttcaggcctctagtgtctctccgtgaagtacctcttccacagactcaatggttcacaaggtgcctaaaagagttttcagttgcttatctctgttttcctatagtgcagtctgactagagctgacatgcacaaatcaaactgatttttagagactgaaatatttgctgaaacgtttttagtcagattttatgttctctgatcttttgtaaaaattgaagcttaataatgccactttttagagtcatgttttgattcttcatgagagttcctgaaatcactactgctatgcctaagtaaaacatgtgtcaagtggaatttcagggtatgtatgaactgttcattctgagcaatgcatttctatgtattttgacaaatataaagaaacctatggggtttctaatgtaatgtgatgatattacattagaccagctgaatccattttattggtttcttttttaattcaaaagcatcacatagcaaataaaatttttaaaaattgagtttagttacaaactagttgtttcttatttttttttccagtccctttttgctttcttttacgaccacatgaaacttgagaagccacctaaagctatatcatttagtggagttgggcagttcccaagtgtccaacaagaaggcctggtttaggctgcgatggccactgtcattcctggtgatttgtcagaagtaagagatacccagaaagtcccttcagggaaacgtaagcgtggtgaaaccaaaccaagaaaaaactttccttgccaactgtgtgacaaggcctttaacagtgttgagaaattaaaggttcactc

SEQ ID NO: 40488 - DNA, 2300 bp, Homo sapien
attctttaggaaggatgaacaggtgaagcaaacatgtcaggaagggggaaaccaagcaactccacatccctccccaaaaggtactccagccttgcactccagcctctctgagcaccatcacctctctatccctcctctgcagagcccagtttaaagaaaggagggagccactaacaaaacctgaagcataaatgcgacgaaaatgcaatctaaagccggaaaggttcattcttccaatcacacatattaactctattaagaaaatggcatcacttttttttccacccaaaaaaaccccgcaaagatcattaaaagagagttataaaatagcaaatatagtgtttatcttatctgagatcagtccacattaccaataagtttagcagtttctgcactaccacctcccccctcgctccccctgcttctcttgcatcggattttcacgttttctcattgtcggttgagttataaaaggcttttgcccttcgaaagttttaaaaaataaataaatattaactccttggtccctgcaaagtcaaaatggacttcaggggaaaggcggtacatacttttacctttagcgagaaaagggggagcatcccggatttttagggattttttgcgattttttaaaaatttttatttggttatatgcctgagttctccctccattttggttgtttatgatactgacaacaagctgtccctgctctgtgccgatctcctgctttcatttagcaccccctccccctaccccccctcgcagccacacaccccgggctcacacctccctgcagaccccgcaccccgaccccggcttgcccacctgaggaaagggcaaaaacaaattcatttctccagaaaagaaaaacctcttttgaaaaaggggcaaagttaccccaagtcactcaaagtgccccccaaatattgccgactgcgggtttccgccaggccctttgggaagcgaccttcccccgggatgttttggtggaaaatgcggagagtttactctcaaaactgaatttatattaatttttcccttatttttcgggtctctaatgtcttccgctctcgctgctgccgctgccgctgtcacaatattcacagcaccagagaggaggaggaggaggaggaggaggaaaacttttcaaactttccagaccctgaataaaggtttttttttttttcccaccgacctcaccttcgggtccccagccgcatcgccccctgccctgtcagaagcgacttcgggagtcctcgcagccccgcgtaattattttattttattttttattattatttttctctctggggtcctgagcaggggctgagagtagcacaaacttttcctcctcctgccgccgccgctgctcctctgccccctcggctagtcccataatttaaataaccctgatatttctcccgctaaacgcctcgccgccgccccggacccccggagaactcaccgcggggctttaacatcctccctccggcccgtccgccgcctctacaccgcccgcggaatttctaataatttttttctcatatttcgggctggacgcggcgggcctggaaattgtttccttacgcctctttccagcagccattgtagtgtatgcgctgcccctgcagcccaacttgcagctgccgccgccgccgccgccgccgccgccgacgtcgcgcccaccgctgcctccccctgcctgttcggccaccgcccccgcctcccgtcggcccgcccccaaaccccgcccgccgctgcgcccgccccccgcgcgcgctccgcccgagagctggccactcggagccgccgctggcgggagttggcccgcccattgggccgcgacgccgcccgtcaagccgaagtgttaagagacgggccgcggctggggggcgcggtggggcgggggaagagggggcggggtcgcgctcaccgccccgcccactcctcccgcctcggccctcctttcgccaggcgggggcggggcgaggcccgaccgcccctgcggcccagggccccgcgcggctgtcagtctggcggcggcgcgcgccgattgggcgggctgccgccggggagcgggggcagcaagttgggatgcgcgctacttaaggtcctgctgcgtgagccattgacgtgtttggagctggagacggcctgggtgctggcgaagcggaggccggaggtgagtggttcccccgccctacctccgaagcggccgcagaaaagcggggagagaggggtgcccttgggccgtagcggggcccgaatgcacttctgcggcgcggaggcgctcccgcca

SEQ ID NO: 40489 - DNA, 2300 bp, Homo sapien
cagttctactatgggaaagatcaggacgtccaggccaaaggagaccagcctttgcaaaaaaaagaatggaaaagggtttggttattctggtgtccattaagtaatcactgaataataattttatgattttcattgaacaatacaagaaaataaccagccaacagtaacatcttggcaaaaaagaaatcaagatgctgttcaattatatctacaagcttcttcctctcctgaagacaatttttttccacacttcccttcttcctaagagagatgatgatagtaaataaattcacagctttcttttttacacctatcctatgatgtgagaacacagaactcttcatacaccttagatttaataatctcaacaaggatcagacaaccttgcattaaatttaagtttcgtgccttacatgaaagtatcctactctatattttattgtcagtcagaaattcttcaaaaataatacctaggtaacatcacatatacccagttcgagtttggtgcatgagtttcttcacatttcatttccttttccttccggattctaaatacaaggcactctaagtttggatttccgaaagtcccctcctttgcatgagttcctcgtgtattaactggaattgaagaggaaatgtcaatttacagtgaggagcggggctgaattacaacatcgagtgctccgctaaaggggccttgtctattactttttgaatgtactaaataaatgttacaaggctctactacttgcagagcataaccagaaagaaaaaccaagcaaagatatgaaggaggggccacaaaaccatagcacattcaggggataactctaaaatccactccaaagggcaaactgcttaataaagcagttcctgatttcccatccagtggttcacgtcccccctctctaagtagctttgaaagggcagggggaaggaaacgtttctgaacacgttcatgcccacacgccccgtggtcggagcccaggcagggtccgcggctctgctaaacccggaagctgcacacgccgtgccgttaacccactgccaggtgcaaagtggaagggggcaagaagtcaagggtggcctgccggaggtgggcgcgcagggcaaggagaaacgaagggcgaacccgaggcctcgccgccttccgcggtgtagcccgtcagcatctgatcctggacggcgcgcacaggtgaacacaccttgctgtgccgagaccatgccgagagagacaaggggcgaggaaaacgcagggaactgggggtggggccggtaactgcgcttcagaggctacacaggagagtggaagaagagctggggttgcccggactaggcagaggtcatcttcctcgcccccggagcgaacagacccgtgtggcgggaggaagagcaacgggaagaggtccgcgctgcggcgaagcctggcgggagcgcctccgcgccgcagaagtgcattcgggccccgctacggcccaagggcacccctctctccccgcttttctgcggccgcttcggaggtagggcgggggaaccactcacctccggcctccgcttcgccagcacccaggccgtctccagctccaaacacgtcaatggctcacgcagcaggaccttaagtagcgcgcatcccaacttgctgcccccgctccccggcggcagcccgcccaatcggcgcgcgccgccgccagactgacagccgcgcggggccctgggccgcaggggcggtcgggcctcgccccgcccccgcctggcgaaaggagggccgaggcgggaggagtgggcggggcggtgagcgcgaccccgccccctcttcccccgccccaccgcgccccccagccgcggcccgtctcttaacacttcggcttgacgggcggcgtcgcggcccaatgggcgggccaactcccgccagcggcggctccgagtggccagctctcgggcggagcgcgcgcggggggcgggcgcagcggcgggcggggtttgggggcgggccgacgggaggcgggggcggtggccgaacaggcagggggaggcagcggtgggcgcgacgtcggcggcggcggcggcggcggcggcggcagctgcaagttgggctgcaggggcagcgcatacactacaatggctgctggaaagaggcgtaaggaaacaatttccaggcccgccgcgtccagcccgaaatatgagaaaaaaattattagaaattccgcgggcggtgtagaggcggcggacgggccggagggaggatgttaaagccccgcggtgagttctccgggggtccggggcggcggcgaggcgtttag

SEQ ID NO: 40490 - DNA, 2300 bp, Homo sapien
aatcaaaagaattttggaaatgattcattttttattcaaatataactacatttaacaatcaaggtcatgtggcttagaaacctgagcttggttttagactcagacagacagttcattgtcggcagccattaaaacaatgttcttgacccaagaccagatgaagagaagggacaaaagcaatgttttcaagtacacattaaatttcattcaataatagtatgtcttcataaaactaccatgaataaaacaaacgattctaaaaggcagtgggcataaggagggctgcttcacagtctaccccagtcaccacattgaataatcgtattgtgtttatatcataaagtgaagttctagtctcatcccagtgttgagttcacctgatgaaccctgacccttttccctgcccaactcatcctgcaaatagaaatcttacttctaagggaatccatttgtctttcttcccattactgtggttcaaaaactgatactacagctgcagaaggcaacccaatatttaaggattttaatcacagaatcctgtaactaagactttctttaaagaaagacaaccagttcttttttatgtcatttatttagaaaaacccatttgcccctagtgaatgtactaaccttatttaaacaaagataagtgagggaagtaagaagtgatttgaggaatgagcctgggatctgaggcccaccacacattccttaccttcaacttacctttccagtcttctcccaccactgctccacccacctgagattctaggtggagcaatctacaggatactctctgaatgtggttccagcttctcttgcctcacactcttgctcataacatttcctttccttggaaacattgccttcatctcagccccattcagtctttacttgttcacatcatactcttctttcaaaacccagtggaaaagctcaatttctcatgtagccttacctaactccatgcctccagaaagtcatgcaaactcatgccacaacacagccaacagcaacataccatcggcatggcactgagagcaagcaaaaaggacacggggtgacttcactgtctccacttgaagaacttaaggtctgtctgggtgaggggtgtacagtcttaaatattacagcaatcatttattagaaatattcatctgcttctaagttatataaacacttttaatgcaaacattcaatagggcatatttcccactgctctcaagatttcatctctttctgctgccgtaggcataaatggcttcactccgttctttcttctctgcatcacgatagaattctgtgtacaggcattaaaataaaaaagaagaaaccaaaatcagtcatgtattaaatgctaatcatttgccagtaatttgctattgcttcctcaaaaaggaaattctaaaaaccaagttttttttaaaaaaaaaatcccaaaacctaattataggactccagataaacgtatttaaattagtaacaattaaatagaagtactcattcccacaggaatacattaacagcaattgggatgagaatatacaaagtacaaagtacaaaagtatatacagtctgtcaagaagagctactgaataatcgtgaaataaaaccaacagtgcatttagcaaagcgaaaggaaatagctggatcccgtggttcaaggaaacagaaattatataccaatgttttcagaaaaatggaccattttaacttccacggatggcagtgagagagaaaaaggcagaaattgaagcctaacatgatgtgttatgacaagggaagttaaacattctgttcatctccaggaaaactaaatttataacaaagacattgttttagggctgcagatacttaaatgtctaagaagacccacctatattaaaactgcattcttatagcttagaggacgacgaggcagctaacaagagctctcaaggatctttcacggctaaagtagcacacagaggataaagttgaaaagttaagtttccctacagccatcagtgggaaaggattgtgggtactgactaattttaggcttcagtttcaaccctaggagatgggttttaacacaaagctaaccaatctaggcttacccagaatctccggcagtttttgtacctcaagaagtaagtggaacacctttccctgtcatagttattttcatccagacatctggtggaagcatcagattccttacagatataagagaggcatcatttaaaaggtagaacaggatctaaaagcaaacaaacaaacaaacaaaagctgcttccccagaagcaaataatgtgaaa

SEQ ID NO: 40491 - DNA, 2300 bp, Homo sapien
acagacaatacctgggtatttggtaaagataaaggtggaattgggtcagaggatatatccctttctaattcctgaaacatatttgttttccagaaatgtataatttatacccccatatgaaggcattcttttaaaaaaaaaaaaaaactttcaatttgtaaggtaagaaatgttttcatatgcatctctttggccctaagatcaaagaaattgagaataagattaaaccactttttcatgtttattagcccatgacacatgttctatcataaactgtccattcctagcctttgccaaaagagaccctttagaaatcctttcccagctttcaggattatggtcagtcctctgagtttcccccacatcaagtcaaagcaggaccctttccaaccagcagggcctctggcttctttcactgcgtcaccggtgcatcccccactactcactctcatcttttgtactgatgagatttctaataatgctccaaatttctttcttgaggtccacccagggcttctgaccagaaagaagagtgacagcctaggattctgctcagagaagccatgaagataataggaggctggtgtttcccagtgtccactcatctgaactcttgcaggcaggctgcaccatcaagggcccattacccgacgtctctctgcctcagtccactctcactcccaggtgctgctcacctccacaccttagcccattctggaaggccctttgagtccaactgcctctcctcctgcaggctggttgtggactctggaagcacctggggtgcatgtctatcacccgcactgtttatgaatgtgtctcccttctccctcagaagccctgcaactccccagagccccacacagcagtgtcgctgtgtggtgacggctgacttgaaaccaatgcacgcacatttacccactcaccttcccacacgcctcgcatagcttgccacagctcgctgctgctgcctaaagcacacaagtaacctcttaagtactgaaaagacagtcgagggtttcccctgcacctacttttccaagcttatacgacctgcctgtttcttctgtcacccaaataaagaacaaatgtgcagttcctctactccagacctgtcccagatatgggctggctaaggctgctcttcgacccctcaccacttttcctgtcctactcagccccgggataaatttcaaacccaatctcatcatgactcccctgtttttctttcaacatcccataatttattgtcatttctgcccctcattgcccccagaaaagttcaccctctattattagcatctcagtggtgtcttgtgcttatattaactcttttattgatttattaatgaatgtttttcctttttttttttcttgacagatatatcatcgctgttatcttctggatcgctgtacacccagatgcttaatatatcttgattgggtcagagtgcctggtgactcttacgctagcctcatttctcggcttcatcttgttagaacaaatttcctcgccctcttctcctaggccgcctgccagcgccgcacccactcctgcccctgcctgcaccccacccacttcccggggacttccgagcccacgcccacatcctttacctccaaggggcaaggaagctgttgacttaagatcccatgtggagcagtcagatgctgctggagaactccccgcactgcaggctccagacacacgacctggcccctcccccgtggacgcctatactgctctgttctctaattccagggttcccaacctcggggttgtgccttgcaaatacctgggaaacttttctagctaatgcctaggcccctaccaacccagaaattcccatctaataatctagggtacagcctaggcattgaaacgttaagcctaagagaaatccggcgcacgcatccagtttccaccaccgaatttccagcttcttaaatctgcaggtccagaaaaagaagatgggagtgctgcccacgtcgcgcactggggctacggccggccccacccctggcgctgccgcggcagtcccgcccttggacttgggcggcgcctggataaacacctgaacctgactgagctccgagccagggactcgggtgcctggggcagacgaggccggcttctccgcggacagctagggagagtgtcctgggtaagttgccgaggtcgtcggtcctgggtgctggctcccggaggaggtcgcgctggcgggggtcgggcgaggccgccctttgggctggtttcacgctgggtcgctcgcaagggggcgcgggtcgccgagccgcgg

SEQ ID NO: 40492 - DNA, 2300 bp, Homo sapien
tttgctctggtttctggaaataggatccatctgcttaatgaagtcaaccctcactggtagctcctttcttttttctagcactaatgtgtttatttgcatttttatattttctcttttatttcaatggaattttggaagaaaataggatatgaatgcgtatgctcactgtgctatctggaatggaagcatctgtgtatgtgtggccacagaaacatttttattatgagataaagatatacacataatggaaaatttggaaaatacaaaaagatacaaagaaataaattcaaccaacattccactactatattacaaaaagtgttaagatgttgatgaactctcttccagtgtttctaatgcatgtacataaaattttcatagaaattagaatcatagcaaatatatttagtcttgtactgtgttttttaaactcatattctgtgaagtgtacttcatacccttgaaaaacatgattttataaagatggctgtagagtactccatcggcacatacttcttaggaattaaagatcaatttattttgattaatatacttgtttcctaaaaaggtactacttcacatgattcagtggagtggaaagtctctttcccatccctgactctcagtgacccagtttcccttcctgaaaggccacagacaatacctgggtatttggtaaagataaaggtggaattgggtcagaggatatatccctttctaattcctgaaacatatttgttttccagaaatgtataatttatacccccatatgaaggcattcttttaaaaaaaaaaaaaaactttcaatttgtaaggtaagaaatgttttcatatgcatctctttggccctaagatcaaagaaattgagaataagattaaaccactttttcatgtttattagcccatgacacatgttctatcataaactgtccattcctagcctttgccaaaagagaccctttagaaatcctttcccagctttcaggattatggtcagtcctctgagtttcccccacatcaagtcaaagcaggaccctttccaaccagcagggcctctggcttctttcactgcgtcaccggtgcatcccccactactcactctcatcttttgtactgatgagatttctaataatgctccaaatttctttcttgaggtccacccagggcttctgaccagaaagaagagtgacagcctaggattctgctcagagaagccatgaagataataggaggctggtgtttcccagtgtccactcatctgaactcttgcaggcaggctgcaccatcaagggcccattacccgacgtctctctgcctcagtccactctcactcccaggtgctgctcacctccacaccttagcccattctggaaggccctttgagtccaactgcctctcctcctgcaggctggttgtggactctggaagcacctggggtgcatgtctatcacccgcactgtttatgaatgtgtctcccttctccctcagaagccctgcaactccccagagccccacacagcagtgtcgctgtgtggtgacggctgacttgaaaccaatgcacgcacatttacccactcaccttcccacacgcctcgcatagcttgccacagctcgctgctgctgcctaaagcacacaagtaacctcttaagtactgaaaagacagtcgagggtttcccctgcacctacttttccaagcttatacgacctgcctgtttcttctgtcacccaaataaagaacaaatgtgcagttcctctactccagacctgtcccagatatgggctggctaaggctgctcttcgacccctcaccacttttcctgtcctactcagccccgggataaatttcaaacccaatctcatcatgactcccctgtttttctttcaacatcccataatttattgtcatttctgcccctcattgcccccagaaaagttcaccctctattattagcatctcagtggtgtcttgtgcttatattaactcttttattgatttattaatgaatgtttttcctttttttttttcttgacagatatatcatcgctgttatcttctggatcgctgtacacccagatgcttaatatatcttgattgggtcagagtgcctggtgactcttacgctagcctcatttctcggcttcatcttgttagaacaaatttcctcgccctcttctcctaggccgcctgccagcgccgcacccactcctgcccctgcctgcaccccacccacttcccggggacttccgagcccacgcccacatcctttacctccaaggggcaaggaagctgttgacttaa

SEQ ID NO: 40493 - DNA, 2300 bp, Homo sapien
ccgagccaaaatcccagaatgttgtaattctagcgagacagtcactaagtaaaccttttgtcattgagacaataacaaccctaaatgtagggtccaatgcaaatcagttattatgcaaaatgcctttctataagactatttttattgatggttgcttattatctatttttttcaagttgctaacactacacgtgccattccatcacctggattaaagtaatgataatagtaataagtgataacaacaagagcataaaaagcagtatggaaaattctggaaagagcagccttcctcttctcctcccccacaatcctgttacatgatgagaagagggtgagagagggagagaagtcaagatttgaggtgatacccagggaagagctagctgctacccagtgagctctgctcaagttcctcaacaatgcaaaaggaagattagtagcattttgggagcttggtgaatcaaatagattaagtatgaaaaaaacccatttgaataggcatgattaaaagtcagtcatattaattcgctaactcacataatttaagtaaatatgatactactttggggtcagtctgtgtgattagaaaaattagactagaatccatataacctttattcagatggcagagaaagctaggggagggggctgagcccctgacatgttgagcaggcaaagctcaaaatatgtgtgactgggcacagggaattatggggtcagaaagtggagtcttctatgtggcatgttttggatttttcttcctccttctgtgtctaaaattctttatccacaagatctatccttatatttgtagcactggctcaatttttaggcataggttaaaagctcatgactacaggagaaagaagaaagatgggtgaaggggattgtttctcctattgaagatgaaacatttttctcatagtttaaatatacaaccttcctatgtgtcttctctttaatgccaagttagcacaggtcaaagaaacaaacatttaacctgaaatatataccacagatatttggaaactgttccttggttttctccccatttcaaacatctacataaggtaaaatttcctcaattccaggtggaacccaaagcagcttggatgaatacattattctctatgagctttttaagtcaccataaaatttcaacaaatttcaaaagcaatgcaaaggaattgtcaggggagctggtaaaagtgaagctacctgagtctcgaggttggagattcagactcagtagagcaccagaggtgattcgacagcccatggggaaccatgatcagaatgaaagttattttgtcctcagctttttctttccccaaccccctgtagtgcagtgtatctttggactgttgtcacccattggacactggccacttctcttgttcctttctcatagccaaattaaactgttgttttagttactattacaaagggcagttgaaacagaagttgaattccagcatcactggctagtgagacagtttgaactctttcctgtctacggttatttcgccttcctctccccgtaccccttttccatccctttgctctctcctatttacaggtgagggtagggaatgagggacctgaggttaagagagctggggaacataaatctaaagaaaggcaccgaaatgtcactaacaaaaaattacattatttgtgggaaagatgggaagatgactgcgtgtggaggggcccttagctgggatatgttaggagttgtggtgacagccatcttccttctgacagcccaggagagaacccagtgctatccgaggtgctgaacagaggacttctcggggttcccgaattcccagggttaaaacaaacttggtttgtgcggcgacaccgctacccttaccggtccccagatagtcgcggatccccgaagctaagagccagggcaggacttcagtcagtgttccaggaacagctgagacacccaggtcaccacgggctcgcgccgctgcggctccgacccggtgcgaaccgccatacgcgccgcgcggtgggccggaggcagtccgcgtactgttgcggaaactctgtctcacaaggtgcgcaacactcgccgcgcgcaacactcaccaggaagttgatgtcggccgggcgcactaggcggtagctgcacgtcgcgcaatcctggctgcattcggcccgcacggtcgccaggagcccggggccgagcaacagcagccaagtgcaaagtgtcaggaaccgcgccatggactgcgaggagagagggacgcgtgcttcgagcctgcctgggcgcagaacgg

SEQ ID NO: 40494 - DNA, 2300 bp, Homo sapien
cgcaagcccagcctacgcaggagagcgctgccctctagcgactataatgggacatgcagcgcggccggagccccgcgggagcagcgccgctgcaggtcctagcgactgtagaaatcagccctttgcagagggcgcagagggcctggaaacctctgggaccttttcccaggaactgtttatggtttccccctaggtctaggagacatagatgcataggtggattggatacatcgatggtagctataaggtaagcagacaatggtcacagatggaaaggtggacggacggatgacggatggttagaagatgttttgagggcttgctatagtgccaggcacaaggctaagagatttcgtccactatttcatttgattctctccagaaccttatgaatggcatattacctctgttcctatttttcaaatagggaaactgaggcctcaggcaatgtaagcagcttgccgcttagcaatcttttgcagagccaggaagcgggaaagcgtgtcttaatggacagtaccagcctccacagtgtgccctcggccccctcccggtggagaagaggttccaagccccggcgtcccgggtagggtgtccctcatccctccctccccaccacactcctggcgcgctgacattacacccgccccggcacccccctctcactgatccaacacccccggacaccctggacagcgctctcaaggcagtaggtcttcgacttgggagccccggggagctggttaaacacggatcctctcccacagtggctgaaaagcgcgcagtcccggaacctgagggtttacctgcttctacgcttggccaagggtctctaactggaaaggtgaaaattctgtcctgagattttaagattcccagaaactttcaatcgttcagttcctgtaaccattaattgagcgcctaaactgcgcaccttgacgctgttagatgctgcagtaaggaactcggagtcaagtgtgggggacaggttggtcaataaatgacgacattccggacggctgtgcttggtgcccacggggacccgcgagggggcccagggaggaggcgggaaaggggcaggttcaccggcccgctgggtctccagcacattccagaagtctaagccagtccatctatccttccaaacgcccccacctcgcttccctccctggagcccgcatcccacggtgcaatttcagtgactttatgcggagaaacttgatcctatctcactctccccaaacttcctaactgccttgggtttgtcacctggccgtgtggggagccaccgagcgccccctgtggcccccacccgagctcggcggggggagcggcgcgcgggtgctgggggaccgacccctcccgcgaaggcgtcggcgcggggctggcgtagggcctgcgtcagctgcagcccgccggcgattggggcgcgcgcgcctccttcggtttggggctaattataaagtggctccagcagccgttaagccccgggacggcgaggcaggcgctcagagccccgcagcctggcccgtgaccccgcagagacgctgaggaccgcgacggtgaggccctacgtccgccagcacacccgggcccgcttctccccgacgcccgccctcctcacacttgccttcttctcttccctctagagtcgtgtctgaacccggcttttccaattggcctgctccatccgaacagcgtcaacgtgagtgaatttgcccgaagcttgtctttgctgagcgggtttggggacgtctgcccgccctctttcccttcacatttcattgcatgggttccccaacagcgttccctggttcttctttgtgaccccagtcaatgtcctgcctcccccggctcccgctctctcgcccctggtctgcggcgttctctccggaatcttgccctgggccgcggacgcccaggaaaagagccgggtgccccaggcagcctcgcgttgggggcgaccgcgccatcccgggaaccgcgaggcgatctgagtcgcctccacgtctacctaaaagctgtcggccgggagggcggggccccagaaaggagcattcctgcgggcttttgctcgacgatcccctgctgaggctgtcgcggcgagggtcctgccgagggaccccgttctgcgcccaggcaggctcgaagcacgcgtccctctctcctcgcagtccatggcgcggttcctgacactttgcacttggctgctgttgctcggccccgggctcctggcgaccgtgcgggccgaatgcagccaggattgcgcgacgtgcagctaccgcctagtgcgcccggcc

SEQ ID NO: 40495 - DNA, 2300 bp, Homo sapien
aagctggatacccacatgcaaaagaataaaactggatccttatcttccatcatacacaaacctcaaatcaaaatggattaaagacttaaacctaagaccagaatctgtaaaactacctagaagaaatcagaagggcaaagctctatgatactggtctgggcaatgatttttgggaatgaccaagaaagcacaggcaataaaaaagcaaaactagacaaacaggatcacatcaaactaaaaagattcagcaaagtaaaggaaacaatcaacataattaagaaacaacctatagaatgggagaaaatatttgaaaaccatgtatcagataaagggttaacattgaaaatacgtaagaaacacaaacaactcaatagcaagaaaacaacctgatttttaagtgggcaaaggatgagaaaagacatttcttaacataagagatacaaatgatcaatgagtacatgagaaatgcttaacatcactaatcatcagagaaatgtacattaaaaccacaatgagataccctctcacacctgttagaatggttgtatcaaaaagatgaatgataacaagtgttggtgaggatgtagtggaaagggaaccattgtatacagttggtaggaatgtaaattcatacagccagcatggaaaactatacagaagttactgaaaaaaatagaaatagaactaccatgtgatccagcaatccctttactgggtatctatccaaaaaaattaaaatcagtgtatcaaagagacacccgcactcctatgttcaatgcagtattattcacaatagctaaaatgtgaaatcaacctaagtatctctcaacagatgaatgaatagagaaaatgtggcatatatacacaatggattattatttaaccttaaaaagagggaaatcctgtcacttgtgacaacatggatgagcctggaggacattatgccaactgaaatcagccaggacagaaacacaaatactgcatgacctcacttatgtgtggaatctaagaaagtctaactccaagaagtagagaatagaatggtgcttaccagggacagggatgggagagttaggaggatgttggtcaaagaatataaaatatctgttagacaggagtagtaaattcaagagagctattatacaacatggtaatataactaacaacaatgtattgtattcttaaaatttttaaacaaaaatatataacaattaaaaaaaaattgtgcctcttggtaatactttgccttgcttatgtgtcccttgcctacagttaacacatatcatttttattctcgagctcagcaatacatttggtgtttatagagtggtggcttcaggcttcagacacttcctggttaccgtcttcatcaggatcattcataactgaggtgacatttcactttcagtgtgcttcagtttcctccaagagcacatctctgaggcatagccacccccaaattcagaaaggcaaaaagcccgggaggcatggggtagctaatcccagttgagagatgacagcagccttccctctggccccagcactgccttatccgaggctctttcctccctctccctccttgttctcagccctgtgctttgctcaggatgacaatggtaaactccacaatgatcccgtaagcccaaccaatagtccctcttttgctctactacttcagctctgacatttgtaaatttcctgtcccctgctccagttcctctttcattttctgtgttcagaactctcccaactcctctgtgctaccaacaaaataaaaacaacaaaaccatcctcaaaaatctgtcattctcttggaccagcattacccttagtgttttggatgatgaaagcacaactgttcgttgcacctctttttgtttttattttatttttaattggcaaataaaagttgtatgtgtttatggtggggaagtcggggaaaggggagatgtttgccaaagagtgcaaagtttcagttacatgggaggaatcagttctggtggtttattgcaaaacatggtgactatagttaatgtactatgtatttcaaaacatctaaaagaaaagattttaagtgttctcactacaaagcaatgataaatatttgagatgctgaactttttaatacttacattcttaagtttttcaaggcttttctaataagtctggcattcctgcccttggcagtgtgagatggaagatgatgtcgcaagggtggccgagaagcagctgggctgagctgctaaaagcacagagaccggggccagactcctcagcctgaaatcctgcttccactaagt

SEQ ID NO: 40496 - DNA, 2300 bp, Homo sapien
gatttatacatccatgtgacatacatcaaaaagtgggatatatgtgctggtaatgccatcttaaaagccctaggggggcatatgactaccctgagtggtgaagaaatcagttacactggttcagacggcattgaagggggactccttgctagcatcagaatgaaccaccaggccctggtcagaaaactcccagatctagaaaagacaggacataaatgagcataactgattacagggtacagttcttcacagctgaaatggttagcctgagatgctggaagcttcaaaggattggtggagactatgcatggttaaggccatcccgaactttttaaagtatttatgaagcatcagagacttattttccctgtaatagaatgcaaaatcagggaaaatgggttgctttgtgtctcaagtattgtctttatttttgagactattttcatacagttgtcatacacaaggcgcatatatatatttgtgaattaaaatctgtagctgagtctacattgttatgagtcaccattttcacacaacatcatgaatcttcactgttagtactttcatatagaattcggttgaaggaaagattgatttttgtgtagatgtttaatataactttacaactatatctcattgaaaataaagtcattggggatttttacctctaatttggatggaaagcacaagaagccacacattcattaatatgcaacaaatgttgtatttatgttactgaatatttctatggattaaaatagaaaaagtttaattgattttttcttttaaattttaataacaggttcaccagctggtagaaaatagagacacatgatgatttgcattgtaataatttctgtgtgtatgtgtgtgtgttgttttgtttttataaagaaaagtgtgtttgtacccatgagttcagcatttctgccatcttgctattttcattttccctgtggaagatgcatggttgcatccttttccttctgaccaacacttagtctttaactttgtaaggttcggtttaaggtttcagggttagcactatagttttggttcattttctcattaacgataaaatatgctgtaaggcactataagaatataaatgattctattacaattgaaagttacttgacattacatgaattgaactgcctttcattatcttcagacactttgttttagtatttttttttaatttgctaggtttgtatatagaagatcctttcattatcaagaatgagtatggttgcttttgccatggttgcttttactattaataaatgtatctagcctacccaaactctgtagtaacttttgagattctcttaatttcccctcagattaaaatagagaaggttgaaggtactttttgatgaaatttttttctagtctggttagaaaaaaaaagttgtgacatattcattgtgttaccgtaactagaaccttgctttgtgaactgtctttcattgggatgtatggtttctctcaatgtgaaatctggaaacttcatgtaaactacccatgccgttatttcatgtgactccagtgcccttgtattccataacatgctgatgagagggatttctcacggtttctttctttgctaaattttttaaccataaagcagcttaccctttattttcccatcttggaagtaaaattgaccaaagaatgtacgttctagcctggtggaatgtgcatactttaggtttgtatgttacattgtccaaagccctttactttcttattagtaaactgaatctaatatgacacaaatgttttcacccaatctcttgcaactggtcaaattcgagaaggtgttgggccttagcagtaggccttttcagtgaaaattcattcaaagttttggtaggtggaacacttgatatttaaataggacttgaaaattttgaaaagagtatcagagacctcatttttttcctttgcaataagctgaagaaactttctttttcaggagagatggcaaaggtatatgctgttgccagagtcctgtggtataagcatctgtttttattatagtatgtcaaagttagggaaatgggactggcaagtaaaaaatggaatttaatttcaatgttttatgggaactctgatttaatgggaagcaaactagttcatattagcaggaattattttattttttcgagacagagtttcactctcgttggccaggctggagtgcaatggcgtgatctcggctcaccgcaacctctgcttcccgggttcaagcgattctcctgcctcagcctcccaagtagctgggattacaggca

SEQ ID NO: 40497 - DNA, 2300 bp, Homo sapien
ctcccaaagtgctgggattacaggcatgagccaccgcgcccggcctaaaagttaacacatttaattgtttatttcaaaatcttggggaaaacaattttaagaatagatgtagattatgttttaggaacagactgtccacaatcttaatatgaaagccatataattttcatgtgtatgtatgcattgtttgaagcttctgacaacttgatactaaaaaaacaagtttctttcaatcaaattcctataaaggttttctgacatcactgtaccacatgtaattaatcaaatgttttcttattgtcataacttcttttgtcgattaaatgttatctgttaatacccattctctatgatcaattatcacttgagtgctagaacgcctcttggagctacaatctttcaagtgactccttctttccacataccttggcattttctccctcaagtcttaaatcccttttttgcagtagaaatgctccagagcttttagtatttccctcagtggtatactgtgtatactgccacactgaatgtgaccctatattattctccaatatccttggaaaatattattccgtttattttgagaaatctcagacttcccaatgatgcttttaatattgacatgattactatccaactcatctttttgctgctgtcatagtgtaggttggggtggttctgtttaacttaaacctttatatttcaaccctgatgtttatctttatccctgggatgggttttgagaattactctgtgacattcacttttagatatttgaaagcagctttgcttcattgcaaagttactctcaaaagctgacaagaaaggcaatgctagttctttaagttctggtgctgtcaatactctagggattgttctttcactgatttgtatttgtacttgattttgtgctgtgattctggcagggaaatcacagtgcttttgttgtatgtgtataatctggcagtgcttttgttgtatgtgtataatcacatgcaaattctagggatgccctgaactctaagtaagcggtaaaggtcaggctctacatgacttgcttagcaatggatgtttagaagtttggtatacttgcagtttttcaggtggttaattctaaagtccacttaaaaccaatgctgttttgctatgaacagtaaaacaggctacattttaagttgatttatatagatattttaacatttaagaacaatactatacatcttaatattcacttttaagattaaagataaactcatgaatacttataaagtattcactatcattctagctaagatcggtgttatagtagaaggtagttatttctgtcaaaatacttcgagagcctacgctgactcaaagattacatgttctagactgaccatctccggataacctctattttaagtggactctgtcaagcaattcctcttcttaagctctggtaggagagccaggctcgagtacccttggaaatgagagaagcctggtttgctttctttcattatgaaaaacccggatcaaggcatgtttttcagctgcttcgaggatggtttattctggcaggtggaggagagaaactctatacacacataagcatttagggcacgacaaagatgtcaacagaatgaagagccaagtacaattcttcccctcaccgcccagttccccgtcctgccgggaagagcgcggagaagcgacttaaaggtacaggctgtctacacccccgctggctaaaaaagcttgcaaatcaatcttttaaaatggtttattgtgttttcctccattcctcaataatctgagagtgatgagaagactagactgttactgtgggtttattacagccagccatagtcgtacaatgggatatttaatttaaacacccacaaggcactcagcacagcacactgtcctgtgcggattgctgctcgccacttccaggaataccttcccacccagaccaaggaaggcagctcagtccagcgcctcctgtcccgccccgccccgccccaaggggaggtgcccagctctccccgcccctcgccctcgccctcgccccgccccgtcgcgtaacccggatacacacccacgctcccctttcacctcgcggccgtaggctaacgtggaagtcggaccagccggccggcggaagaacctagagcgcgctgcctggcgagtcaggcgcgcggggcggcgttggtggtcttcgcggcgcaactcggcctttcctgggagggagtgatggggcgcaccggggccggggagcgggcgccagtgtagcccgcgcggcgcctggcccg

SEQ ID NO: 40498 - DNA, 2300 bp, Homo sapien
cccattcactccagcacctcctctcttctccagtgggtgatcatgacaagatgggaatggggttagcggggacacagtaaggccaatgcttcccggagccctaaggccaaattggggacgctgtattcaggatcctaggaaagtcaagagagcccaagcacgttggagaaggtccttgtaagctgccagaaacattctcaaaaggggacccgggaaacaaatgccatgcggtttgaaaggttgttaggtctgttaaacacttccacaacggacgctttaccagaggccggtcgggagtatttgcttacgtgtcatctctgactgctttcacgctgctacggcgtgaacggagaccatgatacctatgagtgttttccacctggccctttacaggaagagctagccaatccctgcatcgtgccatgaccagaatgccctaatactgactgctcatcttctgactcccctgctcaaaagcttcccatgaatctctgcaggaaacctggttggctccctatccacagccattgtttcttctcactggagaaacacaattttatttggatctttatcatttccccagatccaaaagtagaaataatcattctaagctcatcataggaatcatcacgtattcacaaacctcattcgttagaacatgccagtaaaggaaaaatataactcacttacttaaattgttatttattcaaaaatattttttaaaattgtaggcaacaaaattcaataaaggattgtttttaagacaataggttttgagattataaactatctacaaactaaattcttaactgtgaatactaaactattcaaagaaaaaattttatataaatacaaacatatttacacacacatgcacagccacacagacataccattgacacactaaatttcttttttgtgatcgaaactcaataatcttatgctagcaccaccaagagtagcttagtattaaaagtcttacctggattgctgttttgaggacttttaggtatctttatttcagattccaaacattcttggtaaatgctatgtatcaaatatgtgataaattgaggtattatttcaacactgatattaaaaatttacccaatgtgttaaattcctagggtatttcagagtgtcggggtaatatctgaaatctacttattccacagacttctaacttattagctctatgcacttattaagcttcaaattgaagaaagcaaagtgaaatactcatgaattcagggcagtatagctcaggaaattaactagagttagcttgacgtaatggaaaatgtcctgatctcctaagtttgagttctgtaaccaacacctatttgttcttcagcaagttgcttctcttaggctcaatgtcttcttctaatatgaggtttttagtgccttatttcagtaggttattacaaagttttaacaacataacatttgaaaaactgttcaaagaaacagtaatggaatacttaatcttgaagcttatagctgaaactattttaaaatcccaaataaaacccaatgtgttggccagatgcagtgactcgcctgtgataccagcactttgggaggctgagacaggaggatcacttgggctcaatacttcaagaccagcctgcgcaacagggagaccctgtaactacaaaaaataaaagataaattataaaaaaccaatgtgtgtttcttcataggatctaatattcaaatgttgtagttttcagaaacttattaagtcctacttttggttattagatgttccatttttttgtggcttgtgattcagggcatctaggctatttgataatttgtaataaaatttatttataaattaattcatcaaattagataacatgattatcccctatttctgagctcatcaatcacacccagggcagaaaactaatagatttcaagacctggcttggactcctacttttctttactgatctcctcgaactctgaaccaacaaatctttgttacagtgatgcttaaaccccagttattttaaaatattttcactcagggagcttgagcttccaaatatgaaaaactgacccctacatatgacaatgttaaaacaaatgtgtggggaaaagcaagagagatcagattgttactgtgtctgtgtagaaagaagtagacataggagactccattttgttatgtactaagaaaaattcttctgccttgagattctgtgacctcacccccaacctcgtgctctctgaaacatgtgctgtgtcaaactcagagttaaatggattaagggcggtgcaagatgtgc

SEQ ID NO: 40499 - DNA, 2300 bp, Homo sapien
acgtccgcggcggtggatccatagaggcctgcacgcagcaacctgagctcttgcctcgtcagagggagtttgactgaggggcatgaggcggagggagagaaaccgaggccactttaagcgcgggtctcccagatggtaccggagcagggaggcgaggcaataaggtacacttagaagaatgccatgtgtgcaactggagaggtcaggggcatgcattgttcgacctttgaggagaggtctcacacattggcaggcttccaggagccaggggttgcgtcgcttcctcccctgagccttttcacagggcgggccatccacatgggcagtggcctgtcggcacttgggagggaccgcaggcgcagcgtgtttcctggagtcgtaggggtgctcacttgaggcgtgcctccctcggcagttggatgttgcccagggagggtcataggacagtgaaacccggccggtttgcctgtgaatgcgcaagcgtgaaccccctcgcccaccccctgagatctcggggagctgctcatcgccaccttccagggtttctgtctgtctgggggactgcccgtccccggcggggctcccagcaatcatctgttatttgagagaggcagtttaatggtggcctgacccatcacctcctggtcacctgaggtgtcaggtggggtgtgggcgtggccctctcctgcgctgctcctgtctgaccagccgcccacggtaacacagaaacatctggcaggatggagtggttggcggaagacacatctgacgagatcgaatgttttgcagaagagccatgtgaccagatccctggtttggcagaggagacatgcgagaagacggaacgttttggccgaggagacatctggcagggtggaacggagggaacaggtgtggcagagagaatatctgagaagctcgcaggattcccagaaggagcactgggagtagattgcctgttttcccgaaggaacggcaagttccaaaggtcagaggctcatgtgaactctgtcgggttcaggagcagctcagtgttgctggtggcaagagtgtggtacgagagtggttgggcgtggtttgaatatctagaaaaggcgagctgagggtagatttttgaacagtccggagtaggaggggtagagacatattctatgggccacagccacattctcaggatgctcgtggctgtaaatagtagatgacccaagtaagagcggctgaagccataggcaccagaattgtgttggcatcgtcgtgtcacgctcacgttttcccttccagctgtgctgtgggcagtgtttacttcatgtctgctttgctggcgggccaagtagcaacagctgcagtcggcgtgttctctgaaggcagcgtgtgaagggtggaggggttgctcttcttcccaggtgtcttttgaagaggcagtcaagtcagcagctcacagtggccttctggtaacatcgtatgggctgggttacagcacatgccgactgctaagccagtcactggggaaaaccatgtgattgctgtgatgagcttagaatgatcattcctccttcaggagctggggtgggttgagggaacgataaagatcctgataaccttgcatttctccagcgagaaagaagaaattccgtggatagggagccagccaggtttcctgcagagattcacgggaagcttttgagcaggggagtcagaagatgagcggtgagtattaggactttccagtcacggcgtgacgcagggtttggccagttcttcctgtaaaggggcaggtgggaaacgcttgtaggcccggtggtctctgtcatgtctgctgaagcctgctgtagcagtgtggaagcagtcagagatgacacgtaagcaaatggtcctgactggcctctggtaaagcgtcgattccagaagcatttaacagacctaataacctttcaaaccgcacagggtttctttcccaggtcctgtttcaggaaagtttttggcggcttacaaggactgtgtccatcatgcttgggctctcttatctttcccaggatcctgaatagggcatcccccgttcatccatagggctctgggatgtcttggtcttactgtttccctgccaaacccggtgccatctcgtcatgatcacccactggagaagagaggaggtgctggagtgaaccggttcggggaagccccattcatccctggggtcccagaatgaaccgttgttaccatgtgcccctgttcttgccttcctccctgctctaatggacgtgtgttagcctgggatcagccttggtctgggtgctatcgtt

SEQ ID NO: 40500 - DNA, 2300 bp, Homo sapien
gctcagctgcagctgccacctgcacatggtgcgctccagccgcagtggcaacccacggccctgccggcgccaccagcagcgcggaccccagggccagactctgtgaagacgcccagtttaggcggcccccactcccgcatctgcaggagtgagggaacctgctctcagcccaaccccggggcttcagagtgcccagcgcccacgactccgtgctctgggcgcgaatcaagaaaaagtggacccttgggtgggagggcggtgcactcggagaccctgaggccctctggggccagccctgtcatcctttgccttaggctcagctgtagctgtcacctgcacatagtgcgctgtagtagtggaggcaactgccgaccctgctgccaccaccagcacggggaccccgcggccaggcagccacgcgccgaagcccgcagcacagctgcagcagggtggccgttcagccccttcctggcggctgcatagtacccagcgcccgcgaccacgcgctcagggcgcgagctatggaagagcgagccctagggcgggagggtggtgcacttggcgactctcaggaggtctgggaccagccctgccagcttccaccgtgggctcagctattgctgccatctgcacatgccccacggcagcacctgtggcaaatcccgaccttgcccgccccactagcagcgcggtccccaaggtcagacaccgccactgtgcctgatttgggtagtctgttccgcagctgcaggagggcgggaaccggccctcatccccatcgcgatggctgcaaagagtccagcgccctgggcccagagctctggactggggccaaggaagagcggatcccacggtgtgagggcagtgaacttggcgaaactcaggacgtctgggctagccctgccagcctccgccctgaacttatgtgcagttaccacctgcacatggcacggggccgcgggagtggcaacccccaactcggccagcagccaccagcagcatagactccaggaccatacgctgccatgacccctcggttaggcagtcagccccgtagccgcaggagggcgggaatcggcgctcagccaaaccccatggctgcacaatgcccacggcctgcgagtccgcgcttctgcaccggccaaagaagagcaggtactgcggcagcagcggtggcaacccccgaccctgcctgtcaggcggtcggcccaatagctgcaggagggcgggaaccgactgctgagccccaacccagcggctgagcagtgcccaacgctcgtgaccccatgcttggggcgcgggccaagaaagagccgaacttattgtgggagggctgagcactcggcctccttcaggccatctgggaccagccatgccagacaccgccgtggggtcatttgcagcagccacctgcacatggcggacagccgcaaagctggcaacccctgaccttgcaggcatcaccagctgcagggaccgcagggccagatgccttctaggcgcctaattcaggcggtcggcctcgcagctgcagcagggctagaactggcgttcagccccattcctgtggctgctcaaagcccagcacccgcgacctagcaatatgggcggggggccaagaaagagcggaccctaggttggggcgctgagcactcggcgaccctcaggccatctgggtccattcctgccagcctctgccatgggttcagctgcagccgccacctgaatatggcggggtcagcaactggggcaacccgggctatttccgtgactactatcgcggtccacagggccagacgctgccgtggcgcctaagtcacgcagttgcaaccgcagctgcaggagggtggaaaccagtgcccagtcccatcctggtggctgcagagtgcccagctccagggacccccaactttgggcgcgggtcgagcaggagcagtggactggggctgcgcagtcacctggggcctggggcagaccgcaccatgagctcagtttggtggtcggcgcctcagctgcagctgccacctgcatgctgtgcccacgagagcgcgactcagggcggtttctggccacgcgcagtttgtggccacgcgcggggccattaccttccgaggtgccagtgcgcgctggggcccaatggctctgctccgtatatttcttctccgagagtttggagacgtccctctcagagaagctggagggtccctgtctgaggtctgggccagaccgtcttgctttatggtgctggtcagggtgggggctgggcggcgggaagggcgagggctagttgtggcgtctct

SEQ ID NO: 40501 - DNA, 2300 bp, Homo sapien
attaaaaaaagaaagaaacagatgatgactgatacacatgttggttggtagagctttcaggttcctctttccatgtagttgaggaaattcctcagcccattgtcacctcggatctcatgctgcaactccatccttagctcaacacccactggcccctgctttcaaactgttgctggtcttcaggtagagcaggttctgcagatcaaaggacatttttcactaaaaatctctgacatcagagacagagactacatatctataatgaacctttccgaaacctgtccattagaaagccacttctcagtacagaggtggaccttggagactttccaggattttcacatccatctgcgaagaggaaaagaactcctgaaactgggctgacttcataaccagtttaatttcacacatctcacctttctggagctgccttgtttttcccttcttgcatcactgcagagaaaattcatggacttcctaaaggtgagactctgacccattagtaagaaagtcttgctttatgttaagttggctttctctggagatctcctaactgctttataaacattctttcacacctccaagcaggtaggtggtaactcatattcaattgttactttagtttcagtgatccccaggagcactgatcccctgaccagatgccatggaggctgctaagtcaggtagctggctgggctgtggaacaatgggcaaaaccacagctcagccccattgtctttggctgcagattacccagcaacagggccgctctccagatgcaggtcaaggaggagtggaccctgaggcctggcagcaggcacacttagctacctggaggccttctgagggaagccccatatccggagccagtacctgagctacagccgctacgtgcaggttgcgcactgatagaagtggccctgcagcctccaacttcccgcttcccctctgggccccagcagcgcagactcccatgtcagatgccactgccgcgcctaagtcaggtggtccgccttgcagcagcacgagggcgggaaaaggccactcagcctcatactggcagctgcacagtgcccagaacccaccacctcgtgccaaggaagagcacaccctagaatgggaggttgggcacaccctagaatgggaggagcagcagagcctagaatgggaggctggtgtcctcggggaccctaaggctgtctgggaccagccctgccagcctccaccaaggactctgctgcagctgtcacctgcacatagggctcggtaacagagatggcaacccccaacactgccggccccaccagcagtgaaaaatacaaggccagaggctaccagggcttctaattcaggcggttggcaggacagctgcaagaagggaacccgcagctgcaggaagagaacctggcggccacacagttcccagcgcccacgacccggggctcagggcgcgggagaaagaggagctgaccgtagggtgggagggaggtgcactcggcgaccctcaggctttctgggaccaggcctcccagcctccgcctgggctcagctgcagctgccacctgcacatggcgcgcggcagcacagatggcaatccaataccctgcccgcaccaccagccctggaccccagggagagacattgccacttcaactaattcaggtggtccgtgccgcagctgtcggaggatgggaaccggtgctcagccccatcccagtggctgcacagtgcccaggacccacgacgcggagctctcggagctggccaagattccatatcggaccctatggtgaaagggccatgcagtcggtgacattcaggacgtctgggaccagcccagtcgatctcccccatgggctcagttgcagctgccacctgcacaaggcaccctgcagcagcggtggcaaccgctgccctgcccactgccaccaccaatgaggatcccagggtcggccgcataattcacccggtgggccctgcagcttcaggagagtgagaaaggtccactcagccccatcccggttgctgcatattgcccagctcccaggacctcacactctgtgcgtgggacaaaaaaagagtggaacctggggttggagggatgtacactaagcgaccctcagctgtgtgggaccagccctgccaacttccatcgtgggctcagctgcagctgccacctgcacacggtgcggggaagcagtgatggcaacctttcaccgtgcccacgccaccagcagcgtgaaacccagggccagacgtcaccaggagcctaattcaggcgattggcctggcagctacag

SEQ ID NO: 40502 - DNA, 2300 bp, Homo sapien
gtgtgtgtgtgtgtgtgtgtttctgtgtgtgtgtgtgttgtgaaaggaaaataaatctcaggacccccgaaatcactaagccaaagggaaaagctaagctaggaactgagtcaggcaaacctgcctcccattttagtcctaaataagatagctacaaaatatatttttttaaagctacattcttccatcacgatttgcccacaaggaaattctttgtagatcgcaagatctttacctgaaaacagttctgttgaatttcaccctggcaatgtgaattgatagtttatgttcacaggtgtgggacaaaggacagacagaactcaaagtcatccctctgctcatctgagacaaatgcatatctaattgcttcctctgccttattgcttttgtaaagatgcagattcactgagtcagattaaggcataagtgactattattctatcccctcccacatgtaaattgtgtattcagggaaaggctgatcaaagacctcaaagaatgcaaccttaggtttcctgtccacctatgacctagaaggccccacttggagttgtcttgtctttctgcacagaaccaatgtacatctgataatattggttgatatctcatgcccccctcaaatgtaggaaaacaagctgtgcgcccactacctagggcatctgtggtcaggacctcctgaggctgtgttatgggcacacatttaaccttggcaaaaaacaaaaaacaaaaaaacctttccaaattgattgagacctctctcatacttttggatttattgtttgtgtgtgtgtgtgtgtgtgtgtgtgtgtgtgtgtgtgtgtggtgtgtggtttggttctatgaaattttatcgtgtgtagatttgtgtaatcaccgcagcaatcatttatcagtattatttcttggtctatatgttcagtaatggtttcttaggggcatctttaatagatacttagggccatggatttggatgagatttcccaggagaaggtgcagagagagaaaaggagaaggcctggagtggaatgccagacagaagaggggctttgctgtgacccctggtagaagcttcctggagaagggtctatgagggtaaaagaccccagagccatgtggtctggggcctgccctgctctgctcttggcagcctctgacctgggcttttcagacaggtctattttcaaatgctctgctcataggtcccataagccgttatccctaaaatgccaacatttaggtgcctgagctacacttcctagaaagcagtttgcctctgggatgctttgtcacttcatatgtactaaatttgggctggaaaaatggagctatagttgtagaatatatcagtcagcaagatttaacaactgtagctaaagtttgctgaagggaccctgaagttaccactgcaaatctaaacactggggttttttgcaccccccagcacagggcctggcacattagcgacactccgttgtggagctcggttgtttgtggtcaaattctacaatcttggcatcttttttctaacaagagagcagagcgcatagctgcgtggaatctcctgcgagcctcagcaagttaactcccaggaaagtagggaggacgcttttcctcaagggagagagaggttccctacttcttgagtaaaaatttcatgctccacatatttttgttcagtcatgtgagcatgaattcttcagtctgtgaattctaaagttggaggattctgacaatcacagccccagacacacacagtggaaaacgctcccgtccttcgccgggcagaggcagctcctgaaataaagcagcagcgccccctggtggcagacctcagtgctgcatcccgtggaaggccaataccctccttaagagaggtcctgcttggttaacccactctcagtcctggccacttcccaaaggcacctggcttaccagcctcagaggctcctagctccattctctcagcctgcccagagagagcctggtgtgactgaaggaagtgtggacctgggagataggaaccgactgacactgctccctgatgtttgtgcttcagggactgtgctggctgatgggaaccctgcatctgagagcgcgtgcgctgggcgggaggcagagccaaaaccgtaacagccagagctagagactccggcctggggttctggctctgtcccgtatcagctaggaaacccagggcaagctacttaaactctcagaggctcagctttttcatgagcaaacaggaaaacagggctaatgattagtccttggcttaaaatacataccgcgtgtgaaattgc

SEQ ID NO: 40503 - DNA, 2300 bp, Homo sapien
tcagaagttctgagacagtaaattctccaagtggcaggtcaacagcaaatgtatggatcattctgccctttcaaactctcacatcaatactagtacgtaagactctgcagttccatgtagaattgaaattaccaaatcatgcagaataaactaacaggcatcttctgcatgagtcaattaagaccttaaatgagaacatagtatcttctttctagcctcagtgattacatttttaattaccacatattttcaggcacgtcatggaatttgacgactgatagatttggtaaattcttcctggctgctatggctgggaattaaattccagttcacataattgtgtttgttgttgttggtccattatggatatctactacaactgataaactctctaatctcagctccacttggcacaatgtggacaagtccaaaaaagagagacttgttattgtcaaaagcaatgagtttaagtgaaacctgtgactagtcacaaagaccatatcctttgagagaatagtcagagactttcaacagcaatgttatattagtctagctcaattaccattctctagcttagtgacagaaataataaatttcagaatctcaagatattactaccccaggacagtagttccttgaattccttattcactgtgctttgatttcattttgtgtagctagtgcttataaataagtgatttcaatatgtgagatttcatctgacctatccaaatatctggggaaaaaaaataaaaagaagtccgtaagattctgtttgtttcataattgctgtggtctcctctttgatatttcaagcagattatttgcaaacaagtagaaatctccatgctaaatagtcatccaaacaaggtttaaagtcactggcaggaactccattgcaaaacagttcctaaaaataaaaaaaaaaaaagcccagatagaataaaataagaaattttcaccattatatattggtagcattaggaaacatggcagaaaaataattttttaaaattttcttgtaagaacaatgttaatatttggtattagatgttgcgttgttcactaagaatctaatataaaataaaccatatatgatcaattatagatgtttaggttataaatgcacatatatttatcatccataattgattcatgtattactataatattccagcatctgctaaatttaggcttattatttcaccttcttttttttaacagctttggaaataacgtttatgtttcctatgtgcaacgtatactggtgttttcttttttaaaaaaactatttccacaggcttttggggaagaggtggtatttgattgtgtgagtaagttctttagtggtgattactgagattttggtgcacccatcacccaagtagggtacactgtacctaatgtgtagtcttttatccctcacctgcctcccaccctttcccccactccccaaaatccattgtatcattcatatgcctttgcatcctcatagcttagctcccacttatgagtgaaaacatacggcgtttggttttccattcctgattactttcactttcattatatactgtatctcaatggtttatcatctatataaatggactttaaaatgtgcagctttattctacaggttgaacatctctcatttgaaaatctgaaatcctaattgctccagaatccatagtattttgagtgtgtacgtgatactcaaaggaaatgctcactgaaacaggtcggattttggattttcagattaaggatgtttaactggtaagtataatgcaaatatttcaaaatctgaaaaaacatctgaaatctgaaacacttctggtcccaagcatttaggataagggatattcaggctgtatcctattttgacataaactaatatgtttttctggcattttaaagatagcaacacatctttcaccatccttccattgaagaatggatcagtttttcatccccttgaatctaggctgaactgtgactgttttgttgtatatattacagaggaaatgatgccacaccagttcaggatttaccctttaaaaggattggcagctttcagctcagtctcttggagccctgagctgtcttagaagaaggctgactattcctatgggagagaccacacagaaactaaaaatacttggaagaggagaggggctcagttgagcccaaccttccagccaactccagcagggtggcaagtatgagagtgaggatatcttggagcctcagcaacctgtgctatccaatagctatcagccacatgtgactactgagcactcaaa

SEQ ID NO: 40504 - DNA, 2300 bp, Homo sapien
tcaaagaaatttacgctattttaaatgaggctataatgcatgttttttcccctgccaggaatgttccactcacttggctggcttcattgtgtcattcagatctcaactcaaagatcacttattgaagtggcttccttgagctccccattttaaatagcaagattctcccccatagagaatttatcatatcaatttatattgttgccttcattgcatttatcaaagtctagcaggttttcatttaatgaagttcaactggaatatgatgggggtttctttttcctaacgcctatttttctgagaagattatttcataccattcacaaagacaaggctgttcacatctagactctgcctagacttagagtgggcgctgctggtcccatattcaacttccttccttcttcttttcagggggttgcagtctccaagctagaaagagagctattggtgaaagtgaagagatcaaatagggaggccgttgtttgttctctgaatggtacagactcattttctgtcgcagttggcaggaagtgagggagaaaatgctgaatttattcttgttgcaagaatgcaacatttattcttgccaatagctttgctccatttcttctgaccaaatagcttcaggctagcaattgcaattctaattcaatgccactgattttttaatactttatggaaaattatctcagagtgttgtctcacttttgaaataggttgacagttttggtctttttgttttattcttagcatcattataggttttttagaaagaggttaatgggaatcacttaggagctactacctagacaatatttaaaccacttcaacctccccactcgtaacccttggatttcttttacatgtgctgttggctacttaagggtatgttatttgttgctcctataaacacatgaggatgactttatacttataccaattaaacttcactctgtagattgggttttattgttccaacttgttgagatctccttagaacctgtttctgtcaggattttttgtttgtttgttttgttcaattatatgcaactttatattttctgagatgcaataggctatgtttctgattaaaaattttaaagcgttatttaagtcatttctttgtatatcttttagaaaattttaactgaaagataactttcatgcacacatatacttagatatatttaattaaaatgctatttaatacatatttacattttatatatttaattaaagtataacttaatatacgaatcttaaatgtaggcttgctgaattataaagtgaaccctcatgtaacaaccacctattaaagaaacatcaaattgctagaacctcttaagctccccctttgctgtctcccaattacaaatgctagtttgttccccaaaagtaactattatcctgactctaaaaccatagattagttttccctgttattaaacattacataagtgaaattatagggtacacattcttttgtatttggcttcttttagttaatgatgtgtttgtgagtttcacctttgtggttgcacatatcagtagctaatttatactcatgctctttactattacattgtatgaatacaccacaactgacttatccattctactgttgaggacatttgtttatccccattatttagctcttataaatgttattgctatgaacattcttatgcatgcagttttttgatgtatatctagaaacagaattgctgggtcttagaatacgagtgtgctaaattttagtagacattgacaaagtacatgtaaaaattaatactcttacctactgtgtatccaaagtccagtcatcttataacctgttcgcttttttgttttttgttttctaatttcagccattctgatgattgtgtagtggtaacttaatgtagttttaatttacatttctctgatttttgtgtacttactgattgatatggtttggctgtgtccccacccaaacctcaacttgaattgtatctcccagaattcccacgtgttgtgggagggacccaatgggaggtaattgaatcatgggggcaggtctttcctgtgctattctcacgacaatgaataagtctcatgagatctgattggtttatccggagtttctgcctttgctacttcctcattttctcttgctgccaccaagttaaggaagtgcctttctcctcctgccatgattctgaggccgctccagccacgtggaactgtaagtctaattaaacctctttttcttcccagtctggggtatgtctttatcagcagtgtgaaaatggactaac

SEQ ID NO: 40505 - DNA, 2300 bp, Homo sapien
tccttggcatatactttattatcaagaagtagtttaggcaatagaaaagctaaaacttggtcggcgcagtggctcacgtctgtaatcccagaactttgggcgcctgaggcaggtggatcacctgaggtcacgagttccaggctagcctggccaacatggcaaaatcccgtctctactaaaaatacaaaaattagctgggcgtggtggcccgtgcctataatcttagctactcgggaggctgaggcaggagaattgctgaacccaggaggtggaggttgcagtgagtggagatcatgccactgcactccagcctgggtgacagagtgagactctgtcatcaaaaaaaaaaaaaaaaaaaaaaagaaagaaagctaaaactcattggttacattcctgattttcaaagcatcgatcataggggaatcttttatgattttataagtgagtcttctggaaagaaacttaactcaaaatggcataagcaagaaagacaatttattggtgcattacttcagaagttcaggatttgactggttttagaggtgactgtcttcggatggccattgatgtcatcagggcacttttctgtctccattgctcagtttggctttttttctggttttgttttattctccagtaagttgactccagctgctgcacgcatatatgatatggtcccaggagctgccctgtcagtcagggaaaggaccctcctcctttgttctcagacgatattctaattggctggcctgggtcatatccctcacaatgtcaggaagctctgtgggctagtcacacccaatgggagggggaaattcctaaaaggaagggattggggcaaagaagtggggaaaaaaagtatacttgagagggagagaagttggttccatttgctatgggaatgatgaaaaatagtttatttctattgttatatgacttttggagttaatggagaccacaacgtaatctgtgataacaaggaatgtattagtatgccaaaggaaagttccatttaaatcccagtatcatgtcactttcttaaaatggtaatctttaaatagaaaaaaaatatattattataaagtctgagttttatttagttggcaacttcttaactattatgaaacaatagattcattgaattgaagcacaattcaaatataaacgatctttctgagaaaatgagatgagtgaaatcgtattgttaatgtaccagagattaaaaagaaatccttgctcaatattttctagaagaaacaattattttgtgagtccatatcccattcaaattcattttgataaagatggattttatcttttagacttcccaatagcaaaattaaattacaatgtgtttagtcttcctaaaacaaatcctctcctgaaacaaccaagttattaagcaaatctaagcagaaagtattctcaaatactatattaggcgattaataatgacgcaccccaaagcatttcattttaaaacatcagctggcccacatttcagaggtagtacatcatgcttgatatttttcgttatttactattttctccaaacatttttttgaagtcttaaaaatgccttcagaaattaagctaggacgctccatctgagtatatgaaagttagtaaacagaaaatgtcaagcaccaagacgtttggatggctggactaccaggtggggttatctcattcagggcacaggctctacgtctccagtgctgagcgatctgcactggggtggcagtccgagatccagcggtatcaccgggtgggagcagggtgggggtgcttgcgtgcggacataggtgggagtgggggatagggaggaaatggaggcgccgaccgagtggaatggggggtgggtcagggatggggtgggatgggcatcagtagcggggtggagatgttgagagagaggcagggcttggagtggaggtgcgagaagggtggggacccggaaggtggggtgggggcgggatggaggcggggcggggtgtacgaggggcgtgtacactggctcagggacacgcgctctcggccacagcaactggctccaagttccctccctcactctccggcgaagcctgcctgagccctcccactcggtgcagaccgaaccatcgcggccgccgccagccgggcccttcgcggccgcgcgtcctgggcccgttccgccagccccgtctgctctctacccgcggccccgcggcggcgaccgtgaacactcggcggcccctacagcccgctctcggcccttcgtccctcgcgggccccgactctccctccttgcagtcccccgg

SEQ ID NO: 40506 - DNA, 2300 bp, Homo sapien
taagttgaagctggcatagcttcatatcctgtttttatattttttattgacttccatacatgtaaaatatcatttctcttctccctgctaactcttctcagaatacacattaggttgttgcatggaaatatgttaatagatttacatcatatgggaattgaagttttctttaacgtatccagaatttagaaatgcatcttagataaatcaccaaacactttgattgctattatactcttaagtaatttagtgattacttttggaactgtttgcattggcaggaattgtcatttcctcttggctgcatgtagactcctgaaagtcatttctcttctatgtgctcattaaagacaagcttgtaaaatttgagactgtattgtaacacttggatttcaccttgaaggcatctgcttttgttacacatttaattggatttaaattttaactcttgacaaatttggagggggagtccactttaggggtcacctgtttgcacaagatcttgccaccagtaaaatctctacctggaaacagatcttgcatttctactcctataggtcctgcggtcaggaaatcctcctaattctgtcatgtgttaccctagcctggcttccacacttactttttcaaaccctgtaaaatgcgcaggctttacttttcccaccctccggaccccaccccactgcctaagctggatggtagtcccttagagcagctctctgacccagcggacctccaggacaggaaacaattctcctctgttgctctcttaactctaactctggtttgttttttccctgtctcctttgctacccccctgtaagtagctattctccaacgctctggccttcatcagcttgcctgtccatgccacctgctttccatcggtgggcccgtccattgccacacagtgtccaccaatcccccacactcacagccacaccaacctcctgtgcctttgcacagcgcggagaatggcactgctgctccccctgctgcctgggatgtgcttccccagagagcccatggcttgttccctcactgcctgcaggatttcactctaatggagccacctcagtgggacattctgagatagtatttactgtatttgtttatttctttagtttcccctttctggaatataaactccatgagatcagaggtttttcgtcttaacccccagagccttgaatagtacttggtccatagaaagtgttcagccagtacctgttgaatgaatgagagaattaatgattcccggcatgggggtgctacagtgcagatgaacggtgctcctggggcaatcaagagctttgccccagccagccggagtggtgctgcggagcccctcaccttgaatgggcctcagtttctggttctgtagatggggagtgtgtaccagggactctgaggcccctttaaactcttatcactctttcacagccctggaagtaagatatgatgccacataaaatgttatttatgcaactcatcacaacttgatactatattcttctttctgcataattgctatccatggttaaatgtctgttttaaaaaagaaacaatagttgaagtaaacaaaatagtttccaaatgaagttgtaaaaactaatgcattttggtgtactgacatgtttgctgtcttttttttttaatatattgatcagtttctatttttattatttttgagacagagtctcgctctgtcacccaggctggagtgcagtgacatgatctcagctcacggaaacctccacctcccaggttcaagtgattcttgtgcctcagcctcccgagtagcaccaccacactgaactaatttttgcttttttttttttttgtgtgtgtgtgtgtgtgtgttttgtagatacagggtttcatcatgttgggcaggctggtttccaactgctgccctcaagtgatctgcccccctcggcctcccaaagtgctgggatgacaagcgtgagccactgcacccagcctgtattgactaatttttaaaagaattaccactgtctgttgctaaatgtatttaatagcttgcctatttttatcaaataaaaaggcaataacaatcttttcttcctttgatttttagcaatttcctgctgcagagagcattttaagaaaggacagcattcctgtgacctctgcctaccatccataaaatactcattcccctctcaggtaagcatattgctttgctttgatccattctgagaaggagatattgattctctacgaaaacctgtgtcattattgcactaagacaaagaagctgaggtttcagatatttt

SEQ ID NO: 40507 - DNA, 2300 bp, Homo sapien
agaaatactaatggctgggttccacctcaaagattcagattgtcgcctgggcattgggaactttaaaggtcttcaggtgatgctaagggttgaaaacctttgccttcaagagccatcagctgcccaggtcctggctctgccaagaaggatctgtgtatctctgccctgcaaaagccagggagctccctcactgaactgttgtccacctgacaagtaagaacccgtgtgtcgtggtaatttttttttttgaggcagagtctcactctgtcacccaggctggagtgcagtggtatgatctcgtctcactgcaacctccgcctcctgggttcaagcgattgtcctgccttagcctcttgagtagctgggactacaggcacgtgccaccatgcctggctaatttttctatttttattttagtagagacggggttttgccatgttggccaggctggtctcaaactcctgacctctggtgatctagccacctcagcctcctgaagtgttgggattacagacgtgagccactgtgcccggctgtgtcatggtaattctaaattgcatttctcttatgacaaatgcagttgaaaatattatatgtctaagaccattcacacttgctttttttgtgagctatttcttatttgggtcattatactgttgttctttctctttataaattaaagaaattagctccttgtggaaggaagttttgtttgttcatttttgtttcatttgtcattgtcttaactttttttgtgacatttttctctatgagaaatagttttatgttatcaagtttatcaaaaagtcctggcttctgagttgtgcatcagactgagaaagatcctccttagtctgagattattagtatttttttaattttatgacttcttctagaattttaaaggtttcatttttgacatttaaacttttactcatcgaaaactgtgacatttattttggcatcagttgtgtggtatggatccaactttattattttttctagatgctcaaacaccataaactgaattattaatcctctcattgatttgaaatgctactttcatcatatactaaattactatatataccagttccatactattttttattatattagagaacaatgatagaaatttgtaatatgttataataaattatcccttattactcttgctttttagaaatgttctggtttttatgctttatagttttcattattaattttagaaccagcttttctagttccagaacaatcctattgtatttttatgggggattatgttgaattcacttaattagaactgagcacacattccatcatggcccacctcccgctgacttctaccctcatttctgttttcccccttttactgaaaattccagctctaacagtatccttgaagttctacagacacatcatgttccatctttatctttcaatcagctgagaggcttggagataggctcacggaaccctcccctctcccagcacccttcccaggtcgatgcctaccctcccactatcagcttagatcttctcagaagacttggcaattccccaagggcaccctaacacattgtgttgcaactgcccgttcactggtgtgagagaggaaggtcaaaatgtgcgtgctcagactcaggggcaaaaaaatcatcaagtgaaactttttctgtaaaggacctcatgttattttaaaattctcatgtcacctacaaatgggtggaagaaaacccttgaaattgctatcccgtgtatcacttttaatttaaaaaatcttgaaaatatttagtcaattcaaagctccatctcccttcagagctgcctctggtctctcagggttcttctcttcaggatctccttgtctcccacaaggcatctgagcctaggagcactttgtggttgtagcaaaaggggtctctgttctgaatcctgcctcttctgggcatcctttgttgtcccttgaggtgtggctggtgccttctgcatggtttgagccttgtgctggggctcagtgctgactgtgcccacacaatgccctttgtgaggtttctgctctctgtggccttcttgtcccaacctcaggcctccacatgtgacttctgcacctcatctctgggatggtttcagtgggtcctagattgctttctgtgctccctgggacagttggtggcactctgtgagactactctgaggtacccttacaagctactcttaattttccccgctgttctgcttgttggacatggcatcatgctgcaatgttaacagtctttcaaagctaagcgcggaggatg

SEQ ID NO: 40508 - DNA, 2300 bp, Homo sapien
gtataagtgggtgtcctcacaggaaaataaacacccgaagaagtggctaggcctaagtgcttatatactaggttgaacaaagagaggcaatcgtggaagagtatctaggaagatactggttagtttaacaatatctgtacagatgtttctcggcctcaactccccttctctggtgatgagtatctttcctcttggtatagggagggcatctatcacatggtagtttcttttcctgctttcaggaagaaaaggtcagagtgctcttcttgcacctgctgtttatcaaatgcttttttttgttttttgttttttgtttttaagacggagtctctctgtgacacccaggctgaagtgcaatggtgcatctctgctcactgcaacctctgcttcccgggttcaagcaattcacctgtctcagcctcccaagtagctgggactacaggcacgcgccaccacgcccagctaatttttgtatttttagtagagacaggatttcaccacgttggccaggctggtctgaaactcctgacctcaagtgatccgtctgcctcggcctcccaaagagttgggattacaggcgtcagccacgacgcccagcctcaaatgcctttatacatcaaaacgatcagtatgccaaagctcgggcggcaagctgtcgactccagcacctagcatggtgcacacagcagataccaacggagtatttcccctcacatggctcacatttcctttgtaaccctcccaagcaaagctctactgcaagctgcatcttacccgtttacatgtctcttttccctactagactgagtttcataatgactgggactatttctttttacctttgcatcccttgggcataaaagtgcctaggaggccaggcgcagtggctcacgcctgtaatcccagcactttgggaggccgaggtgggcagatcatgaggtcaggagatcaagaccatcctggccaacatggtgaaaccccgtctttactaaaaatacaaaagttagccgggcatggcggcacgcacctgtagtccaagctactcgggaggctgaggcaggagaattgcttgaacccgggaggtggaggctgcagtgagccgaggtcgcgccactgcactccagcttgggcgacagagcgaggctccgtctcaaaaacaaaaagtgcctaggataagaagaccagagtctaaatcaatttcagttgaatgacgagggcttgatagtctcgagatctgctttttttcttttttgagacggatcctccctgtgtcgccaggctggagtgcagtggcgcgatctcggctcactgcaacctccgactccctgattcaagcgattctcctgcctcagtctccccagtagctcggactacaggcacgctccgccacgcccagctaatttttgtgtatatatatatatatatatgtgtatatatatgtatatatatgtgtatatatatatgtgtgtgtatatatgtgtatatatatatgtgtgtgtatatatatatatatatatatatatatatatatttttttttttagtagagaaggggtttcaccatgttggccaggatggtctcgatcacctcgtccgcctcggcctcccaaagtgctgggactacaggcgtgagccacaggcccggcagagttctgcttttagcaaattattccaagcactttttacggtgtttttcactctcagtgctaattcacgctgtggtgacgatgtaccatccaatccttgataggaaagatcagagaatctgaccaagactagatggagaggttgcaatttttcatcagatgaaaaatccagaggatgttttcattgttgagctaaatgaatctgcaagtctatgctgccctctagggcggcctacagtgcctttaggcgagtagcaggagcaacacaaaacttaacagaggtttccctgcggagaaactccctttaagaaaaaaggagaaaccaaaaaggtgggccagcaccggaagcgggggcgcgggttcgggtagcggggacgcgcacgcaccttgcgcgtcttcgcccctcctgcggttgccaggcaaccggccccggaagttgcggcaggtgcgtccgcagcgggcgccgctagccagcggaagatggcggagggcggaggccctgagcccggcgagcaggagaggaggtcttccgggccgcggcctccgagcgcgcgggatttgcaggtgaggcgaggagccgggggagggagcgcggcggtggacgcgggctggtgacggcgcgggctggtgcgagttggaggccacctctggcctc

SEQ ID NO: 40509 - DNA, 2300 bp, Homo sapien
tctacatcacttgggaggcctcacaatcatgatggaaggagaaaggcacatctcacatggcagcagacaagaaaagagcttgtgcagggaaactcctctttttaaaaccatcagatctcatgaaatttattcattatcatgacaatagcacaggaaagaactgcacccataattcagtcacctcctaccaggttcctcccacaacacgtgagaattcaagatgagatttggatggggacacagccaaaccatgtcacactaccatgcctgacttcctttccatttttgtatatttgcttgttcttcatttgcccgagaagtaactctaaagggctgtattatttggatattagattggcattttatctgactgggatatcttgctgtgattgtccatgtataagatcagcttttctataagccatatttttaaaaagatatattaattttttaaaaatccacctgtctaaataaatgcacaaagccccccaaaaacctagattctaagaaaaatctatgtactgccatacaatgattgatattaatatttatggtgataaattacacacaaaaaatgtgtgatctctgtttaaacaggcaaaaacaaaaaacacatgaaataaatctatggcatctatagccaaaactggaaacaacccacatatccatcaataggaaatcagttaaataaattatagtacatttatccaatggaagattaagcacatattcaatataattatttatacacacatatagatacacacatgtataaatatagagaatactgtgggtgtatgtgtgtgtgtgtttatatacatatatatacacacacagtactgttgcctaccttcttttgtcttaattctgtgaactctcattcactctgcttcagtaggatacatccttctttttggttcttagactcaccaagttgatccttgactcaagacattgcatttgctgcttcctcttcctggaatatccttccttctgatattcacatgagtagtctcttcttgtcattcagatctcaaatgtcacaatttcagagagcccatctctgatcatcatatctaaagttgtcctcattcccccatagctttctataccatgttttatttttttcataacatgtattttattactcctttctccattggaatagaatctccattagattaggaaatctgcctatcttattaatgcctgcaactggaatacttttgaagagttcttggcacgtaataaatactcaactaatatttttgtgtacacagaaataaagtttggaagaacagatgccaaattgttactagtggttacttctgagtaaaggagtagcatggtaggtaaattattaatagatgttcactttccaccaagatatgttttagttagtcttaacttacttgaaatgaaatttattactttaataattagaaacattgataaacattttagtcacaagaatgatagataaaattttgatgcttccaataagttatatttatctagaggatgcacttatgtagaatactctcttgaggatgttaggtgagtaacatgttactatatgtagtaaaatatctatgattttataaaagcactgaaacatgaagcagcagaaatgtttttcccagttctctttcctctgaacttgatcaccgtctctctggcaaagcacctaaattaattcttctttaaaagttaacaagaccaaattataagcttgatgaataactcattcttatctttctttaaatgattatagtttatgtatttattagctatgcccatcttaaacaggtttatttgttctttttacacataccaaactcttaatattagctgttgtccccaggtccgaatgttaagtcaacatatatttgagagaccttcaacttatcaagtattgcaggtctctgattgctttggaaccacttctgatacctgtggacttagttcaaggccagttactaccacttttttttttctaatagaatgaacaaatggctaattgtttgctttgtcaaccaagctcaagttaatggatctggatactatgtatataaaaagcctagcttgagtctcttttcagtggcatccttccctttctaatcagagattttcttcctcagagattttggcctagatttgcaaaatgatgaccacatctttgatttgggggattgctatagcagcatgctgttgtctatggcttattcttggaattaggagaaggtaagtaatgttttatctttaaattgctctttgattcatccatttaatttttttac

SEQ ID NO: 40510 - DNA, 2300 bp, Homo sapien
ttgaagttgagtacttctatggactgaatgtttgtgtccccccaaaatttatatgttgaggcttaatctccaatgtgatggtatttagacccaaggtttttgagagataattagctcatgagagttgagccctcgtaatgaaatgaatgccctaataagaatagatagaagagaatgtgctttatctgtcttgttttctgccatgtggggatacaatgggaagaatgccatctgcacactcaaaagtgagccctcaccagatttccagatgtgccagcaacttgattttgggcttctcagacttcagagatgtgagaaataaatttctgtcgtttaagccacccaatctatggcaatttgttacaacagcctgaactaaggtactgttaggcctctgactttgttcctctcctttggtattggtttggctcttctggtctttcatttttccatataaacttgagaatcagttaatatccacaaaataacttgctgggattttgattgatttgatttgattgtatcaaatctatagattaagttgggcagaactgacagttaaatatcaagtactcctatccatgaaaatggaatatctttaaatttatttagatctcctttgaactttgtagtttttctcattggaagttttttttatttagaattttgtagtttttcttgtataaaccttttacatattttgttagatttatacctaaatatttcattttattttggtgctaatgtcagtggttattgtttttaatttcaaataccaattgtttattgatggtatataagaaaacaacagaccatgtatgcaggtcgactattcctagtacagaaatccaaaatatgaactactctaaaatatgaaactttttgagtgctgacatgaggaccaagggaaatgttcactggaacattttgagttttggagtagggatggtaaacccataagtatataatgcaaatattacaaaagcaaaaaaaaaaaaaatccaaaattggaaacatttctggtcccaagcattttggcttagaatgagcctgttttaaacttgctcatgcaaacttgctataattgcttttcattctgtttttttaggcgaggagtgtcaattttttccggattttctatgttagataaccatctcatctgaaagcaaaaagttttatttcttccttcccaatctaccttgtaattatttttaaatgtccatttcatcagcctaactataaccttactgagagcaaagttttcatctttagttgtcacctcttttacactcagatttttattagttttgccatatattaaattattctggcactaatttagctagaaataaactgcttgtaaatgctattttgtcaaggactctacagtattccgtggtaactatgattactcttgggtaaactgtgcctcagtttctttgtctgtaatgggatgtctttatagactgatgtgaagaccaaataagactatacattaagttcgtagagctatggctggcacaaaatcagccctcaagaaatgatcgttatgtttttttactgggaagcaattacttttgcgcagcaccacacctaactctcaatagcgaaggaatattagcttaggcggacagagtaatacgccccccacccccaacatccaaatttccaacagaaaaataaagcaggagttgagaaggggtcgtgagaggaacgtttctgagcctatagtggagaggtacagcaagcggagagtgagactagggcagcaagtggtggaagtcgaaggcatcccaagagggaacaggggctcccgagacctctttgaattggaggcgacgagaaccaagcgaccgtgagctgcgatgcacacagtagtgagtgggtggcacggggcccgcgggcacgaacagccgaagagcggagaagactgggagcataaccgctgggcagcgggcagcggacagcgggcggcatgaaccgccccactttgccggatacctggagctgcaggaacgacccacacccaggcctctttacccctaccgccccgttaccttggggacgggatcacccgacccggcgccgtgcgactgcgcgggctgaaggcgggggcggtgccatgacgcgcctcgggggcggtcctcgggcgcgcaccgctctcttacactcgggcctcagaagtccgtgccagtgaccggaggcggcggcggcgagcggttccttgtgggctaggtgagaggccaagggggcaaggagggacgccggtgccaggtcccgggcgcggggacttggggcag

SEQ ID NO: 40511 - DNA, 2300 bp, Homo sapien
ttctgcttttgcaggaatatcaaagtacatcaacctaacaataagagaaataaatgctcatttcaagtttcttttctggggtcaatatttggtagctctggaaatctaaaatcccttaattagcatgagagccgccagtgaacttacaatgaacaggttgaggcctctcatgggtaacctctgaaacaacccctcttcaagttttccaagaaaagtaacaattttcctgggtatgctggagccaatgacgaatccaatccatttgctaatttgtgtttattgatgcaaggggataaacccggaaaaatctgggcagaaatggtaaatttggggcttaataaagttgccttaaaatattcctctgtttcagaatgaattctaagatttataaaagagactccttgattccagtgcatacctgatgtgagacagattcctgtcattcaaatgcatattctatgcattgaatggagtatgcccatcagcccaggttgcaaagccatggggcagagcactaaacaatttgggcactcagcaagttataattcaaataaatataaaacacatggcgccaactttttcagatgactgatgctcaggaacagttgatgcctcctgactggatagataaatgttttggttgccaagagctagagttctctctgaacactgccagcctatcacgttgttgtctaatcaatgaattctaacaaagcagcatatacatggaaatgcaagtacaggtttcaaggtttgtgtgacaccacggagctgtatgagctagccaaattgaacacaaattacttcatcgaaataacagccagaaccaaggaaaaaacgtttccctgtatatcaaaaaggccaatatgagtattggcacgaatgactcatatcatacaacatgatgccaattcaagtgtgtcaaagttctcacaatttaaatatgaatgttcacccactcaatacagagcaccaacaagtcttaatattgttggtactaaacaaagaatctccactcaagctctttccacaagaaaaatgcattacaaattcagtcagaagggcatccccaagtgtgagttacatagttagggctcagttatttaataaacaaccctttctgtgactaaaacctaatcacatcaccaaaaacatttttgaaagccatatctgagatacgttttctgtgtatcgtatcttcttctctacagtagaaaaatgacatttcgtactgtggacacactggttagaccaacattacagattagagaaagatgaatgtctggatcaaaggggtcgagtcaacccttataaaacaagtgtagacaaatcttgaagtctgcacttgtattcccacgtgtaacctgctttgctggtattcactgatgagacaacgtgacaggctagcagcactggaagatctgtggctctcacaatcaaaacagtgtgtctgtaaaatgattcagcccccctttccttttggcatctgagctgcagaccgagcaagttgtttctgtcaccaaaaatgccctgggaactatacatagagccgaagtgagctttcttatgagacttcccttggggacaggtccagcatatctgaaagggaactgctgtgagaccattttagctcaagggatcccaaatccttactgggatgctggtgagaatgagtgctccgctgccgcaccgcgatttcgactgcaaagctttccaacacaaggtccactgcgcggggagcaagtgtttgggaggcaggaccttggctttcctcagaatcaggcctttccggcggcccccctcccagccttccagggcatggagctagtcctgtgtctaaaggagtcggcaggaaaaaggcgcggcaatgcgagtgggtggtcgccggcctgctcggtgccgcccggcgaccaactctgcggcgccggcgccgagtgcctggacccgattaaggggaaggattagaaagggggtgcccgccgggcagcgtactcaccctcccctgcgaacgcccgggctcgcgtgccgggatccacgcccggaccccgcgcggccttccgggtgagctgcccgcggccgccgggacctgcactgccggatagctcggcatgcctcggctccgcggtggaatctggcctggcccgtcatccagttcctgtccccggcaggctccggcccagaccaggcccccggcctctcaccccgacctcaggtttccgccacagcccccagcccaggccctggacacgcgtccggcccctgcctccgtgcccggcccccacgccgcctcccgtccctca

SEQ ID NO: 40512 - DNA, 2300 bp, Homo sapien
tgacccagttccatggtgggcaggcctatacaaatctatctcaaagtcctgggatgccgggaggtggaagaaagaggctgacaaataaagttccttgggaagaaacatttaatagcgactaaggaacagaagccatgtccatatctgtgtcttgggcagcaagatgagatggtggattgctgtgctattaacccccagactcaatgtttttttttttttttcttttgagataaggtctctctctctctgtattgcctaggttggggtgcagtggtacgatcatggctcacagaagcctcaaactcctggactcaagtgatcctcctgcctcagcctctccagtagctgggactataggtgtgtgccactgcacccaggtaatttttattttttattttttgtagagacagggtcttgctttgttgcccaggctggtctcgaactcctggcttcaagcaatcctcctgcctcagcctctccagtagctgggactataggtgtgtgccactgtacccaggtaatttttattttttattttttgtagagacagggtcttgctttgttgcccaggctggtctcgaactcctggcttcaaggaatcctccagcttcaacttccaaaagcattgggattaccggcatgagccatcactccagccccttagggcttatataccataggggaggggtggttcagaagggatgtgtaggacaattgaagtataataacatcaagttgtttgaattaaggacagaacatactgggtagatacctgctcttacacaaggaacaatagataaagtagaaatcttagaggccttcccagaactggggtcaatcagaagtcaacacggaggattagcttccaagatggagctgctttcgcctccacatccagcaattccactcttagattccaattccactcaacagaaatggaaacataggtccataaaaaaactgtacatgactgtgtacagcagccttattcacaatagccaaaatgtggaaacaactgaaatgtccatcaactgatgaatggataaacaaaatgcaacagaatatgctccagcaatctaaaggaacgaagtactgtacagatacatgctacaacatagatgaaccttgaaagcattacgctaaatgaaagaagccagacacaaaaggccacatattgtatggctccatttatatgaaatatccagaataggcaaacccatagagacaggaaattgattattgtttgctagggctggggtttggagggtagagttaggaagagtgacagctagagggtatgggtttcttttacatgtgatgaaaatgttctcaaattgtggtgattgttgaacatatctggaaatatactaaaaatcgctgaatggtatactttaaatggttgacttgtttggtatgtgagttatatcccaataaagctgttatataaaaaaaaatcatgcgagcaattatctcaacaatcaagagactgtgttaaagattctttgcttggccaaacttcagttaggcttctgaatcttctcccaggtccttgtgtgcacttccttgtaaatgcagtgttaggaagtaacactgccacggcagtttagcaagaatcccccaccctccatatgtgatcaaaattctttactcctacccttagtatctgaccccctggcctgccttcactgggactcctgttaggttggttcagccagaatttcccccagaattgatgtttcctcttagcagttttccgaacacctgctccttgctccttggctataaatctccacttattcctggtgtatttggaatagttacgactgagttgccttcacccctttaacttccgtctttttttttttttcacaatggaggacacaaaacgttgttatttcaagtctttgtggccaacagattggtggtttatgggccagcatccctttttatgcgtaaaatatttaaaacgcagcctgcaatggttggtaaagtggtgaaacgtttagtgtgtgaggtcggatcctggtctggccgctggccctggcgatcctctgaggcggcctgagtttggggcgcctcgtgtcaccgcgcgcccctcctccgggcctgagtcacggtgccgccggagtccccacgcgaggatgctgcggtgagcgcggccgggacgccgcgtcgggctctcggccgcccagcggcgccgcaggggaagccaggccggcagccgcgcgctccccagccggccaccaatcccgccctccccggctcctccggacctcctcggcaggcggcggcggggcctg

SEQ ID NO: 40513 - DNA, 2300 bp, Homo sapien
caaaatagttctgagcttttggttccggtaactacagtggaataagtctttactctccaagatagggctgcaactttattattttttattagcaatagtattggtgtcataagcaaaataaaacgtaacacaatacttgagtgtacagacaaaacagattttagactaaaagaactatgtcaccagcaaataatgaaacttcatcacacaaactcctatgcgcttgccaaagttccccgtacctttcaacttgcccgtagctgaagggctccctgtacaatggaagcccttctgccttgctcaagactggatgtccctcttttctaacttgcctaaacaccatcggcacacagcacagtcctttgagtgggtctcacactggacacagcatcgaggagcttctccacggggaagtgtgtgtgtgagagcctgcctgtgtgtcaacactgtccaagactcggagctgcgactcggtcgcgtggtgcggagtccagggctgagaaggcagcgcactaaatatctctgtatcaggtaaaaaagccgtttggtgatgactcgccaccaggcaaatgttgggagtcccaacgatttttcccgtggaatgcaccgagggtcgccatggatgtgcctgcaggggctgtgagtatcaggcagatttatcaccaagcgagagttgggcgtctaaaaggcccgcccagcgttttagagaactcaattctctctgccaacgttcatccaacgggactgcttagacacgtccaactagccctaggcgtgggcagtcgtgcccctgcgaccactctgggggaccggtccctgcgtgtcctccctctctgggatgagagagttcgagaagccgggagagtaaccccctccctcgtaccccctgactgtcctataggtggacccagccgaactccgcagcagcccaggccagcgccccacctccgggtcaccggcatgatccgcctctccccgggcccccgcggccctggcacccgaggtcagcgggccgtgggtacagctcagccgcggaccctgctccgcgagtgcgggagctttggacttgaacgcgacgtgctcgcccggctcccaacaaacttgcaatttccgcgcgcaccccttaaacaggaactgttccccaaaccttgacccagctaccccgctgtgctctggcccgcggacctgtgtccgaacccgggctcggctgccggaaccggtttgagaaaacaaaagagttgtggggcagttttccctgtggggggcaggggcgcctcccaggtccctgcaccccgactcccggctgctcccctggcaactaatccggagaagggaagtggtgccacgagcccccactgcccggggagggagggagagagaagggggaactgggaaataaactgaattctcttactctgcctccgttcctggaccccagacacacccccaaagtattccacggttttctcttattatttttttaaacgccccccggcaaacctaggcagggatccttagccgcgaacagcaggaaggaaagaatccgagcaaatcgtgtcactttccgcacaatcgcggtgtttggcaagcccccggagctactccacaatatttactacccaagcgcacgcaggctgcagcgggctgcgagccgagcgcgcccgggaccggcctccgccaagccggccccgccgcggcccggccaccgccgctcccctcccaggatcaagcagcaagaacacggtggaaacaaaagcagagcgttcaccttgttgcaatagtaggggtccaggcagggagaaggtcccagacagggagcgtcgggcgcagcggcgggctgggctggaggtggataaaatcttacgtccatttcactctcacatcaagcaactccttttctttttccttttttaaaaaaaagtgttcagcaaaacaagcttagacggaacagagtgaggtgtctgggctcaggagtaaaagaaacaccttccttccctcacatccgtttgtggtttgtttaagaagaagaggaaaaaaaaaaaaaagaggggggaaaagcgctcaactctcccccaagccgcggcgcgcacccgtcggcgccgagcgcgcagcctgctccaccgccgcctcttggtcccgccgccgccgctgccgccgccgccgggcaggtaacttcatgcgctcattgtcccccccgcccgcccccccatccccgcctcccgcgcccctcgcagcccggcacacgcgctcgggctctaggtactgggcgttttattggagattctgagttgttctgcttg

SEQ ID NO: 40514 - DNA, 2300 bp, Homo sapien
cgttcatccaacgggactgcttagacacgtccaactagccctaggcgtgggcagtcgtgcccctgcgaccactctgggggaccggtccctgcgtgtcctccctctctgggatgagagagttcgagaagccgggagagtaaccccctccctcgtaccccctgactgtcctataggtggacccagccgaactccgcagcagcccaggccagcgccccacctccgggtcaccggcatgatccgcctctccccgggcccccgcggccctggcacccgaggtcagcgggccgtgggtacagctcagccgcggaccctgctccgcgagtgcgggagctttggacttgaacgcgacgtgctcgcccggctcccaacaaacttgcaatttccgcgcgcaccccttaaacaggaactgttccccaaaccttgacccagctaccccgctgtgctctggcccgcggacctgtgtccgaacccgggctcggctgccggaaccggtttgagaaaacaaaagagttgtggggcagttttccctgtggggggcaggggcgcctcccaggtccctgcaccccgactcccggctgctcccctggcaactaatccggagaagggaagtggtgccacgagcccccactgcccggggagggagggagagagaagggggaactgggaaataaactgaattctcttactctgcctccgttcctggaccccagacacacccccaaagtattccacggttttctcttattatttttttaaacgccccccggcaaacctaggcagggatccttagccgcgaacagcaggaaggaaagaatccgagcaaatcgtgtcactttccgcacaatcgcggtgtttggcaagcccccggagctactccacaatatttactacccaagcgcacgcaggctgcagcgggctgcgagccgagcgcgcccgggaccggcctccgccaagccggccccgccgcggcccggccaccgccgctcccctcccaggatcaagcagcaagaacacggtggaaacaaaagcagagcgttcaccttgttgcaatagtaggggtccaggcagggagaaggtcccagacagggagcgtcgggcgcagcggcgggctgggctggaggtggataaaatcttacgtccatttcactctcacatcaagcaactccttttctttttccttttttaaaaaaaagtgttcagcaaaacaagcttagacggaacagagtgaggtgtctgggctcaggagtaaaagaaacaccttccttccctcacatccgtttgtggtttgtttaagaagaagaggaaaaaaaaaaaaaagaggggggaaaagcgctcaactctcccccaagccgcggcgcgcacccgtcggcgccgagcgcgcagcctgctccaccgccgcctcttggtcccgccgccgccgctgccgccgccgccgggcaggtaacttcatgcgctcattgtcccccccgcccgcccccccatccccgcctcccgcgcccctcgcagcccggcacacgcgctcgggctctaggtactgggcgttttattggagattctgagttgttctgcttgtagtttattttctccaccttggaggcccgggatgtggggggtgggggggtggggcggggatccagaagggacagggcgggaggggggcgagcgtcccgggccgggcggggtagggagcgcggccggacgcgggctcgtcaaggcccaatggctgctgttcggaaccagaggccggggaccggagaaaggaggagcggagaaggagaaggaggagagcacggcctggctgggacagaagcggtgggaccctgggaggcctccgctgtgcccgtgccgcgctcctcgggaccagcgcgtcgcacacaaaggggctgccgagccagagccaccagcggcctcagggcaccgtggggagcgcgcagctagggggcgctgtggcgcaccccgccccgcagccccgcccccggccctccccggccccaccccactcccaccgccctctccgcggccgtccccacccctatctccgcgacccccactcctcctcggctgttccccaaccctgtcactgtgctcccctccctactcccggcccgtagtggaggtgactttcctgcgcagcgccgcttctgagggcggagaacccacagggagtgcgacccctttgcacgctgtgagtgggcaactgtccgagggactcgagccgatcgaagggtgaggaccagctcgcctgggggtggacggcctggaaaagccgcccctctttggcttccctctgccgcctgcag

SEQ ID NO: 40515 - DNA, 2300 bp, Homo sapien
gatataataaatgttggattgaggatagaaatttaagctgagaaatgtttaatttggacctaaaaaagtttattattactattattattgtggaaggaaatacatacaggcacattttagtatctacaacagtatttgggaagctgttatgaaacacaaaacttcatttaaattttattataaagacctttattaggagaaaggacatattttctatttcttacttttattttgtgccttgaaggacttgtgaatgtatagaataattattttttcttactgcttcctctttgcaacccaacctccaccaagtcaatcgtgaaggtaggaagaaagctgtatttctgttacttttaaaaatgataacgagaagaaattaaaacaatggcttaagagaaagaggatgtaaggagtacaaagcaaaacttaacaaagagttagtaaaggaacttgcattgacaattcactcagccatgttaattttatcattaatactgtcttcatcatttttttttccaggtctctctgctcgtatttgcttggtgctccgaaatgcacgggaacagacagctatgggaaagctgcacagagcagttggcaatcaacatgtcctagaagggtgtgtggagtagcaaaacaagtggaacggatgaagaacttccaagctccttcgcagagttttgggccctagtgtgcagggctgctccctcatgagatggaggacaatgtcgcccacacctacttggacctctcaccaaggacactgccctcagagataaatctgttggacggcagccaagagaccccaaattgtctcaacctccaggacacggcaagttgcaagtttccgagttggggaggcaaagcgggaaaacatgtttggcgatttcctcctgccactcaccgaccggagaaatggggaggcggactccaggtctttcgtggactgccaagagccctatagggcgtccagctataaaaagagaagaatcccatgaaggacaacaagcaaactcatatgttatccctttagccggattgtgtgctgatgattgtttccctatttacacttcgaatcacccctgtggtcttttgtgagtccccaaggcagcctcagccttcgcaaaccgtccagtggggcacgaatctcggaggggtgcgggctgcaggcggcagagggaagccaaagaggggcggcttttccaggccgtccacccccaggcgagctggtcctcacccttcgatcggctcgagtccctcggacagttgcccactcacagcgtgcaaaggggtcgcactccctgtgggttctccgccctcagaagcggcgctgcgcaggaaagtcacctccactacgggccgggagtagggaggggagcacagtgacagggttggggaacagccgaggaggagtgggggtcgcggagataggggtggggacggccgcggagagggcggtgggagtggggtggggccggggagggccgggggcggggctgcggggcggggtgcgccacagcgccccctagctgcgcgctccccacggtgccctgaggccgctggtggctctggctcggcagcccctttgtgtgcgacgcgctggtcccgaggagcgcggcacgggcacagcggaggcctcccagggtcccaccgcttctgtcccagccaggccgtgctctcctccttctccttctccgctcctcctttctccggtccccggcctctggttccgaacagcagccattgggccttgacgagcccgcgtccggccgcgctccctaccccgcccggcccgggacgctcgcccccctcccgccctgtcccttctggatccccgccccacccccccaccccccacatcccgggcctccaaggtggagaaaataaactacaagcagaacaactcagaatctccaataaaacgcccagtacctagagcccgagcgcgtgtgccgggctgcgaggggcgcgggaggcggggatgggggggcgggcgggggggacaatgagcgcatgaagttacctgcccggcggcggcggcagcggcggcggcgggaccaagaggcggcggtggagcaggctgcgcgctcggcgccgacgggtgcgcgccgcggcttgggggagagttgagcgcttttcccccctcttttttttttttttcctcttcttcttaaacaaaccacaaacggatgtgagggaaggaaggtgtttcttttactcctgagcccagacacctcactctgttccgtctaagcttgttttgctgaacacttttttttaaaaaaggaaaaagaaaagga

SEQ ID NO: 40516 - DNA, 2300 bp, Homo sapien
ttacattctacaaataatcatgaacaattcagaaggagcaaatataggccaatgctagtagtcaactgcatatttgaatagtaatacattgctggctatatgcaaaattgtctttttactgtaaaagtaaatactaataattcaatctttcagcctatcttttgtaaatatggcacagtatttattcatggaaaattcagttttttaccatggtgattgtaccatcctctggtttgataaacatctctatgattcacctgatattttaaacacagttggtggtcacacaatggctacaatgtcatacttaggcacatttgggggacagaggagaaaggccattgctgatgagctcagagtggcagtgcttttattatccaattccttcatagcctttgtatgggcttccttagctgtggcatttaattaacgtgtgaacatacttctaaaaagaaacttaaaacaaatagaagattacaaaaaagttttcaagaaaggaaaaataaatgttccttttagaagaccttcagtgaaaagtagttaatattttcagtagtgcttattatttttaatagctctggctttggggtaggcttctgcttctgccagtcccaggcttgcaaagatgcaaacgaccgtccactaaagaacacccagaatgcagtgagtgaaaaatgaatttagtttctcaaactgtttcagtcctctgcacagttaaggaaaagagaaattatatgaatgcttaaaatccaccggttatcctccaagctaatgttggccagtagttttccatatatttggttaaaccttccagaaagtggcagaattgagcgagttgagggttccccccacttctttccatctcagtgtactttctggagcagtttgtaattttttttttttaaaagctatgaagtgtctttttaaaaagtggaggtgcttagcaggcagtaaaggatatgagcactgaaactaaacattcccaaacggatcatttccatccttatttgaggaattatgcattcataaggctggtgtgatttaggaacaggttattcaaagtgcaaatagatatcttcatgaatgaccagagcatataaaaaacaaattgtacttaaggtcctaactcgagtttattgtgcacatatatcttctaaaaatgtggagttaacctacttaggggttactgaccagggcttttaaaaggcacaggaacagagggctgaagtcgttaacactagactgagaagcacgtttaagggtaacaatgccacctctttggatcagaagagttcctgtttgttatgcaatgtgtgcacttcattatttacacgatttcactaggtgaatgggagctgtgtacacagccaggtgagcctgcagcagcgccccagactctgacagcgaacaccctctgtctactgccttctgctagccctgctttgaaacaatacccttttctggaaaaaaaaaaaaaaaaaacacaaccctaaatcatagctacttctctagataacaaccattttcttttcttaaacgtttttaggaattaatagaactttcttggaaaaatttccaaactcgtttccactgcgctgaacggacgatttaaaaagtaaatactcagaagatactaagaagattccgctggagagtctctttttattgtgttacggggtctcctagccctctcctttctcctacccacggcagcccatctctctcctccaggaccccttctttttggtatttcctggagtacggatgaaaatgaataggtgagcagcctctgggctaggccaggcacacaggggtcccgagtgaccttgggagacttgcgggcttctggaaggaaggctcgggcggccaagcaggagtcgccgcagcgaggaagcgccaggaggcggcgggggcgaccccgggggaagggcgggcggggatgcgccgaggtttccgtgacttgggactagtcgccccgaggcgcattctaactgtcggctcccctggccccaacggccagagagagaagggggcggatcctcgcgtaccagacacgccccggtcgggtataaaattcgccaggcgctcgctccccaggccacagccgctccctcgctctgctggggcctccggacgcgcttcccacgcgggtctctggaacactcggtccgaacgcacgcctgcttgcactcacactgcggttcacacccggaggcgctctcgcactcacactgccgctcacgcgtgctcacactcccccacgcgcgctccgctccggctccagccccgcgcccagcgaa

SEQ ID NO: 40517 - DNA, 2300 bp, Homo sapien
cagccatcttcctttgtccttccagcagcctatctctagatggcctctgttctgtttggcaaagctcttctatcccctgtggaactaaatccctgccttgaaatctgtctgttgaaagacctacagtggtttcgtttcatgactagactgtgccgctacaacttgatattactttttaccttcacagcattcctgggaggaggtaatattatctccatttacggataaggaagctgaggcttgaaagagacaaataatgtgcccaagctcatacagtctataagtgggggctctgggactccagaaattgtgtgttgtgcttgcctctagaggacaggtgacactgagagagtgcttccttgtgccaggccccaggacctgagtgggcctacatgcaccatctcacgatgtctccacagcaatctccccagtgaccgatgaggaaatggagctcagagacattaccttgccaaagtaggtgagttggtaggcagcagaggtgggattcaaacctattttttttttctttttttttttttttcagatggagtcttactctgtcgcccaggctggagtgcagtgcctcagtctaggctcactgcaagctctgcctcctaggttctagagattctcgtacctcagcctcctgagtagctgggattacaggcacgcgccaccatgcccagctaatgattgtatttttagtagagacggggtttcacatgttggccaggctggtctccaatgcctggcctctgttgacctgcctgcttgggcctctgcctaaacggtgctgggattacaggcatgaggcaccgcacctggcccaaacctattctttctactactagtagttcttcccaaaagttaatgtttatcactatgtggaatgtagttgaaatgtacattcccagttcccactccagaagctccaattcggtagatttgggaagggtataatatgcattttgcacaactgccctaagtgatgctgaggccacatggggccaaccctgcttattcttttttttttttttttttgatacagagtcttgctctgtcacccaggctggagtgcagtggtgcgatctcggctcactgcaagctccacctcccgggttcatgccattctcctgcctcagcctcccgagtagggattacaggcacccgccaccgtgcccggctaattttttttgtatttttagtagagacggggtttcaccgtgttagccaggatggtcttgatctcctgacctcatgatccgcccatctcagcctcccaaagtgctgggattacaggtgtgagccaccgcacctggccccaaccctgcttattctttatggccttcctgttctaccggtgatgccctgtgtggctggtgcatgcctcgccttgctggcctcagtttccctgtctgtagagtgaggggctggaccagagaatctcccaggtcctcccaggttttggctgagtcccctaaacacgtgtgctgcagagatgcaaggcacatattgtgcttccagggggattgctgcctccactgagctctccgagggcagcagccagacacggagagcaggggtttctcaggcacccccgggccataaggctccacaggagccctctggcttgcgggtaaaggaaagccctgtttattggtttgcagcagttggcaaactgacatttaaaaaaggaagtgaattgtgaggtggggattttaattcagggaaatatttgaagaactcagtgtttgctcagagaggtcattaaataggttttgttcccacaccctctggaaaaatgatgcttcattaaaatggcaacacgaggtgtagtgaaaatggtgaaattgggaacgctgaaaagacacattcactagattccacttaaaatgtaaaaggagtgtaaagaaaacaaatggacattttcctgaggcagctgagctatacaaaacacaggcatctttgtctccttcttgaaaacttccacaatgcgttctcctttcttcctctccactaatctgtacttctaagaggtgttgagtttcggccaaactttctgctcggctcgcatcaaaggctgccctcttgtgaatagccagctctcacctaatgatctccctactcactcctgaccaggacgcaggtcattccccataataattagctcacaggcagagtttccaggcgcttccaggagcatcaatcaccgggatgaatgggaagcccgtgtgtgggaactgcagggggagctgggtgcagagccacctcagccctgtcaccctgcgcgtgtctctgcc

SEQ ID NO: 40518 - DNA, 2300 bp, Homo sapien
aggtactctcctcctctaacagtgtaggaatactcctgactcctaggatgccaggcatttgtataacatcctaatagagttgtgctggtgaaggaaggccacatccctctatcttgtgagagtgaagacttgagtttctccatcaccaaggaagacttgggtgaaggcactcaagtgggagggacaaaatgacatctgaaaactggaggccttgggcagggacctccccttcctcaaactaaaggtgaatgaaccaaattttgcgattccaggtagcttttcatgtcaaattttcatgtcaaattcttccgtgccatctctgaccctttagtaaaatcccctccaaatattccagaaaaaccttgtgagttcatatttggcaaggccatccaaagcatgttagcaacccagcatgatggtgtcagtactaattacataatgagaggccccaaagagaagagtattaggcaacaggaacgagggccactaaatcccaatcgcttttccccagcaatgattctccttcaatatgaggttatgggttatgaggatatgagttagtcaattagcttccttatgcaacttcaaattccctgaacagatccaggaattttgcacattctgttccttgtccataaactttggttcccctccccaaactgttgttctttcgacaaactctatacataattcatattcctggctcagaaatcataatctctaagtaacctttcctgacaccctattctccacctcctcttccataacctgtggtctttttgaacagagtggtgacattttgggctggatgactgaaaaagcaaagtagaaaaacagaacatagaacatacagggcctccagttgctgtgcctggcggtacatgaaacatagtattcaataactattctttgaatgcacagtcattttgttttttcctttaacagtatttcctaataggtaactcatgaacactgcaaaaaatgtcaaactgcacaaaaaaattcagggaaaagtacattttccccccaatcccattccctcctttctcttaataccagttagctttcctttcagattgattatgcatatatgggtatgtaaatgttttcccactatttgttacacataaaaattatatacaattcatatattacatatggtgcatgttatatacacacacataaacagatcatctcggttttgcttaacctaagtcaggctttttttttttttttttttttagagcagccctcagaaccaggacaggttcagagactttatttattttttatttactattattattttgagacggagtcccgctctgtcgcccagtctggagtgccgtggttcaatctcggctcactacaacctccacctcccaggttcaagtgattctcctgccttagactccgagtagctgggattacaggcgagcaccaccacgcccggctaatgtatttttagtagagacgcggtttcgccatgttggccaggctggtctcgaactcctgacctcaggtgagagcaacgtagtactccactgtgcgtgcataccatgatttactttgcagtcccagatttacggtttccaatttataaatactgccattttcaccttcaagccccgatgccaaacacagaaataccaggccacccccaccccctcgccgtgtgcctcccacattttcacacacattttcaggagcccagggcgcagcctcacaccgaacgccgcctctgccgtcccctcacttgccccgtgcccccaccgcagggctgaaggcgacggaaccgagcctttgtacccccaccagccccgttccctggcgtctcccggccgccgggctcgcccgctcaaacgtggcggaacaaccggagccgggccccgccctgctggaagacagggcggaccgggcaaggcaggcgcggggcggggcggggcggggctccggctggcggggcgcggccagcgtgcagggctgggccagcgtgcggggctcctcccctttcctccggcggcgccggcggccgcagaacttccgggtcggcgcggaggcggggcggaggcgccgcggcggctgttattgttcggctgggctcggtcgggcgctgtctccctcggctctgcgggtgtcagttcgtccggcttcctcacagcccctcactcccggcggctgacagcagcagcggcggcggcgggcggcgcctggcgtttcgaggctgagcggcaccggggttggggcgcggaggaggagcagcagcgggaggaggagccgtgtgccctggcactgagcgg

SEQ ID NO: 40519 - DNA, 2300 bp, Homo sapien
aattacaaaatggctagtttttttgtatttttggtagagacagggtttcaccatattgcccaggctggttttgaactcctgagctcaagcagtccgcctgccacggcctcccaaggtactgggattacaggcgtgagccaccatgcctgacttgcgttttcacatattttaaattaaagctgtttggcttgtggttgtaaaaatagaatcatcactaatattgacgaatcctgcaattagtgggaagttggtttaggacaaggaaaatgaactccagtagaatacccagcacctactcgtatttcttgtgaaggactctttgccttaaaatgcaagaggacttaattagattcttgggccccacgaaagacgtgctaagtctctgggatggggcttcaggaatctgccttttttttaatttttatttttggagataaggtttcacactgtcacccaggctgtagtgcagtgggacgataacatctcagcctcctgaactcaggtgatcctccctcctcatcttccaagtagctgagactactgccatgcaccaccatacccagcttattttttgtagaggtgccatgttgcccaggctggtcacgaactcctgggctcaagcagtcactcctcctgccttggcttcccgaagcactgggttataggtgtgagccatcacacccggcaaggaatctgcatttttaatgggtactacttataattgttacctcattgacttggtatttaaatattcagctctcacaatggtgtcctactgagggacagtgactccgaccctgagtaaaggaagaaggtaaggtattggtagcaactctaatagcagcattaataagtgtagtgatttgtattaattacagagtggtaatgatctgtgtatatccaagatatccacaccaggccttaaaaaacaatgttttgcacatcattaaacaaatattcattaaacaaattcattattcattaaacaaatattcattattcattaaattattaaattattcatttttcattaaatatttcatgaatactagctcaacagatcattctaggtgctttggaggatgaaaagatgaataggaatacagatcttgccctgaaagaactttgtttataaatgttgtaaaaacaggcatttaaataactgtagtgtaagataaaagttagtacatagtaattgtcatttcagagataacatattctgaagtccattaagggaaagatcacatccagagaaatactagaagaggtggagggtgtgcatggctttctgtttgtttaggaaaacaagtaaataactctccaaagtctcagggtaattctttgtgttggactttttcttttttcttaagccttctcaaacctatcaggtttaagattctagttagtgatatttcctacttgcgatagctgagaaaatttgaggtgcaagacttgaccaaccttctcttgagtgtgttcgaggatgggagacttgaatgcatgtgtcaaaagatgtccatggagaagcaggtaataaagatgcaagaaaaacgagttgctagatctccaaacagggagagagggctgagatctagttttggttggtaaaggaatatagtacttctctagcattaaagaaaggataaactacatggacatctagaggaaacttcaagtgaagaagtgatccatgttggatttttgtctttgtttgtttaattaaataataatactgttaagtttttacatagtgcttcctacatgttttcagtgctttatataggttaactggtttaattctcacaactcttgttgtgaagtatgtattgttcttatcctcattttgaaaatgattgcgtgcaaaggccaagtagtttttccaaaatcacccaggtagtgcttttaaccactacacaatgctgacagttcaatcagcatctctggaggtgtgaggcctgagcatcagtttgggttgctttttgtttttgttttttgggtcttttttttttttttttttttttttattgatcattcttgggtgtttctcgcagagggggatttggcagggtcacaggacaatagtggagggaaggtcagcagataaacaagtgaacaaaggtctctggttttcctaggcagaggaccctgcggccttccgcagtgtttgtgtccctgggtacttgagattagggagtggtgatgactcttaaggagcatgctgccttcaagcatctgtttaacaaagcacatcttgcaccgcccttaatccattcaaccctgagtggatacagcacatgttt

SEQ ID NO: 40520 - DNA, 2300 bp, Homo sapien
tgcataaaaaattaagtcttttaatgattgcataatattccacagtccattaccctatgatagaaatataagtaattttgttattccaaatcatgcttaagtaaacattctatacacacatctttatgcatttgtgctcaaatttctgtaagatgaggcagaagtatagaattgggatcattggctcatttcatatacacacacacacatgcacacacaccctcacagacttaaatggttctctgtaaattccagcaacataagtaaatctctacatgctggatggtattttttgccaccttcaaaggcaaaaattggtatctcattatttcaagttatagtttactgatcttgaacatcttttcatatgcttggaaaccatttgaatttcttctgaaatttgttcatgctcttcacttatttttcttttaaaataatttttataaataatatacaataattcatataatacaagcaatatattaatgtaatgtccttataaaatttcaaacagggccaggtgcagtggatcatgtctgtgatcccagcgcgctgggaggctaaggtggaagcatcacttaacatcaggagttggagaccagactgggcaacattgtgagacctcatctgtataaaaataaaaaataaaaaattaggtgcgtgtggtggtgcatgcccatagtcccagctactcaggaggcgaaggtgcgaggattgcctgagcctaggagttgaggttacagtgagttatgatcgtgccactgcactctagcctgggtgacagagggagacactgtctcttaaaaaataagaaattaaaaaaaaagatttgaacagtacagaagtgtatagaattaaaatgtaaaaattctgtcttcggaaatcagctactctagtcaaaatttgggatgtattcccctataaagttttttctgcatatgtgatacatacatacatgtatacacacgtgtgtatgtgtgtaactatgttcataaaaatctattatcctgcatcatgctttttgaacttaatagatttatatataaattgttttacttaacaatatgtcatatatagagaactctgatttatttttattgattgatttttgagacagagtctagctgtgtcacccaggctggagtgcagtgaagcaatctctgctcactgcaacctccacctcctgggttcaagcctcctgcctcagcctcccgagtagctgggattacaggcacccaccaccacaccagctaatttttttttttttgtatttttagtaaagattgggtttcaccatgttggccaggctggtctcaaactgctgacctgaggtgatctgctcacctcagcctcccaaagtgctgggattacaggcatgagccactgcacctgaccgagatttttttattttattttattttattttattttattttattttattttattttattttattttatttgtttattttttaagatggagtcttgctctgttgcccaggctggagtgcaatggtgccatctcggctcactgcaacctcctcccccagggttcgagcgattctcttgcctcagcctcctgagtagctgggattacaggcgcccacgaccacacctggctaatttttgtttttagtagagacggagtttcaccatgttggccaggctggcctcgaattcctgacctcagatgatctgccacctcagcatcccaaagtgctgggattacaggtgtgagccaccacgcccggctttggagaaccctgatttttaaaccatcctttagtattccatgtggcatggactgaatgtttgtgccccacccccaaattcatatgttgaaaccctacactgaagtgagatggtattaggggatggggtctttgagaaattaggtttggatggagtcatgagggtggagctcccatgatgggattaacgtccttttaagaaaacaaagaagctacagcttgagttcttggccatctgaaggtacagtgaaaacgaagctgtctccagacgccagatatgccaataccttgattttggacttctcggcttgcagaattgtgagaaataaatgtttgttgttgaagatatatttttgttataatagccagaactgaacagaacatcattagatttctctccgttttgtttcctttctttttaaccaacacatatatgttgcttggtggataaggcattcttgtagtgctttataagtattagcccatttaatcattataaccatcccatagaacaggtattcatttgattaagaaaactgaggtatga

SEQ ID NO: 40521 - DNA, 2300 bp, Homo sapien
gactataagtcagaggacttatattctgtaggactgtttttacattgggtactggtatatatcaaaaggaagtttcctagctttcgagttaaatgtacaagagcacagggaatctcctcatagtcatatttgttgataacaagttaattgcaatattgtaatttcactatatgtagatgtcattttttttctcctgtgaattgccttgaaatagatgcacatctgatatcgagctgtggcacactgtaaaagataagacataattttttatggcacattattttaaaaatgtgttctaatatagtcaggtactagcgattttttttctagacattgtgtcctgtttttgacccccccgccccacacacccctaaagcacctttcatatactttcattgggaaatataaacttaatggaaacagtagcctaacctcagagttgtgattcttggtttgtgataccgggtttaaaacagatggaagttgattttagtggtttcaactttttaaatgccagaattctttctgtactgtcttctatgttctttttgatgatctgtaagctccttaaacattaaaacatttatttcttttagaacaaaactcaaatacatgatgaaagcaagctaaaagcagtgcatttaacaaaccacaatataatgtgatatatttatagaattattactaaaatcagaaaatcaatgtcttagtgattaagtctaggataatcaaacttattgaatagttgcagtagttacttaatgagatagttttgattaatcttttgtccaaataacaatattgtgattacaggcttagcactacaggtagtgtaaccatcagtgagtgagattagtacattttacatagttttgctattttctcagtttattttggagtccagtaataaccagtcagtctgtacctgccatagggcaatctttggttgatatgagttcctttcctgattttaaaataagtgcaatctttaacctaataaaattatcttaaagtttacaattgatggtttaaacacattataattgctccgtattttgcagatagaagaggcttaatccatgtttgtagatctatttcctaaaataaaaattagtaaaaaaaagttttttttcttcaggtttaacattcattttgtaccgggaagagaaatggaataagaggctcggatttttaagactatgcaatcagatacaagtgccattttggccaaagaatgagtaaaacattctagtcccgacacgtttaataatgggcatacatcctatttctttgtttcataatcattgagctctctgccttctctctcttttttggtatggtaacaaattcgacaaaatcaatgccatctagttaaactttttgattaagtagtggatccggtgtcctatccacgaagaggtgggaaaagcgatgtggagaagcaggcacgaacccatctggaatggaacatgtcccttccgaataatttcatgtgggaaaataatttcaagttgaaggataattactgcagagactgccagtcacccccggccgccgccggccgcgcagcgtcggaaacccttcgcggcagccaggagggtcgcagccctcccggagccccgcttcctgccccggggcggcgcacccggctccgggaaggtgccgcgcgggagacgtggcagcagcccctccagtccgcgcccgggcgcagcggccgagcgctccgtgcagccgggcaaggaagactccgcggcagcagcgcaccggccggcggggagacccgcctgaagcgccggcgcccgccaggggacgggaagtggcgcccggcccgcccttgcggcccgcggcccgcggcccagcagctccgcgccgccccttttctctcggcctctccctcggcctccgccaccccggccgaattcttgcataaattatgccaggcgcgcctgacgtcaggtggcggcgcgcgggcgcgggcgcgggcgcggcgcggcccggagggagctggcggcgggcgcgcgcggccccgcggcttcgggtgcgcgcggcgtgccggacgcgcgcaggcgctggcgtgctggggccgcggcggcggcggcggcggcggcggcagcggcggcggcggcggcggcgcgggggttgagtcgtggtggtgcggacgcgctcgtgctcgggaactatcggattaaacttgaatcgagtgaaattacacaaaggagcgccgcggaggaggcggcccggggacccggacaccctgaaactcaccagagacccgttcgcccccggccaactccgtgccc

SEQ ID NO: 40522 - DNA, 2300 bp, Homo sapien
taatttgaaaggttattttggtaagtggttgggctgcatggctggtttaagctattatcaagtccattccagtatttatttctttgaaagttagaatgagccttgaataaatgatgactgactgcttagccttcttaggagtgtatttaagaatatttgttgcaactggcactggagatgtctacttctctttattttggattttaaaatagttgtatagtaaagcagcgtgttttcagtaaaatagctttcatgctcaccttattttcacccatctgacctctgtatttggagaaagtagatcagaaaattcatggcagttagcggcagagtgaagagacctttgactttagttgacagctgtcacctgaaaactacaggcctggagaccctctcaggtgttatgtctgtagttctgacagtgaacaggaatgttgtttacattttctgtaagcaaaattctccccttgttaggaatgtgttagaatacggcaggcagaaacagaatttttatgtgtcttactggtaagttctcaggagtgttggttagcccattgttcattcccatgctcttatggaagggtgtcagtagaatttatgactgagcctgtttttatcatcactttggaaattcttcaacaagatattgtttttttcaagtgagctagtatcacacaatgcttaatgtccttataaaagagaaaaaaatgagttaaattccaaagatgtttaagatttcagtcattttctctatatgaattaggtctttattaggccgttgatttaattagtgttcaacaaaaacactttcctgtttagattgtcaacgcattctttaaattagttattttaatctgacacaggatctgttaggaagagtttgaataagatgcagcatgttacatagtgtacacagtgcgctggaagcacgtagggtgcgaacacaagtgcctgccaacttgtctcccttcctgcttaggtcctgccttgtcccaaaaggacttaaggcaatggtgaggagagcatattttgaactttattctgtaaaaataattttcagttttggagaaagttgtatttctagttatgagaatagttggtgtccacaaagtatccactcaactagttttctctgagtggtcacgtgggattctggtccaccagagcccagcatgcctgcgggtgaataatgagcctggtgattgggctgctctgtgtcagtgcagactgggaccatggtaggctcagagccatgagtgaaattggtcgtcttggacaatgaaagcttttcttttagtttctttctgaatcttgtatatttctgccattaaacataatgaaattatgaatttattgtactgttctcaaggttgcttttcaacatcattatgaacactttcttgttagatgcctctgttgcagttacatagttgtatgtgggctgtaaatatctaatttgtatgaaatgaccgattttggtatttgtataatcctctagtcaatttaactaacttgagcttttcacagcccttggtgctgctgttgctcatctgattacaccgctcaggggaataaggttaagggcgggctgttggtaaccagagcatttccagggctttagttcagcagatgagctgcttggctatattcatacatctgcttgcctgctgtggcagctgctgctgcttcacgttgtgttcttttgttctgtttcatccaagaatggaacgctaggaagtgtagtgaatggattaatttaaggttaaggttagtgttttgcttgctttctaagtaaccgatcataatgatgcttctggtagaagctaatgagtttctcttaaagtgaactaaatttataaaatacagctcagcgagggagctagattcgtattgttgatggggaccaaattcagatgtacaaaatactggcagtttttatcattggatcctaattctttgttttcttccttcttctcccccaccccaaactcccttccaggacctatatccagactttgcctgacactgcagggtccaagagaattaaagaaatatggaatgacatgaagaagattagttaaggattataggctttgagggcaaacacctcagtgaagtgaagcacaggcaagctcctgagctgtggtttggaggagccgtgtgttggaagaagatggcagatccaggaatgatgagtctttttggcgaggatgggaatattttcagtgaaggtcttgaaggcctcggagaatgtggttacccggaaaatccagtaaatcctatgggtcagcaaatgccaa

SEQ ID NO: 40523 - DNA, 2300 bp, Homo sapien
gtgttcaacaaaaacactttcctgtttagattgtcaacgcattctttaaattagttattttaatctgacacaggatctgttaggaagagtttgaataagatgcagcatgttacatagtgtacacagtgcgctggaagcacgtagggtgcgaacacaagtgcctgccaacttgtctcccttcctgcttaggtcctgccttgtcccaaaaggacttaaggcaatggtgaggagagcatattttgaactttattctgtaaaaataattttcagttttggagaaagttgtatttctagttatgagaatagttggtgtccacaaagtatccactcaactagttttctctgagtggtcacgtgggattctggtccaccagagcccagcatgcctgcgggtgaataatgagcctggtgattgggctgctctgtgtcagtgcagactgggaccatggtaggctcagagccatgagtgaaattggtcgtcttggacaatgaaagcttttcttttagtttctttctgaatcttgtatatttctgccattaaacataatgaaattatgaatttattgtactgttctcaaggttgcttttcaacatcattatgaacactttcttgttagatgcctctgttgcagttacatagttgtatgtgggctgtaaatatctaatttgtatgaaatgaccgattttggtatttgtataatcctctagtcaatttaactaacttgagcttttcacagcccttggtgctgctgttgctcatctgattacaccgctcaggggaataaggttaagggcgggctgttggtaaccagagcatttccagggctttagttcagcagatgagctgcttggctatattcatacatctgcttgcctgctgtggcagctgctgctgcttcacgttgtgttcttttgttctgtttcatccaagaatggaacgctaggaagtgtagtgaatggattaatttaaggttaaggttagtgttttgcttgctttctaagtaaccgatcataatgatgcttctggtagaagctaatgagtttctcttaaagtgaactaaatttataaaatacagctcagcgagggagctagattcgtattgttgatggggaccaaattcagatgtacaaaatactggcagtttttatcattggatcctaattctttgttttcttccttcttctcccccaccccaaactcccttccaggacctatatccagactttgcctgacactgcagggtccaagagaattaaagaaatatggaatgacatgaagaagattagttaaggattataggctttgagggcaaacacctcagtgaagtgaagcacaggcaagctcctgagctgtggtttggaggagccgtgtgttggaagaagatggcagatccaggaatgatgagtctttttggcgaggatgggaatattttcagtgaaggtcttgaaggcctcggagaatgtggttacccggaaaatccagtaaatcctatgggtcagcaaatgccaatagaccaaggctttgcctctttacagccatcccttcatcatccttcaactaatcaaaatcaaacaaagctgacacattttgatcactataatcagtatgaacaacaaaagatgcatctgatggatcagccgaacagaatgatgagcaacacccctgggaacggactcgcgtctccgcactcgcagtatcacacccctcccgttcctcaggtgccccatggtggcagtggtggcggtcagatgggtgtctaccctggcatgcagaatgagaggcatgggcaatcctttgtggacagcagctccatgtggggccccagggctgttcaggtaccagaccagatacgagccccctaccagcagcagcagccacagccgcagccaccgcagccggctccgtcggggccccctgcacagggccaccctcagcacatgcagcagatgggcagctatatggcacgtggggatttttccatgcagcagcatggtcagccacagcagaggatgagccagttttcccaaggccaagagggcctcaatcagggaaatccttttattgccacctcaggacctggccacttgtcccacgtgccccagcagagtcccagcatggcaccttccttgcgtcactcggtgcagcagttccatcaccacccctctactgctctccatggagaatccgttgcccacagtcccagattctccccgaatcctccccaacaaggggctgttaggccgcaaacccttaactttagttctcggagccagacagtcccctctcctactataaacaa

SEQ ID NO: 40524 - DNA, 2300 bp, Homo sapien
tcagccaaggcaagaatactaactgactgactgcacatgtgcctttttctgtcaaataatttggagactagagcagattatttttataatatgtgtttctttttgtgtgtgtgtggcagggggaagagggtctccctctgtcacccaggcttgaatgcagtggcgtgatctcagctcactgcaacctccacctctggggttcaagcaattctcccgcctcagcctcctgagtagctgggattacaggcacatgccaccacggcctagctgatttttgtatttttaatagagttgggttttcaccatattggtcaggctggtctcgaactactggcctcaggtgatctgcctgcctcgtataatatgtgtttctgattatgacagtattgcatattatttattggaaatttggaaactacaagttgaaagtagaaaataaaatacttgcagtcctagcacccagaaataataaatacaggttgagtatcccttatctggaatggttgagatcagaagtgttttggattttggattttttcaaattcagaatatttgcattatgctttaatggttaagcatcccaaatctgaaatccaaaatgctccattgagcatttccttcaagttcatgttggtgctcaaaaagtttcgagttttagagcattttgaatttcagattttcagatttggaacctgtattagcattttgatgcaatttcatctagtctgttttctgtgtgtgtatgtacagcatttatatcagttcatagctatgtaagtcatatgtatttaaaatccttttttccctcaattatagaaggactaaatgagtcctatctttgcaaatcatattagacatgattatcagttatgtgctacttaatatcataagcatttcctatatcatgaatcatttttgaaaaatttttaatggttgtataatttttgtttttactttttcttgttttaaacttctgacttctgtgaactaaagcacaatttctaagagtactagtatgttgattctgaaaggggtatatatattcaagatataatttctttttaatattgtcatcagaaagagaaataagaggctctcaaggctgtttgaggggcagggagagggtgatgggacaaaagaatattgaagaactaagcaaaagaatgtcagagttgccataaaacattaactgtgtacctgtgagtgttggagaagaaaagggaagtgcatatgtattccagttcaggtgagggaagacaccatgcatactcagaggaggggatggggagtcttgaggggagggggtttgcccagtgcaggtatagatgatagcaagggaaacattcacaggggaccaaggaatatcattgcagaaatcctggaggaacacagtctgggagaccaggaactgataagaagctggtgaggggcatggcccagtgttccaggagcagacagtggttctttcctcctagatttttctagaaggaccaggttaggtttccctttgggaccagtatgataggccttgggtgactctagggcaccctacacctcttatctccaaagaaactgctattttaaatttgaattattttaacttgataaaaacctatttctcaatgataagaggttcaaagtataaattcagaattaaggcctccctgtagtgctaattttatattgaagtataatccattcacttatggaaatagcttgttattaggccattctctctcttctctgtctcttttgtctgtctgtctgtctgtctctctctctctctctctctctctctctctctctctctctgtaacaggtaagagagctggaggcttaggacagaaggcaaattttaggcactaatattgattttctcttcttattctaaacagtggtgggtatattaaatgttgctcagcagccttaatgggtaattaagcaggttattttaattatctgtgtagttgacttttttgaataagacataataaaggattaattatattctacatatttcaaggatattgttttgttctttcagctcttatcttcattgtcagtgggcatctatagaagatctggaaaaagataagagaattcagcaaaaaattaaacgatttaaggcaaagcagggccagaacaagttcctttcagaggtacgacatacctgcttacttttccaaagtatttactttgttaaaatgttctaaatttaaaattttagttccatgaattaagaaaaactagttagtctcatttggtgctgtcaacttgcatattggtaactggttcttgct

SEQ ID NO: 40525 - DNA, 2300 bp, Homo sapien
taactaccatgtataaagtctggggggaagaagaaaagaaacagtaaatattaagtcttttcctgaagtatgatgcaagctaatataatctttctaacaggtggacaagaagagaagaggctgatttttaccgtgtggtatccacctttggggttatttttgaccctgtgaaacagcaatttgactggaaccaatttagagcctttgccaggcttgacaaaaaatctgatgagagtttggagaaatacttcagttgttttgtggccatgtgtaggcgagtatgtcgaatgcccgtcaagccagatgatggtaggtacatttagcaacaaagttctatacaaaaagacgagtaaagtgaaaaataagaaagtgtacaatgtagaatgcccttgaattctccccaagtaaatatgagcccttctgtgttacagaaccgcccgacctctcctccataattgagccgatcacagaggagcgagcctctcgaactctgtaccgcattgagctgctacggaagatccgcgagcaggttctccatcacccccagctgggagagaggcttaagctctgccagccaagcttggatctgccagagtggtgggagtgtggacggcatgaccgagacttgctggttggtgctgctaaacacggggtcagtcggacggattatcacatcctcaatgaccctgagttatccttcttggatgcacataaaaactttgctcaaaacagaggggcaggtaatacatcttccttgaacccactggcagttggatttgtccagactcctccagtcatctcatctgctcatattcaagatgagagggtactggaacaagccgaaggcaaagtggaggagcctgaaaacccagctgccaaggagaaatgtgagggcaaagaagaggaagaagaaaccgatggcagcgggaaggagagcaagcaggaatgtgaggcagaggccagctctgtgaaaaatgaactgaaaggtgttgaggtcggcgcagacactgggtccaaatctatttcagagaaaggttccgaagaggatgaagaggaaaagctggaggatgacgataagtcggaagagtcttcccagcccgaaggtaaggccttaccactggcccctctcctgaccctgcagcagctggttgtgagatgcgttgctttctggcagcacggcacctgctctttttcacgagtacttagtgtacattttcttctgtgaagggataatttcaagttatgcttatatctgtgttttgctctcgcaccttatagcacctaaccatggtattttgaagaacataaactctaagaagggttgcatggacacattagcaatttctggtttaaggatggaagttaacttgtagtgagtgacagtgtattaagaattctatgtgattttaattttgacaaatgtgagggaaggtggtcattcactgagtaaatattgttaatcattttgaaacaactggtgcttgttatgttttgattcagaagtaaagagtgggaatagaatctaaaaataaccaattttttaagtcacagtacggttgctgaaactggcccagaataaaaatagagcacgtactgtgctgtagctggaaccttcaacttttgacagaaggtcagcccttttttctgtgtggaagaacatagactcttgagtcaatgacttggttggctatcagcctcttgtaaggtttacttgcacggtgctaggtggctagtgactaacctctctaagcctctgtgtcatcatctgcaagatggaaataacaccatctatgttaaagggctgttgtaagctttagacaacagtgcccaataccattctagccatgtagtaggtactcaataaaatggagctgattagtattcacatttttaatcatgtcctttctaaacttcagtttccctgatactgtggttgtgagtaatgcacattaactcatttctcagcaggagctgtctctagagggaagaattttgatgaagaaagcaatgcttccatgagcactgctagagatgaaacccgagatggattctacatggaggacggagatccttcagtagctcagctccttcatgaaagaacatttgccttctcgttttggcctaaggttggcaggtttttgttgctgttgttttgctgaccaaaaaggattagggtagaggaaatctttctagcttgatttttcaagtaattttaaggtaaacttttgacacagtatatgaagactatagatttttcttatacttttaaagaatgatctgaaaaagcccaaagaaaaaaa

SEQ ID NO: 40526 - DNA, 2300 bp, Homo sapien
ttgcaagtacacattctattttaaatctgagactgattttattcatttcactattttaagccgttgttaagaatttgttgatatttttctttttctaaagtcccatttagaaagcctgagagaattcctaattgaagttagagaatgtatttttaaaactttttttttttaactgtcacattttgaaatgtagggattcctcatttggtgttgtcgggggtgatgtgcatgcacataaaatacaaggaaagcactgctcgatctgtaaataaaccaagtaggaaaagatgtaaaggccagcagtgttacctggatgaaagaggacagatcctagaatttagtattttgtcagcactctaactgtgctgccatgaaaaagtaagagtgcattcagcaacagtggacaagctggcactattccctgtgccagcactgagagtcaaaaaatacagtcctgacaagtgcttgcactggagaatgcagtgtttaggatggggtagcacataaatcataatgtgtcctggttgttcatgtgtgccacgaccaagggatgtctagggtactttgtgagcccaaaggaagcctgggagtggagggaagaggatatggggagaaacagatgaagaagtttccctatggatggctgtacttcaattaagttttgaagatcatgtagtagttggtcattttaaaagggttggcagagaacatgtgtaagaggagagagcctcttgggtttgaagaactgaggaatttgctgaggaagtgagcttcagcagagatgagcttgcagagaaggcaggatgcaaatcatggagggccttgatgccattcggaagaacttggattttgtcctggaggtaatagggatgcaattattgaaaaaaataggagagtgatgtgacataattttttgaactgggaagggctgcattttagaaaactgactccagcgtagtggtgtggaggttggattgaagataggtgggattagaatcagggagaccatttaggaatattgcaataacctgggtgggaagtgacaaaagcctgggccatggtagagctgtggggaaggagaaatgggtgtctggaggttgaaataactgtagacttcagttagtggtggtctttccaatgttgccacacatgtctgagacaaagtgtcccactaccaacaaaattatattgtgcacagagtgcccataagttacatatagactggcttttagaaattcctttagtataaattatctttaatatcattatccggggatctccaagagagactgagaggccgcctttcatgcatatcagctcagactataccccccatgttgtattcccagtggctggcttaggatttcagagcatggaaccttagtggactataaattttttacctaattactagttctacagtgtgaagaatgatataaaagtttcgtcttcttctttttatttttatttttttgagacgaagtctcactctgttgcctaggctggagtgcagtggcacagtctctgctcactgcaacctctacctcctgatttcaagtgattctcctgccccagcctcccaggtagctgggattacaggcaagtgccaccatgcctggctaatttttgtattttttgtaaagatggggtttcaccatgttggccaggctggtcttgaactcctgacctcaggtgatccgcccacctcggcctcccagagtgctgggattacaggcgtgagccaccgcgcccagcctcattttctgacttttaatagctgttcccaaacaactagacattgtttctagtaactattttctctttttgataaaagatccattctaggatagcgttttcttgaaataggacattgtcagaggctctctcttcgtgtgagaattcataccattgtgaactttctgcaggaggatgctgaggtgaccaaagcttttgaagaagatatagagaccccaccaacaagaaacattccttctcccggacagctggacccagacacacggatccctgttatcaatcttgaagatgggactaggctggtgggggaagatgctcctaaaaataaggatttagttgaatggctgaagctgcaccctacttacactgttgatatgccaagttatgtaccagtgagtattgcagagtttagagttggaaggaatcttgcaggccggtccacttcattcccttacaacatagaaatccctgacagctggtccctctgccttttccttgaatgtttcctggtctcaaacatttcccaggtctttgttgttgaatct

SEQ ID NO: 40527 - DNA, 2300 bp, Homo sapien
agagccaagaaaatgtgtgaggaataaggtcaaattgtagaaggaagaatattctagttaactggatcatattttgttttccctgtagtttttttttttttttttagcacataagacgctgtcattaatatttctatgatctaatgtgcaggccattttttttttaagtttgagtttgaattagtcaggataggctaggtaatgctagaagaacaaattaactctgcagccccagtgacttcccataactgtggcttcttctttgttcacagtgggaatggaaatttgaaatgaagagggggctaagtgagactgtgttctacttagtcacctggggactaagtaaggaattgtcatagcccatggccagagtaagctcatggccctgcccatatgtaatagggctggaaagtgtgggcaagcctcaggatattagatgatcagccaatatttctgcaataatctgctccagtggttatcaaaaatatcttagcccctatggagccatagagcatagaacttaccacccatatatcacacccaacccatctccaaaaattccttcgcttgctgcaaccatttctcaattttgaatctctaagttttagatggttgtcttattgctacatcatttccagatgtggattctctcgttctgggaatgtataagctatgttgttccaggcatacttgtaagtgcttgggaagcagtagtgaacaaacacacaaattatctgccacatggtacttacattccatcagagagaatgactaaacaaataagtaaatatataatactatgttagagttggaagaattctgatgactttaaagtctttgaaatacatgatagaaagattactttaaaatatttaataagttttctaaccttttagtaaatgtgaaaactttaagcaaatacaagtaagaaaatcaagttatcttggcaaaaagaaaatttacccatagtgatctaactaatgggaatgctgtatttgatatcttgctttccttcacttaacactttgcaagtatttcttttttggccttaaacagttttcaaaaatatgttttaatagctataaacattacaggctatataaaaattaatgcttttttattttttgacaatttctatgatcgtaaatgaaatttatacacataaatctttgcatatctgaatatatccctagcataaggtacgagaagtgaaattactggatctaaatgccatgtatatttatgacactggatatacattgtgaaatagatttttaaaaatgttatgctttctcactattattccaacaatataagacatgcatatttaaaacttcagcccaaactgccatattaaactgcatattttcatttactggcgaggttgatattaaaaaaatgtgtttattatgcatccccatttcttctataaattctttgtcatttaacattcctcctttttttctaaaaggctgttagtgtttctcttatatgtgatactttgtgtatgaaacatctacttgctgcaattttttaaagtggtaatttgtatttactttttttatattctgacattcaggagtgtttttatgcactcaaacttaccgatctttttcttttttatgtcttctattcctcttgtgcttagaaaacctttcctatcctgagatcggtaaaatatttctgttcttctagttatatttttaaattttatgtttttgataaaaacatctatgtgtaatttattttggtgaaaagactttgatttgagtcttttcaaatagttcattttcttaataccatttgttagtaaaataattcccataggtttgtgatactttcttacctgtcaaatttacacacacacacacagacacacacatctgcttttgcgctttcattaatccgtttgaaatattctatttttaatgttgtgtggggagtgatgacgctggtactttttgtcccagatgttaacaaaattacaaataattattggtacgtctcaacggaaccagggagggttgtggtacggaggcatttaggacccaggggaaagctaggctccgtatagaaggacagagaatcgggcgcacacgcctcctaccaaaatcacagccccttgtggagcccgagctctcattcacagctttctagagaaatctgagcccgaacctgccagaataggggatctcacccacccagttcagcagcgaggacacctgcagaaatacattcccaaagcaaggctgggcggccgtgtgaaggtatttgttaccttttttctcccctctgtattt

SEQ ID NO: 40528 - DNA, 2300 bp, Homo sapien
gtaaggctgctttctgaaagggcttttggagaaggaattttaacatcaggtgggcattgagctagatagattttgaaacttcttacaattctgggaagagtttgtaatactattttcctttactgttatgagtcctcaaaattagtgagaagtaagactcttctgtttcttagagaacatcacagagataaatgctattttcttacaagttattttgcaaagccgatattttataaataaaattatttttattattctgttgtcttgaaaatgaataccagttacttttttttatctcctccgtatccaaagacatataaagtagaaatatgtgagatgattgtctctcttaagaaattactgttagtcctaaattaagcagagcaatcatcatttaagtaattttgtatgagaaagcattaccaataatgattagattgggagtaaatattctgcctcttactgcagataagattgacttaagaaagctaggaaaaataaatgcctctaagtttatttatatttagtgtgtcttctgattttggaaacttccaggttagaccaaacagatgtctgcaagagtttaagcatttacatttaaaataagatggaaacagtatgggtgttcctctgtataccattttggtggagaaatcataaaggatgtatctgaggggattaaaatatcattatcataagtaaaacagcatcttaggaaaacaggcaggttatatacaatggaaggatttttaagcccatatggacattgggttgggtagggagccaaccaagagtctcaagtccctctgctttcctagtaaaagaatggcaaatgcaaataataaagccatttgcaaatgtccctgtgagcctccttgcccattgttgaatttgattattggaggtcaagttttcagccataggcctgtccccacccccactcttcacacatactggtggaggactcctgtgagtcatgaacactggcggggttaaaataggggaagtattttatagttaagatgcaaatggctggctttaagaaagtgggggaagggttatttctgtgaaagatacttctgtttgagaaaagaggccaatgggaagcaaaattttaccatagctataatttctctgccatatccaggcctgtgagtggtcccataaagcatgctgtcacagagaagtatcattctctcctctcactgtttcttaaggtaattaataaaagtgcatgctattgctaatctgatcaagcactattacgttaactagtcaatggaactgaaacgttcccaaacatatttcaaatatttgcatgttagattttcaagttgtctataatcaacttttgctcaatactccattttaaggataatttatcatttgttctttggacacctaatctaatcagacccacagcctaatatactgtttttctatctaagctccaattaatttgcccagactttctttgtatcatctctcttctgtttcttttgtgtgtatttgtttttcagtaagcaatggcctcagttttgcttctgttttggatgaacaccaccacatagggcctgaatgtgaaagaagaccctctatttgtctgttccggggcagcctggtagtaaaacactgttgaatgggccacagtttcagcagaccatcaggtgaatgggaccagtctctcttcttccaaaatatcagaagttaaacacttggaacggagatttggccaagatgacccatttacaggctggactcagtccagagactatagagaaagctcgcctggaactgaatgaaaaccccgatgttttacatcaggatattcagcaagtcagggacatgatcatcaccaggcctgacattggatttttacgtacagatgatgccttcatcctgagatttctccgagccaggaagtttcaccaagcggatgcctttagactcctggctcagtatttccagtaccgccagctaaacctggacatgttcaaaaacttcaaggcagatgatcccggcattaagagggctctgatcgatgggttccccggggtgctggaaaaccgagaccattacggcaggaagattcttttgctgtttgcagccaattgggatcagagtaggtaaatgtagatagtgtctttacttggtttttctttgctataagcattatcactgcatgtttggggttgtatggctttatatgtaatgggctttcattaaaaaatatttcacatgttcaccaaggaagttttaggccacaggtgtgctgtcttcaaaaggcaattccagatgga

SEQ ID NO: 40529 - DNA, 2300 bp, Homo sapien
gcctcccacgttcaagcaattctcatgcctcagcctcctgagctgaaatgtatttcttaagtaataagatgtgaaagtcatggactgcagaatggatgttgtgctgggcatgaaaacaaccttcacctccttgtacatatccaccagagctcttgggtaaccaggagcactgtcaataagcactaatattttgaaagggatctttttttctgagcagtaagtctcgtcagtagacttaaaatactctgtaaaccgtgctataaacagatatactgtcattcaagcttcattgttctatttatagtgcacagggagagtagatttaacataattcttaaaggtcctaggatgtttagaatggtaaatgagcattggcttcaacctaaagtcaccagctgcattagcgcctaacaagaaagtcagcctgtcctttgaggctttgaatccaggctttgactctcctctctagttatgaaagtcctagatggaagaagtctattcttccaatagaaggctgttttgtcattggaaatctgttgtttagtgtagccagcttcatcaatgatctttcctagatcttctggatagcttgcttcatcttctatatcatcacttgctgctttactttgcacttttatgttgtggagacagtttctttccttaagcctcatgaaccaacctctgctagcttccaatttttcttctacagcttcctcacctctctcaaccttcatgaaattgaagagagttaggatcttgctctgaattaggctttggcttaaggaaatgttgcggctggtttgatcatctattcagacctctaaaactttctccatatcagcaataaggttgttgcactttcttagcatttgtgtgttcactgaagtagcacttttaatgctcctttgcattcacaacttggttaactgtttcatgcaagaggcctagctttcagactttctgagctttcagtgtgccttcctccccaagcttaatcatgtctagcttttggtttaaaatgagagacgtgcaactcttcctttcacttaaacacttagaagccattgtaaggttattaattaacctagttgcaatactgttgtgtctcaaggaatagcgaggcccaagaagaaggagaaaaatgagagaacatttgatctgtgaagcagtcagaaaacacacaccatttatcaattaagtatattgtcttataggagcacatttcacggtacccccaaaacaattacaatagtaacatcacaaatttttttatcacagatcaccatagcagatataagaataataaaaagtttgggccgggtgcagtggctcaagcctgtaatcctaccactttgggagaccgaggcaggagaattgtctgagctcgggagttcaagatcatcctgggcaacatggtgaaaccccgtatctactaaaaaaatacaaaaaaaaattagccaggttttgcggtgggtgcctatagtcctagctactcaggaggctgaggtaggagaattgcttgaacctgggcgggtggaggttgtagcaatgagtcaagatcacgccactgactgcactactgcactccagcctgggcaacaaagcgagactctgtctcaaaaaaaaaaaaaaaaaatttgaaatattgtgagaataaccaaaatgtaatacagagacacaaagtgagtcatgctgttggaaaaatggtgccaatagacttgctgaatgcaacattaccacaagccttcaaggtgtacaaagtacaatatctgcaaagggcaatgacgtgaagcacagtaaaacaaagtatgcctatatgtgaatgaattaatattaatgttgaatgaatattattagctccaaaacccatccgtggtacacttgtctaattgcttcaaaactgattagttggctttcagatagaaagagccaattcctcccccaaccccctgtctttaacaaggctctcatggttcttgcttgtagaatctttcatccaggtaggaaagagaaaacgtgccccaaataactataatgtagaatgtgagaggcactacaaaggaggagcaagatgctgctacagcgttctgaggaagaatcactaattttgtccaggaagactctcagagaagcctccatgtggaaggtttggctgacccagggtttggaggagtattgcatttcattacatacgggagccaaaattcaagactagctagcaggagaagctagcaagtgtgcacacacttcattttccccaccatggccacaaggatgtcctgcccactgctgctgccctt

SEQ ID NO: 40530 - DNA, 2300 bp, Homo sapien
gccatacagtgggtggaggtcaggggtgccgctaaatatctcatagtgcatggaacagcccctacaacagagaatgatccagcctagatgtcagtagtaccacggttgtgaagccctgcaatatatgtagtattgctcagtttatattagttaatcacctgatatggaacataaaaattcaccactagttttcgcacagaaaacctctttatgataatatagtaacttgaaatcaagctagcatttcccatgctataatagtcattatttgctaatccaggatgtaaaattttgaaggcttaagtggcattttagtatctaaggaaaattttctagcaaaaattttattttaaaaacataacttggtatttaatatattggcagttaatatctatttttaaaataaggaaccatcagtgtccctcataaactctctttggatttgaaaagcattgtgttactgcctcctgtatgtttctctcttaatagactaacactatatttagatcgcagtccctatacagatatcttatgaggtaaagttggaagctctatagggtgttttgcagcattgatttaaaatatcccatggataacccacttgcatagaagatgatactaaaaatataaacaaaatttattcccaatctgcccattttcttcagctggaatactagctaggaaactcctaatttagttttctgctttatggtactgtgtttaagcagattcctttcttccataaaatgaaacttgaacaagtggagtgagctgaaaagacaattgattggaagtgtcttgagaggcatagagatgcctgagacccagtcactgcccatatgtctaaaccagaataattgcaagacatgtaataatatacagaataattgcaaggcatgtaatgagaccaatatgtcttcatcacaaatcctctgttgtttgtacatctccagcactgagcaatgaaaactgatgttcatagcaagatttctgaaattctttcctaatcatcaagggaagaataaacttgggcttgatgttctagttatttggttatgtcccaaaggttgttaccaaaggtagttctcgcacatggacaggaatcgatcctcagacatctgaaccacacaaaactatattcaggaatccttgtctttctgctgcaggacctgggaggaaggcaaggtgctcatctttgatgactcctttgagcacgaggtatggcaggatgcctcatctttccggctgatattcatcgtggatgtgtggcatccggaactgacaccacagcagagacgcagccttccagcaatttagcatgaattcatgcaagcttgggaaactctggagagaggctgcctttctggttccatctccttgggtgtgaggatagaatttcgaacaccaagagtcaattcccttgacttgcagcccgagtaattcaaagcctcctcctagggtcagaagacactaaagggaatatttgcctcgctgcaattcatttaggaaacaccctgctgtgtgtcatctcatgacagcactggtcttctgccagtatttaaggtgaacatttgatagcttctaccttaccagccaaagatattttttccacatagaataggtctaattcaatgtataatgagaacatatgtagaaactgtgaatggattgctttagtttgtaatttttctatgcagttatatttttctagtgtagctagactattttgtcatcatgtaccactacatttttgtttattttaatgacaagctgtataaatgctttacttctagctatttaatggtagcattactggggaactcagacttccctcttttaattcttcttagtaaaagatactcatgaaaaaagcagttttattttcctaacaaaaaagaaagagctcattatgtcagtgtctatgaactgtacccatcccaactctcaaatcgtttggttttttttatcttgattgagatcctcttctcactatgctagtggtggagatattgacaaaatcctatttctttcaaagaggaacttttcacaccgaaaaaagagcatggaattattttatattgttataaaaatcccagatgcaaatttttttaatgccaattattagagcttctggggaaaaagtatagttcacggaaataaaactatgttctttcagggttgggtggataggtggctgctagggtgtctggctcctggcggctttgccatccatgaggcaagggctgggaacacagtgtctttgcctatggtagatccatgtgaatgtcaggaagccagct

SEQ ID NO: 40531 - DNA, 2300 bp, Homo sapien
tgagtctttcccatgtagccctgtttggcatgctgggcctcctgtctctgtgagcataataaacttgctttttcctaatcctgtcctgtgagacctcttgtagctgcacctgactaaccatctcataaaagaatgcaaaacagacattcccagggcctaaaacactgacatacagtgggtttatgcagttacaggtgaaaggggacatgcttcatgaaaggagttggaaactagaaaaagccagataagaaaggagacggtgggagatgaggataaaggtagctgctaagaaatgagtccgttggaaaaaactatagagacatcaaagtatgttccactttatattttagaaaggtctttcctaagcatacttgcaacctccagttataaaactgagagtctgaaagctctgaggagcctcaagtgaacactgtatggtgggattagatggaatgggacatgaggggatggtaaatcaatgacaaaagtgttactgtttattttcttttcaaagccagagagaagtcatatggagggggagcagaaaaaaatgttactaaattcagcagcatgcaatagtgataattgtatttcttgcttatgcatatacatgagaaactgattctgtagagaaattagaaagggaaaatagtgaggagtaaaaaattcaatcacacaaaacacatgaacatcaaaaaagtgtcctaaggagaagggtctcagaatacctgcgccttcccatatcttgctcgtggactctgagggtatttgcgtactagttctttaaatgcattcactgcttcctcaatttttccctgttagaaagacaaaattacataaataaaataaattaaaatgaataatcaatcaatattgttatttaatattcagcaagtggttttgtcagagtttcctagattccatcctgagtgtaaagatagttttatctaagattttaaaaaaagctatattaaggcaaacagaaaactagtaatgaacacatatttacttcatttttaaaaagacagaaggacagaaaaccaaacatcgcatgttctcactcatagatgggaattgaacaatgagaacacttggacacagggtggggaacatcacacaccagggcctgtcgtggggtggggggatggaggagggctagcattaggagatatacctaatgtacatgacgggtgaacgggtgcaccacatcaacatggcacatgtatactgtatacatatgtaacaaacctgcacatggtgcacatgtaccatagaacttaaagtataataataaaaacataaataaataataaaatgacaaaaaaaaaagaaaatggcaaggatgcccaatctcgcaaaaaaaaaaaaaaaaaaaaaaaagacaagacacctgataaatgatgtaatatgtggttttgctaaagaaattgaattttccctcaatataagtacaggttctaccatgttctcgaatattgtattagtctgttttcacactgctataaaaaatacctgagactggataatttataaaggaaagaggtttaactgaatcacagttccacgtggctggggaggcctaaggaaacttgcgattgtggcagaaggcaaagaggaatcaaggaccctcctgacatggtggcaagagagagaagagtgaggagcgaagggggaagatccccttataaaaccatcagatctcatgagaacttactatcatgagaacggcatgggggaaactgcccccttgatccaatcaccttccaccaggtgtctctctaggcacatggggattatggggattacaatttgagatgggacttgggtggggacacagtgaaaccatatcattccacccctgatccctcccaattctcatgtcctcacatttcaaaacacaatcatgcctttacaacagtcccacaaaagtttaactcattccagcataaacccaaagtcaaagtccaaagtctcatctgagacaaggcaagtcccatccacttagaagcctgtaaaatcaaaagcaaatcagttacttctaagatacaatgggggtacaggtattggataaatgctcccattcaaaatgggagaaattggaccaagaagcagcttctccgctccttctaggatctccgcctggttcggcccgcctgcctccactcctgcctccaccatgtccatcagggtgatccagaagtcctacaaggtgtccacctctggcccccgggccttcagcagccgctcctacacgagtgggcccggtgcccacatcagctcctcgagcttctcctgagtgg

SEQ ID NO: 40532 - DNA, 2300 bp, Homo sapien
gctccagcagttgcaggggcagatgggattatgaaacgagctctaaattgggggtaaggttatttatgcactagtcacgattgaatcaatagaagtttgtttcactgatgactccaacaaatatttgcatgcctagtttgtgcggagacccattttataagcaaggaaattcaggcctagaagtttgatgacttcccccaaatcaaatttaatggagaagccgtgaagcaaatccaggtgtctaagtatgaaagcataccaagctgcctgctggatcagtgtaggggtttggtttctagtggtctcacccatgggggtatcgtgttgctgtcattctccctccaaaaacaacacaatgaaaggaagcttccagaatatttgtcttaataaatttgtatggtgacgaaatggtgggtcaccttaacccctgtcaacaagtgattcattatcatttaacaatttagcaagcactaagtttagtgggacagatctttgaagaaaataatgggggaaaggacgcttggccagagggcacctgagaccattttgtttagttggccatgatgtctacctacttcactctgtcctaaacctggaccatcaaatgttggtaccataggttgcagactatggtaccaacctcttaaggctttatcttaccatgcattcaatagtttcactggacagaaactgatcttccctttgagactaggcacaccatatttacaaagtgacatatcaagagtatattgtttgcttttgataaaaactgcccctaaaacaggcatctgaggaaagaatcccttctataatttagtgttttgttcctttttggaactagtaaatatcaatagtagtaaggttaataatactagagtaacacctcatttatttgatattataaaaggatagataaaatattgctaataatttaatattgtagttaacatttagctttgaatatatgtgtttcagtgtacacacacacacacactctcagacggatttaatttttatggccctttttgaaaaattgatctagtggtgtattttttaaaaatgtgcatatccttttaacaagaatttcattttttcttccagaagaaatattggcaatatattcttgccgtaagccactggaaattactagtagtattcaaagcttttaaatttttaatttgcttgtgaagctttaaatttgagtgaaaaatttagtcttataaacaacttagaaaggttgctgcctgctctagatactatttgtgctaaattaatttagtatactaatcagaactctaatgaattctgtgaactgctaatgttagatcagtgaataaatggctgattttatttcccagaagagaatgtttggagatgaggttggggagaagttgaaaaaaaaaatcagaatgtggttgtgtaatcttttcctagttccctttcaagatgatctttcccaggtcattattcttactcctgaagatttttctttccctctcctcacctcccagccttccttctatttctttccttcccaccagtcctctgtccctccttttctagtgaaacattttatgttggtgctttatttttgctgttggaggaattattcctgggatggtgtctgtgagtaagaattctagagcattgattaatttcttactatgtatggttttgtttcattcaagcaatctaatggtctttccttgtagccattttattagattctgaagggccaaatcaaactgtttctgggcttggggccatattttatagcaagacttgtttgagttttcaatgaattggtgcttaagctaaagccgttaaagcctgcttccaagaaaacaaaactggcagcacagtttgttccatttcattttttttcagcatgcttgattttttaggggttggagttagctaggaccaactgggaaaagaatcccgtaagtgggagaaaggctgtggtgttgttagggagtgcacttcagcctaagtggtgattagcagcatttagcctctaaaaataactggtgagcagagtttgtagtcaggtccaatttcagttctagaggcccttacagtgcagggattggccagtctcaagctctggtaggcaagtgcatgcagtgtgcctaaaacctgccagcagtacttttgagtttttttttttgttttgttttactttagcatttattattcatggattgaagaaatcaaaatggctgaagataaaggtatatttttgttatttaggctaaaagtggctttagatctagctgacagcttttcactttattttc

SEQ ID NO: 40533 - DNA, 2300 bp, Homo sapien
acttttgattttacaggctcttaggtagaagggacttgccttgtctcagatgagactttggactgtggacttttgggttaatgctgaaatgagttaaggctttgggggactgttgggaaaacatgattggttctgaaatgtgagggcatgaaatttggagggactggggcagaatgatatagtttggctgtgatcccattcaaatctcaacatcaaattgtatctctcagaattcccatgtgttttgggaagaacccagagggaggtaattgaatcatgggggccggtctttcctgtgctattctcgtgatagtgaattaattctcatgaaacctaatgggtttattgggggtttctgcttttacttcttcctcattttctcttgccacctccatgtaagaagtgcctttcacctcctgccatgattctgaggcctccccagccatgtggaactgtaactccaattaaacccctttttctttccagtctgggatatgtctttatctgcagtgtgaaaacggactaatacagtgaccctactttgttttatctctctgagcttccagtatctaatttctttaaaaaattgatatgactacagggttttgtgagaatttaagggtaaaaatatctttggtgtggggggtggggggtggctagagcattgtgttttgaaatttagctctcatttttattttatatgaagcaccatcactcagatttatttcttaatccagttctccacctccttcattgagataatataatagagggttgtaagggggccctgaatgggagaaaggatatatggatgcagaaggagatgccacaagataaaagctgagagagctacttcaataaaaactctgtgaactctcccctcccaccgtctcttgataatagcctaacactatttgacaaaaggtaaagaaaggcattctctttattctgcaacatgacctttggggggtttctgtgcatcatcagggcagggtcaagcagcatccaaccatccacaggtgaaaaggcatggggccggggggaggcgggagtgcttctgaaggcgcgggtgggtgggtttgtggggctggaaaagaggaatgaaaccagatgccacaatgcaactgctctctctggtccctgagccctcctgagacactcccaggggttgctacgaaacatgatcaagagctgtgggttcagcaattgacagaaatgtatcaaatcactaagcatttcttgcttgcctgttacacattgggcatggtgttagcaatggtgacacaaagatgataaagacgtcgctgatctcaagtccttgtctggttcaaccacgtgccaagacattttaatactctgttgggaattctcaggcagcacaggcccaggcgttagcaaagcagccagggatttcagacagagggtgccatccagggtaagaaaatgaactttttgtgtcacatttgcattttcattccttaactaagagtatctgaaaatactgatggcacaaacgaactaaattcctgcttcagcaccaaatggatgaactactacggtttaagcattgaactagtcctaatatcaccattccagaaatgtcttagtattaatcaggacaagaaatagggatctctttcgcaagaagcgagactgcactccttcctttccttgtatacggaaaggggacaaaatccacagtgaaaggcctagaagcggcgcactccgcccacgggcggcccacgtgtccacctattccgcaccgcgccctgtcccatccctatggagcggggtctgccaacgctcgcgagagccctctcggcttccacgtttgccacgttccaaaggaccgagacaaactggaaagccgaaagaggctcgcgctcacaggcagctgcgtagcgcccgaacagccctaagtgagcaggggcggggagcgcggcagggtaccgccgcctcgtaagggcccttgcgattgggtcccaggcgccgtcactcagccttccgggggcggggcgaggccgggaaggggcgtggccgtcgggcggcgagccgcgcgctctcgccccgggagggagtcacaggttcgtacacgcgaggccgggcgcgcgcagccggcaggcgggtgaagtcttcccaggtgctgcaggcggtgctgaggcacagggtctgctgcaggagcagcggcccgaacccgctccagcggcccgccgccgccagcggttcccgcgtcgcgtgtgtacccccgcgcactgaaggaggtccgccagccctcaccagcccccgcggaccgtgcaatg

SEQ ID NO: 40534 - DNA, 2300 bp, Homo sapien
cttgctttaattttagcaaaattcatcttgctctgataggggttcttttcaaactgatgttttatctttcttagtgtcccaaactatatcctgttcggatatgctataacaagttagttcaagttcattttggtgcaaaacagttttaaactctgggcataatgttcattatagcatattccacaaactttttgaagaccccttttatatttaaaaatatatggctatgtgcaatgtacacttaagtacattttattttcccaacaatcatgtgagaaaatagagatttccattttacagataagcaaattgaggctccgaagtatttactgacaaagttaacagaactaaaaaggggagcagataaacaaaccctaatccatctgcccttcccaccaggtgactctcaggaaaagtcttttttcaactattaatatttaactcttaaaccaagaaaagcattctttccactacacttcactgcctagtcactcattagggtattatagaagataattgctgtgtatgaatggattaaatactcacatgagagtttcccagatatggttaaaagccacacaagtcatcaatacttatgcttcaaatcacttgagcatataagtcatttacttgcatttcagaatgcacagttgttgaattgctccatccactttatttgttttgaaattaacttctgtgtactctcgcattgctaatgcctgtccgtgaccttttaggctgatgctgccttaaaagaactagaaaaactgcctgctcactgcattagtcaccaacagaagaaaaattcaccatttccagcccatcaaggtttttagattacttcagctggacaaagtcatcacacaaatatatcttagtcaagtacttacgaggttggaaaagaatcttaggtgaaggagaagtttcaagtctctcacagtcacagataataagagttttaggatcctatatcttctctagccagcagactctatgttgtgtctccagaggtcacacttactgtggaagctccaccagaagctgtttgatactgtggagagagaggcattctcttctggaaaggatgctactttgtaagacatattatttggaatcagcatttttattgtatcatagtctgcttaaaaaatagatcacatgtaacaccatatggaactaaatgagagttgtttgaattgggtcagttcatgggttctgatgcaatggacagagggccagatttgaagtaaagcctggatacaaacatagctcttccatttatgcactggtaactataggtgagtccttcactttctctgatcctctttcctcatcaataaagtcaggaatttaacacagggaattattaacatggccttcagagctaatgcctcataaatttattattttaagcattatgaaatgaaatagcattcataaaagcagcacaaactgctaaaaaaaaggtttgtttataaccatttcatgaattaatcaatatgaaactctcaaaaagaaacacgtttacacaatttgtttgaattaattctccattttgaaggtaaaactgagtatttatggaatcaccctgttgatatttcttctaagattttcaaatggggttgaagaaaacccagcttaaatttcaaatggggttgaaaaaaacccagcttaaatgggtagcctccattgttcatttattttattgggtttataaaagttgaagacatgaaggtagaatgttagaaagtaaaatctcaatgtatctatattatagctgatcaccactaaattttcagacatctaaaaaaacctacttccttcctatattacttgaccacaaacagtgtaataagcctgatttaaaggccctttccctctaaaagtattattttcaatgttcaccaagactgagttttatgagtaaaattttctcccctccaatgtcaaaggaactcagtggtaagagtataaagtgactaaacagttttagccctatccttcttatgaaatagctttgtgaccttaggctaatcacgtcacctctctgagcttccaagttctaattttctaacaatgaagtgccagggagatgagaataaacaacttcaacggcctttccatgcccaaagacactgcagcagagccgtctatgaatgacagatgaaatgccttagaggttgttacagactgaatgtttgtattagacaaaaatgtatatgctgaaatcttaacccccaatgtgggggcattaggaggggaggccattaggagattattacgtcatctttggtattaga

SEQ ID NO: 40535 - DNA, 2300 bp, Homo sapien
caaggcaacatttggataataattttgctgtgcttatagtttgcttatatggggagaatgtgtttagaggatgcaagtacttggccctcttggccaataacctttcaattttttaaaatcaattgaatttctgaataatacattaatgtcatgccaactcagcatgagtcagcatttcttgcttcatccaatagctctcaggcacacaagatcaaagttctgtaagggaaagaaactagaacaagcaaggtcaactccagctaattttgaaacataatgccctagtctcaagagtataactcattctacctgacactttatggccatgagtagaggataaaagatatttatttataaatcaagttctataaaatgaagtagagtttagaagatattctacaagtgttataatactactaaaagaagtgaaaagaagagaaaaaaagaatttaagagaatatgtattttggttgagcctgctacatatttaccacacatattcaacatttcaaatttttgaaaatgaaggcagcatactataacagtttatataaaaatgaaagtgtcaaagaaaacatgactatatttctcagatgttgcatgaactcttgtactctctaacacctgtcataccacactttcattattcacaaacttaactgtgaatattcactttttgaagactgtgccgaatacacattccactaggattttggttaccacttttccataagatttagaatcatgacttagtaccagttagggttatttgccacaaaaaccagaaatgaactctgacttgagcaagagggatttgcttgtgagaaaggatattggtgtgtgtttgtaggggtgtgtgtgtgtgtgtgtgtgtgtgtgatcgcatatgtggggtctcatagaattaatatgaagtaacataccaggtttgaatacaggaagaagccaatagagaaacagaaggaaacatacaagcatataacaggaaacaggaaacaggaagcacaataaccgtctctaaccattaacagcctgggcaggaatccccactgtctataagaatgatgaaataccttcaacctccccctcccaccacctaacttggttaagatgaaaattcccaggaggtagggatcatttggtcaaatagtggaaatgtgcagggaaagaaaagatctgttttatttgtgcttgtgcttctgcagtgaaaagcagacacttagagttactcttcccaaaggaaatcagggtaatattagaaagaaccatgcactctatccagacaaaatggcacaactggcaactatattatctgtagtacaaggattcacagtaatttgttgctcttcttatagacatatgttgttaaaggagtaagcaacatgattactatcattttgtttaagctggtcaaaagattaaaatgtttctataaatatacaactgaagtgtaaaatgccactactcttctaggcacaatattgggaaagaaatttcttagagataatattgatgatcatgctgtgtaactccttggaatatagtaggaggaaaaagcttgagattgcaagcgtatgtgtcgtattctgccactcatacagccatcctaagagcaaaagatagacttcttgaatccacccttgacaagatggatgaagttagtttattcattaaaaatgcttctattggatatagcacactgagaaaaaatgaggcagtgtatttattccaagtcttcataaggctagttttctagtcagctatggtggtttattcttcccatctacaaaatatggcatgataaacttgatttccaagtgccttgcctttgctatattgattgtttgaagttaagtgaagaaaaaatatttcatccttagactaaaagctcatggacaaaagctttggggtttgcttcaatgatagctaagaggcacaaaagagatgataggttgataaaagggaaaatgcatcattgttctttgactatgagtgcatatccttaacaccgcaaagaatagtcatagaagagagcaatcacacttttctataaagcagccctttgtaaatataattcactggtgcaatatctaagtactcggtaggttctgacagtttcatccatcacaatacaggcctcaccatgtcactgcctcagactgataaatgcaaaatgacagtcattcatccggtggaatagaagaagccagggaaaatacaacatgaagtcacttatgccatttgatatagctttgcaatgtgtatcttttctctcccctatcttttgttttgtttgtgta

SEQ ID NO: 40536 - DNA, 2300 bp, Homo sapien
tagctgctaatatggtacttcctaaataaataaaatcatgacaaagtatactggggtaaacatatgtaatttggagagaaggaagtgtcagtatttttattaccatcattcatcacagtctctggagatgaaaaggttacaacaatttctggaagttatagatagaagacttgttcatgtcctctcacttttcagctgcttcctacagcttttagaggggtcaatggcctgagatgttctgcaatgtccttttctacatgctaaactacttatttgtcagtgttcatttttttctattgttttcatccataaagaatgatgacgagtacgtggattgtgcataaaggcagcgtgctcacatgatccttgatcactgatgtcttaacgcttgaattaaaaaaggaggaggagttctgactggacttctcctgtctccatgataatatcagaggtggaatgtaaacaatgaatgttcttgacccttttaataacccaaatcctgaggttattcatgtgtccctactagaatttcaaagatgtgcagacttccttgggaatgataaccgtcttaaattataaacatagatcctgaagaaacgtttcagaaaggataaaaataaaaacaggactgcttttaacgcctgaactaacggcttgagcagtttccatgtctggagtggaagtattaaaaacgcaaagatgtcttgccttttcttaccaacctaccgccaagaacccaggagggcagcagtgggctagaaacagggtttctgtgccaaattctgaaaacagccttttctgagataattggcctgcaggcttgttccctgttctggtgtgcttttgagctccttgcgcagttccaccaggtacaacaaatgcgcccataaaatctgtctttgagccctgatgaaatttcatcctctgcagaacgcctccgctctgttttattaggtgggagagagcaggagagtttccacaggattcagagagagtttgtccgtatcttaactatccgagatcttctttccaaatccttctcaatttatttctgtgaagatatatttatacctattccggaaaccttctccatttctagaaaaagctacgcatcttcttcttcctcgacttctcttttctccctcccggtgaggatttcaaagggtatgtgagaaaagaaccttaagccaggtctccccgcggcgtcctggctagtcccggcgccctgggcgggtgcatcgctccgccgcagcgccccttgccacccaactctgtccaactttccctttcagactccagcaggggcgccctccaggcaaccggctgtggcgggcagaagcaagctcggatgggagacccccgagctgcgtgcccagcgccggctcaacagacttgcccgcgcagcgcccgcgggccccctcgcatccgggcaggttccggagctgggccttgcgctccccggcgcccgcccaccctgggtgtctcgcgtcccggcccttcctccccggaacccaagctaacccaactcccatcctcgccacctctggggcagctcaactaagccgtgtcccctcccttgcaaacgcgtccgaccaccctcccaacccccagcacaaccctcagcaagaaagcccagctgggtctacccagttacaccggtcaacgagggtctccatcgccgccggccgccctaattcacgctcattcatattcattctcttttctctctgtccctcttcctttctccccaaagactcttaactagacaggccgatcctccccagcggcactccctttcattcttcccttcccaccacacacacacacacacacacacacccggacccagacagcccactccactttccagacgcccacctcctacatactcccctcccctaaacagacattcacccactcgccatctgtagcctccttccaaccccccgccccgcccgcctggctccccctccccaagaaacagacctgcacagtgggacgcagggacccccgccagacgctcgggtcgtgcgcaccgcactgacctcggcccgccccgccgggaaactaacaaaggcgggcgcgagccccgagccctggagccgcgagcggcggccgcggggccgaggagcctgggccgggccgggcggggactactccggagtcaggaggcagcagcggcggaggacgaggatctctggcagtcagcgccgctcggacgccgccggcaccatgggctgctgcaccggacgctgctcgctcatctgcctctgcgcgctgcagttggtgagtgccccgag

SEQ ID NO: 40537 - DNA, 2300 bp, Homo sapien
tgtagatgtttagattttagatgtttagatgtttcccactttctcctgtgagcacttaggtctataaatttccttctaagcactccctctaagctctatcccagagattctggtacattgtgtctttgttcttgttggtttcaaagaacttatttatttctgctgtgatctcattattttcccaggagtcattcagaagcaggttgttcagtttccatgtagttgtgtggttttgagtgagtttcttaatcctgagttctaacttgattgcactgtggtctgagagactgtttgttatggttttcattcttttgcatttgctgatgagtgttttacttccagttatgtggtcgattttaggaaaatgtgctatgtgatgctgaggagaatgtatattctgttgatttggggtggagagttctgtagatatctattaggtctgcttggtcaagaggtgagttcaagtcctgaatatccttgttaattttctatctcggtgatctgtctaatacacacaatggagtgttaaagtctcccactattattgtgtggtagtctaagtctctttgtaggtctctaagaacttgctttatgaatctgggtgctccactattaggtgcatacatatttaggatagttagctcttcctgttgcattgatccttttactattatgtaatggccttctgtgtctgttttgatttttgttggcttaaagtctgttttaccagaggctaagattgcaacccctgcttttttttgctttccatttgcctggtaaatatctctccatccttttattttgagcctatgtgtgtctttgcacatgagatgggtctcgaatacaacacaccaatgggttttgactctttatccaatttgccagtctgtgccttttaattggggcatttagcccatttacatttaaggttaatattgttatgtgtgaatttgattctgtcattatgatgatagctggttattttgcccattagttgatgcagcttcttcatagtgtcgatggtctttacattttggaatgtttttgcagtggctggtactggttgttcctttccatatttagtacttctttcagaagctcttgtaaaggcaggcttggtgtgacaaaattcctcagcatttgcttgtctgtaaaggattttatttctccttcacttgtgaagctcagtttggctggatatgaaattctgggttgaaaattcttttctttaagaatgttgaatattagcccccaatctcttgtggcttttagggtttctgcagagagatctgctgttagtatgatgggcttccctttgtaggtaacccaacttttctctctggctgcccttaacattttttctttcagttcaaccttggtgaatctgacgattatgtgtcttggggttgctcttctcaaagagtatctttgtggtgttctctgtatttcctgaatttgtattctgtatttcctaagcctgccttgcgaggttggggaagttctcctggattatatcctaaattgtgctttccaacttgattccattctccccatcacttttaggtacaccaatcaaacgttggcttggtcttttcacatagtcccatatttctgagaggttctgttcattccttttccatttttttcttctaatcttgtcttcatgctttatttccttaagttgatcttcagtctctgatatcctttcttctgcttgatcgattcagctattgatacttgtgtatgcttcatgaagttctcgtgctgtgtttttcagctccatcaggtcatttgtgttcttctctaaactggttattctctaaactggttattctagttagcaattcctctaaccttttatcaaggttcttagcttcctcgtattgggttactatatgttccattcgctctgaggagttcgttattacccatcttctgaagcttacttctgtcaatttgtcaaacacattctccattcagtattgttcccttgctggtaaggagttgtgatcctttggaggagaagaggcgttctggttttgggaattttcagccttattggactggtttttcctcatctttgtggctttatctacctttggtctttggcattggtgacctttggaaggagtgtttacatggtcatgctctttgttgatgttgatgctattgctttctgtttgttaattttctttctaacagtcaggcccttcttctgctggtctgctggagttttctgggggtccactccataccctgtttgcatgggtatcaccagcagaggctgcagaacagcaaag

SEQ ID NO: 40538 - DNA, 2300 bp, Homo sapien
tacacacttatatccagaatgtactgggttacagaacatttagatcttcacctttaccagatattgcttaatttttctcaaaaatagttataataattacaattccacaagaaatgcagagaactgtcattttactacatccttgacttattatcaaaggcttacatttttgtcaatttacagaaacctgcttccaaagatggaggaagctgggagaccaaagaggctgaccaatcgaatttctcagaaagaaatacttagtagagacaaacagaagcgacccctgcacttgccctccagaaagtatgctttatttagcaagcctctagggtaaagacaagtgcaactagttagctcttagactattgtgatcactggggacgttagataagcatctttatgaggggttatatatgttatgagcattgtttaaagacctttgctgcagaacacctcggtatgctgtgggtcaaacatcagtccccaggatagttttgcttcaagatggtgtcactcttgccaggaaacaggctgtttttctacacagtctaatggatgtgacatattatcttgcatttttctgatgactacagaaagtttggtttgcttttcacattctttttccatttttctattgtgtcatttttcttattatttcttcgcatattttagaaatactttatattttataactatattttccaagtttgtgctttaactttaattttcttatatagtcaatttttaattaacatttttatttttaatgttttatgaaactcttccaacagcctaagttaggaagatatatttatatattttcttatcaaagtataatattttgctttcgtatttacatatgcacttcacctcgagtttatttttgtgtgtaacgccgggtaaaaaatttttcctatgtggatagtcaattattctggcaccacaagttcatatttacaaggctacttgtctatttaatcatgctcaaaaccagctcggccctttcatgtctttcatcacatcctttgttgcttacctctcaccacacccttctacagaagcgttattttcttgttaaaccagactattcactgcatttactcttcttgcaacatgctaaaattgttcctgttgtctctacgagtcacgctttctgccttttttccttactgaatttaaacctcttgtgaaaaagactgtccaatttacgttttcacccttaatactgagcattgatgtagcaggttttcaaatattcttgttttatgctgaatttcagttggcccttatagatggaaactttcactgagtacaagctatatatccatgtatttaggaacaatcaacagttttaacgaataggaaccagtcatcttttctgccccggtggataggcttagtggtggtcggtggatggcgctgaccgcggttgatcagaggaagctgacgccgtttgcaggcgtggcctgggcgtgcccgcttcaaagtagacgcccggagttggcccagttctgaccctagtgatgcgcctgtgcgtgtgttcctatcgccgtcccgtcttcacttcctacagatgccgcgaccccccaaatagcaagtgtggacattcacattcaggggcacaggctgtccgtacagcgaacgttgtcaccattcccggagatagggccccgaccttcaagggggcggtgcggttggcgcgcagttctcaggcgccttctagaatcccctgccagcctccccgctgcctggttaccaaactcggccggggacacccaacctcccctctcgaggacctgggttggccagcccagctttgtacgggtgactgaagtccacatcgacgtaacagttgaaagggaaggacgcggagaccacccggtacccgccccaggcgtttccagagtctccgcttaggcggcccgtgggggtcggggtcgcggtcgcggtcgcggaccggggacagagcaatggggcgggcgcgcagcgccggctgcactcccagagcctcccaccgccgccccacggccgcctagcgcgcgccgggactgcatttcccataggcccacgctgcggagcaccgcccacccgagtctcacgcgagtgcgctgccgcgaggtgtccctgccgcagcccccgcccgcccgcagagcttttgaaaggcggcgggaggcggcgagcgccatggccagtccgggctgcctgctgtgcgtgctgggcctgctactctgcggggcggcgagcctcgagctgtctagaccccacggcgacaccgccaagaagcccatcatcggtaagga

SEQ ID NO: 40539 - DNA, 2300 bp, Homo sapien
ttgcaccttcaatggctatagctagataatgtccccgatctctcactgaactttctgcccaatttcaaaaaagtggatgctaattactaaaaacaagtaggagagagcattgaaaaaaatcttttggaagggaggaaaacatgctctataggccctctcttattatttttagacacttaaaacttctagagaagaaaggctaccattgtcttttaattcttcggagcttccagaaaggccttgcacagtcagcccctcttgactagtactttcttccttccccctctctcctttggttggcaaacattcccagtgcattcactaaggccgtgcaaacagcccctttgtgaggcctttccaaatctcttaggcagtgtcggtagtgttcctctgtgttctcacaccatggtctccaaacctgttttgtacacttgtcacattgacttgtaaacctttactcaaatagcttccgtctcactctgagtataagccaaagctaggaatcttttgtccccaggtatagttgctttctggttggattgggattatttactctaatgcttcccatctccctcagaacagaagccaaagcccacagccttccagtcccagatacccctgggccaagctcgctcacctcactcaggtgtttattccaacgtcactgtaggtgctgcccactttttggcttcgtttccccatagcattgactgccatttcttatatcacattatttactgatttatcttgttaatcatccattccctcccccaaaagaatgaaaactccttgaaagcaagagttgtgtctattttgttcacaggagtgccctcagtacctagaatagggtctggacacagtaaccacccaatcactctttctttaatgaatgaaatggcagtctctttctccaccctctgagctccttaaaagcaaagatttggtttaatttgtttttctccaagtccagcatttacctggagcatagtatgcatttaataagaaacggtttcatggattctctcttgggaagacaaaacaattctaggctagttccaatatggagaaatcaagaaaaggacaacggaacagcctttcaagtttccacattatttccctacttcatcttcattccccaggctttcatagactcaatcatataacagctttggactgtccattttagcgagtagacatgcttaaagtttagtgatggtggagtgtaacagagtaagtttatggtgctaaaaatatatggaggccagtcatggtggctcaggcctgtaatcccaaaactttgggaggcccaggcgggaggatcacttgagcccaggagttggaggctgctgtgagccttgatcagactgctgcactccagcctgggcgacagtgagaccctgtctctaaataagtaaataataaattaataaaaaatataaatatataaatattggtgcggaagggggtcagggtacgcgctagtcatttatttgtgtcagtaacaggggccggtgccaggattagagaagttttcccgaatcgggaggaagggagaaaagcggtgaggctgccaaggaggcattatggaatgcgtgttttagaatgcatgctgtaatccagtgcgaggcgaggggtcatcagtctggaatctgatggaaggagaagggagagggctcagtagcgcgtcggccactggccattaaaggctcgttctaaggctcctttcagctccaagattgcaagaaggaaggaagaatggaaggaagagagagggaggaaggaaaaagaaaaaaaaaaagattctctagtagatcgtaaaaatcatcccaactaactttgacatcgtttcctcggtgtttgaacatcagtggcttccctcgctgggaaaaagctggggtccctaactaaagctgctaaacaggtggctagcacccgtggggacactgtgcggtttcctttaagaggcagctctgctcgccgcgggtccggcgtgcgaggccggagaccgccctgccaggctggagagtggttgtgcgacgggcagcggccgcagaggcggggccgagggtggcgcggggcgcgcgcttttcccgggtgcccgggtagctgcggccgcagcagcggcggcgggcatggcagaggcgcgatcccagccctcggcggggccgcagctcaacgcgctaccggaccactctccgttgctgcagccgggcctggcggcgctgcggcgccgggcccgggaagctggcgtcccgctcgcgccgctgccgctcaccgactccttcctgctgcggttcctg

SEQ ID NO: 40540 - DNA, 2300 bp, Homo sapien
tcattttctcctgctgccctccatgtaagaagtggcttttgcctcctgccgtgattctgaggcctccccagccatgtggaactttaaacacaatttaacccctctttctcttctcagtctcgggtatgtctttatcagcagcatgaaaacggactaatacactcctggaggcattggagatggtttcaggtagtccccagatgtacttcaaaagtctgttaatattaaattaagtaggtttatatctgagggtaggtattattgctaggaagaaaagccataaagaaagaagtttgttgagcaaaaatgaaagagaatagaagctcataatattatgtcattaggcagtattatatggtagttattagagtgggaacttgggagtcacactgcttgagttcaaatcctggctctcatagtgactagctgtgttgtttgtggcgtgtttcctaacctcactgtgtcagtttttataatggcacttctgcaaggatgctgtgggaattaacatgacatataatgtgttctcaataaatgtaagcgattactatttccgggaatcttttagcgaaggaacaattcattacctgtatatagccacaatttgctgaaagcttacttttgtgtcaggaactgtacacgaaggacctaattttactcatgaggaagctaaagcttagaaagtttcagtgcctttaccaagattataacactaattcttgctccactagaatttaaattcgaattgattgggttccaaagccatgatactaaggatcaaagacaaggcttgcaagatttaagcctcctcttgtatattctctctcaagttcctggctcatagcatgtaccagcaaactcattaaaactaaaacggtctgtttgggagtgaaggatgggagacattgagagcaacagcagaaagggttgggggagtcttgggaaatgcaagggtgcttaggttgggacccgtggcaatgaatggaagggcaagggaaactgtctaaccagaacttaaaaatgcctcttggtgatttacatgaaaagtggcctctcaagtttttctattattcagtgcttctaagatactgttgcactgtaaaccacaaaattaatcttatgattctacaattttactttctaaatgatcacttatttgatggtttttgaagtacagaaagtatttggtcatttaaattatttccttccatggactctgtatcactgagacaaggaatctttgcctttattgtagatatttcaatgaaaatgtcaacacgttgcaaattggcatactttgggtttgccaatatgtgataaagaactttttcaatggaaactttccctcttttcagggccgaaaagacgctctgcaactatacttaagtatcctaggcaactttattcattcaaaaacatcagagcggagtcaaaagcacaaatccatgaattgggcggcgaagtctgactccagagattacggctgaactgggtttggaaagactgaacccgcgccggtgctcctcctgtttgcttggacttaagtttgagtaccacaactctaacctgccacttcagctgcacgggcaggcttgtggggacccagcaactccgtccagagagcggctgagtcagccagccgtccccacggctttgggcagccgccgaaggctcctgctaggcccggctggctcaccgggaagttccctgcctccgtcccgtcagcctccaggagggcgccgccggccgccgtgacttcagcaaggcactactatctccgtcagccgccgcctcggccatcttcctgcccggagtgcaacaaaatccggctctggccagccttccagctgacgccactctgccagggccctgcagcctcggagcgggatagaaggaagccgcagaaaagacgctgaaagttggcgctcgctgacgccccgacgcgctccctccatgacgcatgcgcccaccggccgtgagcgcgggtccggtctccggtgacgtggcggtgaggaggcggagccaagatcagcggcgggagggtgggggaggaagagcgaggtgagcgcggacgtcagagtggagagcggaaggtcagggaggctcggagcggaagtgagactagggagtctgtccgccattgtggacccgagaagcagagagcgagagggggaagaggagcgtgcaagcggaaaagacgggcctcttcctccgactcccgagcgcgaggccctcattttgggttctcagcgaacggcggcagcggcggcggctggaacaatcactcggccaagggcgac

SEQ ID NO: 40541 - DNA, 2300 bp, Homo sapien
tcaaatcctggctctcatagtgactagctgtgttgtttgtggcgtgtttcctaacctcactgtgtcagtttttataatggcacttctgcaaggatgctgtgggaattaacatgacatataatgtgttctcaataaatgtaagcgattactatttccgggaatcttttagcgaaggaacaattcattacctgtatatagccacaatttgctgaaagcttacttttgtgtcaggaactgtacacgaaggacctaattttactcatgaggaagctaaagcttagaaagtttcagtgcctttaccaagattataacactaattcttgctccactagaatttaaattcgaattgattgggttccaaagccatgatactaaggatcaaagacaaggcttgcaagatttaagcctcctcttgtatattctctctcaagttcctggctcatagcatgtaccagcaaactcattaaaactaaaacggtctgtttgggagtgaaggatgggagacattgagagcaacagcagaaagggttgggggagtcttgggaaatgcaagggtgcttaggttgggacccgtggcaatgaatggaagggcaagggaaactgtctaaccagaacttaaaaatgcctcttggtgatttacatgaaaagtggcctctcaagtttttctattattcagtgcttctaagatactgttgcactgtaaaccacaaaattaatcttatgattctacaattttactttctaaatgatcacttatttgatggtttttgaagtacagaaagtatttggtcatttaaattatttccttccatggactctgtatcactgagacaaggaatctttgcctttattgtagatatttcaatgaaaatgtcaacacgttgcaaattggcatactttgggtttgccaatatgtgataaagaactttttcaatggaaactttccctcttttcagggccgaaaagacgctctgcaactatacttaagtatcctaggcaactttattcattcaaaaacatcagagcggagtcaaaagcacaaatccatgaattgggcggcgaagtctgactccagagattacggctgaactgggtttggaaagactgaacccgcgccggtgctcctcctgtttgcttggacttaagtttgagtaccacaactctaacctgccacttcagctgcacgggcaggcttgtggggacccagcaactccgtccagagagcggctgagtcagccagccgtccccacggctttgggcagccgccgaaggctcctgctaggcccggctggctcaccgggaagttccctgcctccgtcccgtcagcctccaggagggcgccgccggccgccgtgacttcagcaaggcactactatctccgtcagccgccgcctcggccatcttcctgcccggagtgcaacaaaatccggctctggccagccttccagctgacgccactctgccagggccctgcagcctcggagcgggatagaaggaagccgcagaaaagacgctgaaagttggcgctcgctgacgccccgacgcgctccctccatgacgcatgcgcccaccggccgtgagcgcgggtccggtctccggtgacgtggcggtgaggaggcggagccaagatcagcggcgggagggtgggggaggaagagcgaggtgagcgcggacgtcagagtggagagcggaaggtcagggaggctcggagcggaagtgagactagggagtctgtccgccattgtggacccgagaagcagagagcgagagggggaagaggagcgtgcaagcggaaaagacgggcctcttcctccgactcccgagcgcgaggccctcattttgggttctcagcgaacggcggcagcggcggcggctggaacaatcactcggccaagggcgacagccaactgctgtgagtgcacggggagaggcccaggcagcggcggcggcggcggctctcgggttgcggtgaagaatgtcagccactagcgtggatcaggtgagggagcagaggccccaggcttggcgaaggcccgagccccggagctccaccctcgcgcggggcttcggctcctccccgtcgccgccgctgccggccccataacggtgccccgggcgcaagttgctgcggtgtagctacccgggccggggcgtgcgccctggccccgtagcttgcgggcgggcgggcgcggtgccgcggcgggtgggggcaaggaccggtcttaggggccttaggacagatcctgagggcggcagacatggggcggagaccgggcgagctctgggagacggattccgag

SEQ ID NO: 40542 - DNA, 2300 bp, Homo sapien
aattatcttatatctttcttattatgaaatctgagatgtcttccattacttctgcatcaccagtgagttcttccttactagtaagaattagcttcaatgttctacatattacaacttctctcttcttggagaacaaagtctcatcaaggcaattgaagcatttatcaaagccctgcttttagcaaaataaggcttccagcagatgtctggatagttcaagtttcctatcacaaccagatcatattcctgcacctgttttataatctgtatgaggaatgcatccttccctcctctcactgtccagtcatccacagtagtgacatcacatctgtttccttctcaatttaccctcaaccagatgttcttaactgtgtttccaaaatcagttcattaactttttctggaagaaacttcttagagacagcaatactttccaattatttctattaggtgttatttcttttgtccatgtttaatgtcactttcattgccttttatggtattggtgatttttattagcacatgtgtatccatttgtggtaaattcttcatttatttcattactccatgaaatagtgtgtaggtgcctgtaatcgtaggtggtaatcgtgaccttcctgtctgtttcacaccctgaaagtaattaagttctttctcatctaaaagggaaagcaatctcacaacagtaattcttgatgatatcaaaactgtatcaagttctctgtggaaatttttcttctttaccctcaatttttacctttcagagaccttttctaacaggtcagtgagactcttgttaaatatgttcttgtctgcaaattgcccaatgagtcattatggactgagttataaatactaagaaaaatcattctcatgtgaatcattgttcaacttgtttggcagtgaggatgcaaatttaaatgaaagagaaaattctcccattgctctttgtggctctaagcaactaattctgacaggacaaactgcattatgtgggtgaggcagaatttttaaataaaaatgttttcattgtttttagttcttctcccccttttttttcattttgagacatgctttatgagatgagtaacagcactgtacaagcttctcacagatgtcaatgatccaaaataatatttttttagtgtaatctctatgcttagcttcctcatattactgcaaaagatacccctccactccaaaacgtctagtttaatgacggcttccagaacacagggtgattagtagagttttgttttggttatttatatgcttgttttaaacaatgttaaacaaaaaaagatctcttctgttagtattgagtcccattacaaatatttctttcaatcctatgatacagcaataggggtggccgttctaaaatgagaatgttgctgatatccagatacagaactgtttccagaaaggagagtccccctggtggccaattttttcctaagaaaattcctggtaacaactacatgacagggaagttagaagctcaaataaaccaagcctaaggtggccagtgcataacaccttagccgtgcaagtcatctgttctcaaggaatatatggccaaagcacagcaggaaagaacaacagaaaataggaatatgcagagaacagacataacgtaaatataacttaaattgcaattaatgaatagcagggaaaacatcaaaatcaacagtgtggtgcaagataaggaatgtaaccataggaaatagaaaagttgcaagaggtaaatggcaaaaaggaaaaaattaaatagagtgcaaaaatacctgtgtcaataaagccatagttgccactggtatttcaagcctaagatggaaaaaataacacaaaggtgggcttcctgggcccttaatggctcaggatggtaggaaatagactaagtgaagacaggtagttccaatgagagaggggcaggaacacagcagtccaaactagaagatccaaagaggtatggtacacattggcttggtatagaagaactccaatggccatagaaattcagtctctgaggtaggacaaagcaatagaatgttgcaagcagaagtgaggccatgtgtctaagaactcagttcactccttgcatgacaccaagcagcaagtgtaattgaagggaaatgctctatccagataccaagaggactagtcacgagaccaggcctcaaaacaggaaaatggttccaatggagaagtagagtatgagtcaagaattgagagatgagcaatatacattagcattataaaacactaaagaaagtatacatgcctagagcctctgaggc

SEQ ID NO: 40543 - DNA, 2300 bp, Homo sapien
attcatttaaaaacaaaaacattcacatttgagaaaatttttataaggttcatctttaataatcttttctctattcatgattgctttttgcagttagtgtttaaagttagtatacatatgtctctcattcaattgtgaaatatgaaggtaattttgttaagtttttgtatctccagtctcaaatgtgcagcttgacagataaaaagtgctcaacaattgtctagtcaaagagtaagtgtaaggcggaactggcaggcattttaatgttttggattctgaaggctgaattttggacacaactacaagcccctcgatgctccctgtacgatggttgaaaaagttgacacagtgcctggcagggataagctactcaattacttctaactattcacacgataatttctcggttgcataccatgtgcaggcatttggcccaggcaccttctgtgctttatttcattgagtcatatcaacagctatgagtctgtaaagtgggtcttttccttgtttccttggacgttaaactgagacctaaagaaacacaatctaatggacacacagttgttaaggggcaaaaccagaattcagtgtgtgaacataggagttgaggagaactcctgcttggttcttttgcattctccagtttctaaaagcctccaaagccttttgtccctgaaggccagagaaaggaaagagaaggatggggcgggatgggtgaggggttctcaatggcctctgattaattttagtccctgtgcttaccagttgcacttctcattgtctttccctagctggttgtcagtgactttcaaaatataacttaacgggaacatttgagaaattacttggagagagataatctatagaatgtgatgtaattattgctcactgcagggctgccccgaggagtgacaagggtgtgtattgaggcagcttgtgaagaggacttgaacgctgtaccagctgcatatccctggcttcctcccaagagctcctgatgggatattctccatgatttctaagaccacctggagttattagtcccttgaggacccccataagatgctttattatcctttcgtttgctccccaggtgctttaactcagatcctcattcattgtgagattggaaaaacatgcacgtgcaggtcttgtcttaggtagcaataaaatgctattactaggtccccaaatgtaaatgacacaggcaactatttcataacatcaataaatctaatgtctgtgtaatccgaaaccagagatccgaactttacctttgggctaactcaaaatctgtatcattgcagtcattagaaaccagtttttattccttgtcttattgaagagactgctgttgatagtttctaatttttaaataatgagtttttctttttagatataagccatgagacaactttaaaagtttgtttctgaggaggtaagagttgaatttaaaacaacaaatgaagcctttgcatcactagcattcttttccatgtgtattatccaacactgcaatgttagaaatatttttgaaagtgtttttgtaaaaaaatgtatttctaaaaaaagagcatcagtgagaaagaaatgaatttatgtaaaaagcttttcaaataaaagtgtaaaaattttcacttagggcacacaaataaaataattgtctgagaatatggtcattttcagtaatatgacactaacaatttctaactgtatctctatgtagggtttaaatttttttatgaacacgaattcattatagaacaaattactgcatttaagagaaacatcaaaagctgactatttatttacttttaccagttattcttcctccgtggaaattatgcttctgaatatagtgaataaaaccagaggtgattacattgattttgacttagtgctattttcaacataataatatttcttatgggatagagagcataaaagggaaggcaaagggaagaaaatcacctttgcatttccactgtgtcagcaggtcatgcatttgatgtgttacgtcataatgcaaaaattagctgggcatggtggcgggtgcctgtaatcccagctattcatgagactgaggcagagaattgcttgaactctggaggtggaggttgcagtgagctgagatcatgccactgcactccagcctgggtgacagagtgagactatgtctcaaaaaaagaaagaaagaaagaaagaaaaatttgaagtatagaggggaatcacaaaaattctaaatggtagtaagtattaagtccaaaatagtataaataaaattgaaatttaggataggg

SEQ ID NO: 40544 - DNA, 2300 bp, Homo sapien
ttctgtttatatgatggattacatttattgatttgtgtatgttgaaccagccttgcatcccagggatgaagccaacttgatcgtggtagataagctatttgtgctgatggattcagtttgccagtattttattgaggatttttgcatcgatgttcatcagggatattggtctaaaattctctttttttgttgtgtctctgccaggctttgttttaagtgtgtttgtagtttctcattgaatcgttattaccctggctgctttaaaattttgtcagattattcaaatgcttttcattcattttgagaaccctttggttattagtattatgagtaattttttggaaaactgaatgtttttgtatttatcttatgagactctggatcttattttattcatttttagcttcttaatacactccagcaggggaaggagaaggctaccttgttactaccaggtggaggtagaagcccaggttcttcactggcctccatttacccctgagtgtgtgtgtgtggtggggagatgatttctggtcctgctgggctgctgaacaggagcagaaggtttgactttccaactgttctccactgacaccatgttgggagcaattgcaatgcagggtgtagaagttcgggatcccctattgtctgtacatttgccactaataccatgaaggaagaaaggagtccttcatcagctagtgagcatgaaagttccagctacttcctttgccttctctgacaccaacgcagtgggggttttggaccatttgtcacagccacaggagggtggaagtctgagcttctcatttagcctttactatcacgggtggtgctgaggcctcagtttttgtttatttggttttgtttatttgttgtttgcttttccatgatgtttggctggagtagaataatgattatctaaaagttttccttctagaggccacacctttctttgtcctttgactagacagagtgggatcctgctggggcttcttttgtctgggtcttaggtttctggattgctgactatttcagctccgtgtctgagaaatcccagggaactcattattgtgtcagtcccatgtcctgagatccctagctagcctgtccttttgtccccaccttccagagtcttgttttacttaacatataatgtccatggtttgtcgttgcatttagcaggatgaataggaaatgtacacctatttcatgtttctgggagtggacttttcaatgatattttatcaccaggattttaattagggtctgcatcctgaagcaggaagcactggtgtcagttcctggaggccgtaaagaagaccactctaatgagtttctaaacccaggagactgctactcccttctggcaacaccatgccctttgggacacactaggacatttttcacatgcaagtgcatgatcttattttcgtgaatatagtttgtgaagtataaaccagttttcccctactttctttaaaactgtttactcatcctcattaagaacactaaatataaggtctctaatagtccaagaaggattgcagcacctataagactagaagatttgagaatacatatggatcttgatatgttcacccgtaaccacagaaaagtattttaaaaaaaatacaactcttcctggttggggggaagcaaaaggaacttgaagagaagcttgagcaatgctggcaaatgtttaaaaatcagcatttgggggaggggggtcgggggtgggtggaaagctgcaatttgtaatgttttcaattctgtagtataaatactcttatcatggctgatttcaagccaccaatgtgccagcactcattgtgaagttgggaagagatgctaacaattggctttcacaagtcaggctgtgccagctcccctgcaccaccacaagtgacagcaactgataaaattctttgagaaagaggcttcctgcccaccgcattccactgttcagcttctagaggaattgtcagtagaacttctactaaatttggatacctgggggtaagatagaccaagcctgttctactactggacaatggacaatcaaacttgtttctagaacttctgggaattctatcctatgacgatcatggcatggaaagtaaaaatgactgtatgtgtcagtgtcagagaggcctaaggaactttcaccaagtctcctacagaacagagaagagaggctatgatttccttatgttcctgagaaaggcaaagcatttgtctgaaagcgaaagccaggagatcaaagtaacttccctgtcacaagaggaaacatgagagca

SEQ ID NO: 40545 - DNA, 2300 bp, Homo sapien
gaggggaggatgctgggtaaagtgcccacccggggtggtctaaagtcgtcaccccacagagcagattctgctgctaaccagagcagagagccgcaccttcccagcggcgggccccagtgcgcacagcgtgactttgcctcccccaggctcagcaagtcgttgacgatctttagcagtcccgcatcccaggtcaataaactggaaacggatagaatgagaatcatggatgagagataaagggcagcggggtgatgcgcatttcttgtagtgcctccaaaaaaccgtggtctctcgccgctaataaaacacccttgtggtgaggcctttggtctggtctcaactgcagagatgttttgtcttaggtaattcgagcccccaaatccagcaccttgggattatattatacacacacttatattctttctgtattttttaaaattcttctttcatttttggtttgctgctttttgcaaacgacccggttggagatattgttggatatttcaagcagatgtcaggtgggtgttggcggcctgtgagtcctcctgcagtagcagcagcagccaagtacggtttgataaatgctcaaggtgaaatgtggccttactcaaaaccccagggtgatttagggtagaagagcgaatattcagaggcgggaagtggtgagttatattgttacattccctttcgatggaactaaatgcggttatctgcggtcctaacctctctcgcatcggagtgcaatgtttctgaacaagctctgttagaactggaaaatgggagggggtgagggagcccactgacgacttaacggaatcttactgaagaaaatacaaagataaccgagatattcatgatattacatctcatgatcttccagacaagcgtctctccggaacaagaaaatattcccaaatttctccctagcagtggccttgggtggagtgagggaggaggtgggtggtgagtgtagagaagagaaggtctctctctgttgtcaccctcagcccccttcattgaggaggaacaatggccaggcctggagttcttcctgaaagagaaactgcaggaaggcagagttgctctttgtaccccagcccctttagaggagggggagtcatacacaggatccccctgaccactgggcggtgtccgggagatcagaacccctcagatactctgggagctaaaaaggcgccgccctgtcctcccagaagtcccacgcagtcgctggaagaaacccaagcaaaacccagcgacctcaaaattcgccagggggataagcggggagaggaaaaccactcactctcacatgccctgtcagtccccccacgccaccatcccaatgtctgatcaggcttgattctgctgacgtgtgtatttcagattaaggatgtatttatttatttatttatttatttaatccttcagatcttcccaccccataaaagagacttaattcctttccagggcgacgggttgataaaaggctccattttaaagcaatgggggaatcatatgactgtgaccttgacatgtgaaaggggggaggggcaggtagtttggggcccagaccttaggcctctgcaattctggggcgttctaggcccttgataagaacatcaacaagagggatttattttcaaaggttaccattagcagttcattcactaaagttgagaattcggtatttttatattacgtgaaatacatgatttaattatactccaaaaacaaattaaggacaggccttctacacaaattggaggcagctaaatgctcttttgtgcctgcagccctcgggttgttaaagaggctgctgatgcatgagaagtaagtgactgatttaactcattgggatgcaggaagcgacctgccctcttttgaaaaaaagcgagagagagagagagagagaaagagagagagagacttcgagcttgagagagggaggggagaggagaggagggagaaggaaatgacagagagagagagagaaaggagagagagaacgcagagggagggaggcagggagggagaccaaacccccgctttactgcgttgaaagcttctgaatttcaagcagaaagtagaaggagctccaaaggcagtgagcgtctttccttgggctgcgtgtgccgagcgtagacaatgaaaatcttcatccccctcccccattctactaggctacaagattcttgttttcgttccttctcaccggtggaagatgtgtaaaatcaaagatgtagaggtgtgtagtgatttttttaaaagccaactaaccaccgcacggactgcgacgc

SEQ ID NO: 40546 - DNA, 2300 bp, Homo sapien
tctggatcagcctcggttgttcttggagggttcgggaagggagaatgtaaaaacaagtgctcctctccggatgggcactggtacacgcggtcatctcactcctgagttcggtctctgggtacacatggtatttagcagctggttttcatccttatgacataagtaaaaacaatatttcccaacaccttccaataactctttcttatatggcagaagtactgaagactatgcaatttttggtttctctggtttcattaaaaaccttttaattgtggctttcggagttggccccaggtgttggactcttttcattacattttgctctaatgtgatgaaattctaattctctccttaccatatggttaaatttccccactgagaattagttgaaaaaggagaaataatctattaatctctgtaatagattcacaaatgaggttcgccacagaacctgtttttgaatggtaatatcagaacagttgggcaccttatttcataaaggaagggtgagggcgacacaaaaatgtctgtattttcacctggaaaggatgaaaggggctcagcagtatcttccataataattccctgagatccagtcttccggggacagaaatactacgtagacgtcggttacctacgctcctttggatgtcctggaacctaaagactgagaaagatcaggcggggctacgggaggctcttgtgcctgggaccgagaccgggggttctgcaggcttgagcggtcccacttgtctcgtctgggaccccgaggctgtttacatgcagggcagcccctcgctcaccgcacccctcccaccgtccctcccccggcgttcgcagctgttaacctctccctttagaaagctaaagacacgctagtgttattgtttttcaattagcagctttgttttcactgggatcataaacaaaggttctctctaaacataggtgggtcgtgtatgcatgacactaacttatcaaagtccttgggtcactttcgggagggcggaggctggcccggtcgtggctctgggcaggatggggacacatctcacaatgtctgacttagttctccagccagcttgccctttttgtgggctgccaccttctgcggggcgccaggattcttgccggcccgaagtggacatttgaagggcgaaggatcgatcatgtcagggactggtggggggtgccatgcggggctgtgagcggcagagccgggatggcagagcaggggcgacactgagggcggcaaaggccctgccagctcagctagacccaggatcttcgcaggacctttgtctttcgcccttaggcaacaaacacttgagcgcatctcgtggcccttcccgaccccatctccacgacctcctgccacctccctcctctccctggccatccaagcttctggaacaaacttttgcacaacttcattttactcggtaggagccaaaagcctcttccttttgtaattcaagaaaatccccctagtcttcccggaggaggtggctgcttaatagtcgctgaaaactttgctttgggaaaaggccgaagaatttatggaagctctaaataccggccttataacaaccgatagggaatggtctttgaggtttatgcactcgtaaacttttgctgattgcttctgggaagttgtcaggcacttaacactgcatttatcttacagggcaatgaaaacacatctgcccggtgtctcgttacttggtttaatcgtcgccagccctaagtcacggcctcggctccctctcctcaactgtgtgggatcccgccgcctggtttcggccgggcggaggggtgacgtcagccgctcacacagtgccccctggccgctggagctcgggaaatctgtgcgctcgaacttggctccgccaagaagctgggcaaggatccgggctcctgatggaactggcaagttggaaaagtggcaaaggaaaagccaacatgagcgctttcggcttgcgcgggcagaaagggtgggaaatcaggccacggcgaaatcttctgactcacagatgaccgcttagaatgaaaactacggaagggaagtcctctgactctgcagtttcacagagagtcactgagttaccaaagcagttgggaaacagaggcagaggactgcccccactctgtccgcagcaggggtatgggaggcagctcgggacactccagggaccaagcgggcagtgggcgccgtccccgaggaacacccagcccagcgcccctggttctgggctggttggcttatcgaggccggttggccaaagcatcaggaaagggaa

SEQ ID NO: 40547 - DNA, 2300 bp, Homo sapien
cacagccccgcatggcaccccccaccagtccctgacatgatcgatccttcgcccttcaaatgtccacttcgggccggcaagaatcctggcgccccgcagaaggtggcagcccacaaaaagggcaagctggctggagaactaagtcagacattgtgagatgtgtccccatcctgcccagagccacgaccgggccagcctccgccctcccgaaagtgacccaaggactttgataagttagtgtcatgcatacacgacccacctatgtttagagagaacctttgtttatgatcccagtgaaaacaaagctgctaattgaaaaacaataacactagcgtgtctttagctttctaaagggagaggttaacagctgcgaacgccgggggagggacggtgggaggggtgcggtgagcgaggggctgccctgcatgtaaacagcctcggggtcccagacgagacaagtgggaccgctcaagcctgcagaacccccggtctcggtcccaggcacaagagcctcccgtagccccgcctgatctttctcagtctttaggttccaggacatccaaaggagcgtaggtaaccgacgtctacgtagtatttctgtccccggaagactggatctcagggaattattatggaagatactgctgagcccctttcatcctttccaggtgaaaatacagacatttttgtgtcgccctcacccttcctttatgaaataaggtgcccaactgttctgatattaccattcaaaaacaggttctgtggcgaacctcatttgtgaatctattacagagattaatagattatttctcctttttcaactaattctcagtggggaaatttaaccatatggtaaggagagaattagaatttcatcacattagagcaaaatgtaatgaaaagagtccaacacctggggccaactccgaaagccacaattaaaaggtttttaatgaaaccagagaaaccaaaaattgcatagtcttcagtacttctgccatataagaaagagttattggaaggtgttgggaaatattgtttttacttatgtcataaggatgaaaaccagctgctaaataccatgtgtacccagagaccgaactcaggagtgagatgaccgcgtgtaccagtgcccatccggagaggagcacttgtttttacattctcccttcccgaaccctccaagaacaaccgaggctgatccagatgtccttaaatggcttccgggtaaataaatatgcataaatgcctcacttcgtgtgggagcggatttgactcctggtgaagttgactcttttgaagcaatcagattttcatcttaaggaaagtttgagaaaccggtttgtttgtttgttttcttcctgtttaggaaattgtgtacttcacaattaccatcactgtaacagttatttggagaccactgcaaaatcactgccaccccaccttaaaaaaaaatgggctgcatgatcacttgctcttcattttgcttttttctttctttttttccaatctgggtaggaaatgggcagtggcgggtgtggaaacgaggcagagtgttcggggggacgactgctttgctctctgaccagctgaaaacctagagtgaattttgggcaagccagctgggacaccaccttctctcggaaagtcccatccccaaatccagaccagtcatcctacgaacaggggtggagtataattctcgcccggaagggtaatttagcacaagctgagacagcagtggcgagggaagggcagtggggggtggggtgcggtgggtgggggcgtctgctttccacaggactcccaggcttcgccgccgatctacaatttgctgaaggagcaaagaacatcctcggctctaagtagggcttttagtgtgctcattgatgagtgaaagtcgccacacatgtcaagctaaaggcagttgttgggttactaacaggacccagcgccttgcaaacatatgcgctaagctgtgtatacagatggcaggcagaataatggagcaggcgccttttataaagctctagctgctgcctgtcttcagacctgggaaatgaaactattcagacttgcggccagatagcgcctgcgattgtttgttaccgttttaatcctattaattaaaacgttaacctgattgggtagaaagcgctgtcccaacaggcgagtcttcttcataataacctactcagagataatgatgtaaaagactcccccgtctgtggcggcggctgtttgatgggtccggaaatctcttgaaggtgaatccaagcaagataaacggtgcggagagg

SEQ ID NO: 40548 - DNA, 2300 bp, Homo sapien
catttggaggtagaaattttgatgacaaactcttaagaaactttaccctctttgacgggccctggcatggttaacagtgccatacaagtggaaaaagatttccagggagaatgtggccttcaaagttcatgccagtagccagaaacttggaatctcttctgggtttcaccactgaccccattcatctctcctccttgtaacaagtaaacaagtaaattagggctacttctaattgtgcatccctgcaaaaactttagttccaccttctctgaaactcctttcttttttgttacctttcaagcaaagagtaacacagaagagaggtgattgcttcttccacaaagcacagcataataaaatgtttgatcaaaatattttaataaagattctttctgacatagatacacatacaaatggtcgtacatagctgtcatagtctgattgacctatttaatatatatatcattctttacacatccaaaacccgccaacagatccatcacagctcccaactcaccatccaacctgacaaactgaatttgtattatctgcaaggagtggaaaatagcaggactccatttttaaaaaagattttcttgattttcatagggcggaaaggcagtcaaacagccatgcaaaactaaaactgaaagctcactttgggtaaatagcttcttgttcttccttagttttctttctttttaaattttatttttttagaaaaataacaaaggatttcacaccataggcaaatcaaaccagtcttttaacttaaataattctccacagttaaaataacatatatgtacatatatattaaaagcaattaaattagaccttttaaaaatgcacagcacagcctggaaaaatatttgcttagcatgttcttacgtatagcaactattgctgtgatgtttttcccttttggaatgtaaaggagtcccctttcaaaaaagagatcaattcattcatcaattaagaatacacctttcctgtaatttttggactgaagcaatttattaaagctcaatttaaatacagggatgatgcaactgaaaatatccaggtgacctttcataaacctaagcagctcagatacatcaatatttctcttcatacttgttggcaaataaacctttaaacacttggcacacagcataagtaatctataaaacaattttagaggcattaaaaaaatctgcacataagacccatgactttaacacatgataaatactgttgatgtggaagggtcattgaagaataacaaataaataccatgaattgttaatacatcattgcagagtagaaagtaacaaggtgcacataaatatttttaaatgcaattctttcagccacagtcagtttttttatatcactctcgccaaaactttgagcattttcacaggattaaagttcagagacaataaaaaatacaagtctttcatagtaacatgtctctctctctcgctctctctctctctctgggttttatttccccctcacttaagtcaacatttcaagtttttctcctggctcagaatcaaaatttattttcaagtgccctttctgatttgtctgaatgaatattccatctctcatgctacccaacccctaacccctcctctccccctcagcactagccaaatccacaattattagtaggattagtattttgccattcaaacactctccaggcttaataaccaagcactacttctcaacttatgtttcacctttaaggaagattccacttcctcgcggtctaggctgccaccaaagttgccacttttctgagaaaaaaaagacatccatactccatcccaactccacctccctcctccctccctccccaccccaaagaccgagattctggggatgtcaaggctaaaagtcccgtttgtctctgatacttctcctcagttcttgcctctgctttgtttgctctgcaagtgtttcacaactacgagaggaccaaaataaagggggtggggagcagcttttcgctttcctctagattttgggtcggtcttgtgtttttcgggggtgtgtttaaggcttctccgtgcactgtttgcagaggctggaggagacgctgttaaacagggcgcacttctccgggcaggaggcagccgggggcagtccggcgctgaacgggtagccggctgcctgctcgtaggcgccgagcgccgggtgcagggcagcagctgctgccgctgcagccgccgagctgggcagggaggcagccgagatggcctggccctggttgaggtaggcgactaggcgccgcatctcctcca
